United States Patent Application Publication US 2018/0126003 A1 - sequence listing, part 2

SEQ ID NO: 274 - DNA, 5643 bp, Artificial Sequence
  derived and/or modified sequence
atgccctacagcgtgggcttccgggaggccgacgccgccaccagcttcctcagagccgcacggagcgggaacctcgacaaggccctcgatcacctgcgtaatggagtcgacataaacacatgcaatcagaatggcctgaacggcttgcacctcgcgtccaaggagggccatgtcaaaatggtggtggaattattgcataaagaaattatcctcgagactacgactaaaaaaggcaatactgcgttgcatatcgcagccctggccggccaggatgaagttgttagagaactcgtaaactacggtgcgaacgttaatgcgcagtctcagaaggggttcacccccctttacatggcggcacaggaaaatcatttggaggtggtcaagttcctgttagaaaacggagccaatcagaatgtggccacagaagatgggtttacgcctctcgcagtggccttgcagcagggccacgaaaacgttgtggcacatctgatcaactatggcaccaaggggaaggtgagactccctgccctgcatatcgctgctcgaaatgacgacactcgtaccgccgccgtgctactacagaacgaccccaacccagatgtcctctcaaagacaggctttacaccccttcacattgccgcgcattacgagaacttgaatgtcgctcagctgttgctcaataggggagcatcagttaatttcaccccacagaacgggatcacaccccttcatatcgctagcagaagaggaaatgtgattatggtaaggctactgttggaccgcggagctcagattgagaccaagaccaaagacgagctgacaccactgcattgcgccgcccggaatggccatgtgcggatctcagagattctcttggaccacggcgcccctatacaggcaaagaccaagaatggtctcagtcccatccatatggcggcgcagggggatcatctggactgtgttcgcctgctgctgcaatacgacgccgagattgacgatattaccttggaccacttgaccccactgcacgttgctgcccattgcggacatcacagagtcgcaaaggttctgctggataagggcgccaagccaaactctcgggccttgaacggtttcactcctctgcacatcgcctgcaagaaaaatcatgtgcgggtgatggaactcctcctgaagaccggggcttccatagacgccgtgacggaaagcggcctcacacccctccatgtggcatcatttatgggccacctcccaattgttaaaaatctgttgcaaagaggcgccagccctaacgtctccaacgtgaaggtggagaccccactgcatatggccgcccgcgccgggcacactgaggtcgctaagtacctcctccagaacaaagcaaaggtcaatgctaaggcaaaagatgaccagacccctttgcactgtgctgctcgaatcggccacactaacatggtaaagctcctgcttgagaataacgcaaaccctaatctcgctaccaccgcggggcacacaccacttcatatcgccgctagagaggggcatgtcgagacggttttggcccttctggaaaaggaagcaagtcaagcttgcatgactaaaaaaggattcacccctttacacgtggccgccaagtacggaaaagtgagagtggctgaactgctgctggagagagatgctcaccctaacgccgcaggcaagaacggcctcaccccgctacatgtcgccgtgcatcataacaacctcgacatcgttaaactccttctccctcgaggcgggtcccctcattcccctgcttggaatggatacaccccgcttcacatcgccgctaaacagaatcaagtggaagtggctcggagtctcctccagtatggtggttccgcgaatgcagagtctgtgcagggcgtcacccccctccatctggccgcccaagagggccacgccgagatggttgccctgttactgtcaaaacaggctaacgggaaccttggcaacaaatcaggactgacccctctgcaccttgtggcacaggaagggcacgtcccggttgctgacgtgcttatcaagcatggggtgatggtggacgctaccaccagaatgggctacactcctttacacgtggctagccattacggcaatatcaagctcgtaaagtttctcctgcagcaccaagccgatgtaaatgccaaaaccaagctaggctactcccccctccaccaggccgcccagcagggtcatacggatatcgtgacccttcttctcaaaaatggcgcttcccctaacgaggtctcttcggatgggaccacgcccctggccatcgctaagcggctggggtacatctctgtgacggacgtgttaaaagttgtcaccgatgaaacaagtttcgtcctcgtctccgataagcatagaatgtccttccctgagaccgttgacgagatattggatgtgtccgaagatgaaggggaagagttaatcagctttaaggctgaacgccgcgactccagagatgtcgatgaagagaaagagctgctagatttcgtgcctaaactggatcaagtcgtggagtctcctgccatccccaggattccatgcgctatgccggagaccgttgtgatcagatccgaagagcaggagcaggcgtcaaaggagtatgacgaagactcactgataccctcctccccagccactgaaacaagtgataatatatcccctgttgcatcacccgtgcataccggattcttggtttcctttatggtagatgcgagaggtggctccatgagagggagccggcacaacggattgagggtcgtaattccgccgcgcacctgtgctgccccaacacggattacgtgccgcctcgtcaagccacaaaagctttccacacccccccctttagccgaggaagaaggactggcaagtcggattatcgcattgggacctacaggcgcacagttcctgtccccagttatagttgaaattcctcattttgctagtcatgggcgaggcgacagagagctcgtcgtgctgcgcagcgagaatggcagtgtgtggaaggaacaccggagccgatacggcgagtcttacctggaccaaatcctgaacggaatggatgaagaactggggtctctggaggaactcgagaagaaacgagtctgcagaatcatcacaactgactttcctctgtacttcgtaattatgtctcgtctgtgccaggactacgacactatcggaccagaaggtggtagcctcaaatctaaactcgtgccactggtccaggctaccttcccggaaaatgccgtgacgaaacgggtgaagttggcccttcaagcccagccggtccctgacgagttggttaccaaactgctggggaaccaggctacattttcccctattgtgacagtcgaacccagacggaggaagttccatcggccaatcggcctacgtattccccttcctccatcctggactgataatccacgagactctggcgagggtgacaccacgtcactcagactcctgtgcagcgttattggaggcaccgatcaggcccagtgggaagacattactggaaccacgaagttagtgtacgcgaacgagtgtgctaactttacaaccaatgtttccgcccggttttggcttagcgattgtccaagaaccgcagaggccgtgaattttgcaactttactgtataaagagctaaccgcagtgccctacatggccaaattcgtaatctttgctaaaatgaacgatccgagagaaggcagactgagatgctattgcatgactgatgataaagtcgacaagacccttgaacagcacgaaaatttcgtcgaggtggcccggtccagggatatagaggtccttgagggtatgagcttgttcgccgaattaagcggtaatcttgtgccagtcaagaaagctgcgcagcagagaagttttcactttcagtccttccgggagaatagacttgccatgccggtcaaggtgcgggattcttcacgtgagcccggcggatctctttcctttcttaggaaggccatgaaatacgaagatacacagcatatcctttgccacctcaatataactatgcctccttgcgctaagggtagcggcgctgaagaccgtaggaggacacctacgccactggcactccggtactccatcctgagtgaaagcacccccggatctctgagcggtacagagcaggccgaaatgaagatggctgtgatttctgagcatctaggcctgtcctgggccgagctggctagagagctccaattttctgtggaggacatcaatcgtatcagggtcgagaatcctaattctttgttagaacagtcagtagctctgcttaatctctgggtgataagggagggacaaaatgcaaacatggaaaatctctacaccgcactacagagcattgacaggggcgaaattgtaaacatgctagagggcagcggacgacagtctaggaatttgaagcctgataggcggcacaccgacagagattattcactgtcacctagtcagatgaacggatattcatctctccaggacgaattactgagtcccgcctctttgggatgtgctctctcctctcccctgagggctgatcagtattggaacgaggttgcagtccttgatgccatcccactggccgccacagaacatgatacaatgctagagatgtctgacatgcaggtgtggagcgccggcttaacgccaagcctcgtaacagctgaggattcatcgctggagtgttcgaaagcagaggacagcgacgcaacaggacatgaatggaaactggagggcgcgctgagcgaggaacctaggggtccggagcttggctccttggagcttgtcgaggacgatacagtcgactcagacgccactaatggactaattgatctgctggagcaagaggaagggcaacgatccgaagaaaagctaccagggtccaaaaggcaagacgacgccactggtgccggccaggattctgagaacgaagtgtcgctggtgagcggtcaccagcggggtcaagctcggataacccatagccccaccgtttcacaagtcaccgagagaagtcaggacaggttgcaggactgggatgcggacggcagtatcgtgtcttatctgcaggatgccgctcagggctcttggcaagaagaagtcacacaaggaccacactcattccaggggactagcacaatgaccgaagggcttgagccgggggggtcccaggaatatgagaaggtactggtctcagtatccgaacacacttggaccgagcagcctgaagcagaaagctcccaagcagaccgcgacaggagacagcagggccaggaagaacaggtccaagaggctaagaatacttttacccaggttgtgcaaggaaacgaattccagaacataccaggagagcaggttaccgaggaacagtttacagatgagcaaggcaatattgttacgaaaaagatcatccgcaaagtagtgaggcagatagatctctcctcagcagacgcagcccaggagcacgaggaggtggagctccgcggctctggtctgcagcccgatttgatagagggacggaaaggggctcagattgtgaaacgggcgagcctgaagcgaggtaaacaatag

SEQ ID NO: 275 - DNA, 5577 bp, Artificial Sequence
  derived and/or modified sequence
atgccctacagcgtgggcttccgggaggccgacgccgccaccagctttctgcgagccgcgaggtctggtaatttggataaggcactggatcatctgcggaatggagttgatataaacacatgcaaccaaaacggattgaatgggcttcacctggcctcaaaagaagggcacgttaagatggtggtcgaactgctgcataaagaaattatcctggagacaaccaccaagaagggtaacacagcattgcatatcgcagcattggccggacaagacgaggtggtcagagagcttgtgaactacggagccaatgtgaatgcccagtcacaaaaaggctttacccctctgtacatggcagcgcaagagaaccacctggaggtcgtgaagtttctcctcgaaaacggagcaaaccagaacgttgcaaccgaagatggatttacccccctggccgtagcactacagcagggccatgagaacgtggtggctcatctgatcaattatggaactaaaggtaaagtgagactaccggcactccacatcgctgctcggaatgacgatacccggacagctgcagtgttgttacagaatgaccccaatccagatgtgctctccaagactggattcacaccccttcatatcgcggctcactatgagaatttgaatgtcgcacagcttctactcaaccgaggggcctccgtgaactttactccccagaacggtatcacgcctctgcatatcgcttctaggaggggcaacgtgatcatggtgcgactgctgctggatcgcggtgcccaaatagaaacaaagaccaaggatgaattaactcctctgcactgcgctgctcggaatggacatgtgcgtattagcgagatcctgctggaccatggagctccaattcaggcaaagactaagaacggactgtcaccaatacatatggctgcacaaggcgatcatctggattgcgtgagactgctcctgcagtatgacgctgaaattgatgacattaccctggaccacctgaccccactgcatgttgccgcacactgcggtcaccacagggtcgccaaggtgctactggataaaggggccaagcctaattctagagccctcaatggctttacccctctgcatatagcctgtaaaaaaaaccatgtacgcgtcatggagctcctcctgaagacaggcgcgtctattgatgctgtgacagaatccggattgacacctctgcatgtggcatctttcatgggacacctgcccatcgtcaaaaacctactccagaggggcgcttcacctaacgtttcgaatgtcaaagtggagactcctctacacatggctgctagggccggccatactgaagtcgctaagtatttactgcagaacaaggcaaaggttaacgcaaaagctaaggatgaccagacaccgttacactgcgcggcccggatcggtcacactaatatggtaaagctgctcttagaaaataatgccaatcctaacctggccaccacggccggccacactcctctccacattgccgctcgggaaggccacgtggagaccgtcctggccttattggagaaagaggcctctcaggcatgcatgacgaagaaaggtttcaccccccttcacgtcgccgctaagtacggcaaagtgagagtggcggaactgctgctggagagggatgcccacccaaacgccgccggaaagaatggcttaacccctcttcatgtcgcggttcatcataataatctggacatcgtaaaacttttactacctagaggaggctcccctcatagcccagcctggaatggctacacacctctgcacatcgccgccaagcagaaccaggttgaggtggctcgcagtctgctccagtacggaggaagcgccaatgcggaatccgtccagggtgtcacccccctgcatcttgctgcccaagaggggcatgccgagatggtagccttgctcctgtcaaagcaggctaacggcaacttggggaacaaatccggccttactcccctgcatttggtggcacaggaaggtcatgtgcccgtggcagacgtgctgataaaacatggagtcatggtggatgccaccacgcggatgggctacactccactgcacgtggccagccattacggaaacattaagctcgtcaagtttctgctgcaacaccaggcagacgtgaatgcaaaaacaaagctgggatattctccactccatcaagcggctcagcaagggcataccgacattgtcacactgttgttaaaaaacggggctagtcctaatgaagtttcctccgatgggacaacacctttagctatcgccaagcgcctaggctacataagtgtgaccgacgtgctaaaggtggtgaccgatgagacatccttcgtgttggtgagcgataaacatcgaatgtcattcccagaaacggtcgatgaaattttagatgtgtctgaggacgagggggaagagttaatttcgtttaaggctgaacggcgtgatagtcgtgatgtcgacgaagagaaggagctgctcgattttgtgcctaaacttgaccaggtcgtggagagccccgcaatacctcgtatcccctgcgctatgcccgaaacagtggtgatccggtcggaggaacaggagcaagcatccaaagagtatgatgaagattcgctgatacccagtagccccgctaccgagacttccgataacattagtccagtagccagccctgtgcatacaggcttcttagtctcctttatggttgatgcccgcggtggaagcatgcgcgggagtcgccataacggactcagagtggtgatacctccacgaacttgtgccgcccctactcgcatcacatgtaggctggtgaaacctcagaaactgtccactcccccgcctctggccgaagaagaaggactcgcaagcagaataatcgctctgggaccgacgggggcccagtttctgtcacccgtgatcgtggagataccccatttcgctagtcacgggagaggcgatagggagctagttgtgttgagatcagagaacggcagtgtctggaaggagcataggagtcgttatggggagagctatctggaccagatcctcaatgggatggacgaagagctagggtctcttgaagagctcgagaagaaacgcgtttgccggattattacgactgattttcctttgtatttcgtgatcatgtcgcgcctgtgccaggactatgacacaatagggcctgaaggcggatcccttaaatccaaattggtgccactagttcaggctacattcccagaaaatgcagtgacaaagcgggtgaaactagcactccaggcccagcccgtgcctgacgaacttgtcactaaattgctgggcaaccaggcaacctttagccccatcgtgactgtggaacccaggcggcggaagttccacagaccaatcggactgcggattcccctccctccctcatggacagataatccacgagacagcggggagggcgatacaacaagcctccggctcctgtgcagcgtaattggcggcaccgatcaagcccagtgggaggacataacaggtaccacaaagctggtctatgccaatgagtgcgccaatttcactaccaacgtctcagcccgtttctggctctcggactgtcctagaaccgccgaggctgtaaattttgcaaccttgctctacaaagagctcacagccgtcccatacatggctaagttcgttatctttgcaaagatgaacgaccccagggaaggccggcttcggtgttactgcatgacagatgataaggtggataaaacactggagcagcacgagaattttgtcgaagtcgctagatctagggacatagaggtgctggaaggaatgtcactgttcgctgagctgtcagggaacctcgtgcctgtcaaaaaggcggctcagcaaagatcattccattttcaaagtttcagggagaacagacttgccatgccagttaaggtaagggattcaagtagggagccaggcggctctctgtcctttctaagaaaagccatgaaatacgaagatacccagcatattctctgccacctgaatatcacaatgcccccttgcgcgaagggaagcggtgccgaagataggaggagaactccaactcctttggctctccggtactccatcctgagcgagagtacccccggtagcttaagcggcacagagcaggctgagatgaagatggccgtgatttcagaacatttggggctgtcttgggcagagttagctagggagttgcagttcagcgtggaagacatcaatagaatcagggttgagaaccccaatagcctgctggagcaatctgtcgcactgttgaacctatgggtcatacgggaaggtcagaatgccaacatggaaaatctgtataccgccctccagagcatcgacagaggcgagattgtcaacatgctggaaggttctggaagacagagtaggaatttgaagcctgatcggagacataccgaccgggattacagtttgtctcccagccaaatgaacggatacagctcactgcaagatgaactgctctcccctgcctccctgggctgcgcgctgagcagtcccttgcgggcagatcagtattggaacgaggtcgccgtgttggacgctatccctttggctgccactgaacacgacaccatgctcgagatgtcagacatgcaggtctggtcagcaggcctaacacctagtctcgtgactgcagaggactcgtccttggagtgttccaaggcagaagactcagacgccacgggtcatgagtggaagcttgagggcgccttgagtgaggaaccgagaggaccagagttgggctcactagaactggttgaggatgatactgtggatagtgacgctacgaatggcctcattgacctgttagaacaagaggaaggccaacgatccgaagagaaactgcccgggtctaaacgacaagacgacgccacaggtgctggtcaagacagcgagaatgaggtcagcctggtcagcgggcaccagcgtggacaagcaaggatcacacattcccctactgttagccaggtgaccgaacggtcacaggaccggctccaggattgggacgctgacggctctattgtgtcatatctgcaggacgcagcgcaggggtcatggcaagaagaggtgacacagggtccccattctttccagggaacatctacaatgactgaaggtcttgagcccggggggtcccaagagtatgagaaagtcctcgtgtctgttagcgaacacacttggacggagcagccagaggctgagagctcacaggccgatcgtgaccgacgccaacaggggcaagaggagcaggttcaagaagcaaaaaatacatttacgcaagtcgtgcagggcaatgagtttcaaaatatcccaggggagcaggtaaccgaggaacagttcactgacgagcaaggaaatattgtgacaaaaaaggtggagctgcgaggcagtggcctgcagccagatctcatcgaagggcgaaagggcgcacagattgtgaaacgcgctagcttaaagaggggtaagcagtag

SEQ ID NO: 276 - DNA, 8297 bp, Artificial Sequence
  derived and/or modified sequence
agaggctgcggtgagtccgccagccccagctgctcctcctcaagcccccaaggcccttcggcgggcccctgctgaaagaccggcatgccctattctgtgggcttccgcgaagccgatgctgctaccagctttctgagagcagcaagatcaggtaacttggacaaagctttggatcacctgcggaatggggtagatattaacacctgtaaccagaatgggttgaatggcttgcatctggcttctaaggaaggccatgtgaaaatggtggttgaacttctgcacaaagaaatcattctagaaacgacaaccaagaaggggaacacggccctgcacatcgctgctctagccgggcaggatgaggtggtccgggagcttgtcaactatggagccaacgtcaacgcccagtcacagaaaggttttacacccctgtacatggcagcacaagagaaccacttggaagtggttaagtttttactggaaaatggagctaaccagaatgtagccacagaagacggcttcacgcctctggcggtagccctgcagcagggccatgagaacgtcgtcgcgcacctcatcaactacggcaccaaggggaaggtgcgcctcccggccctgcacatcgcggcccgcaacgacgacacgcgcacggctgcggtgctgctgcagaacgaccccaacccggacgtgctttccaagacgggattcacgcccctgcacattgcggctcactacgagaacctcaacgtggcccagttgctcctcaacagaggagccagcgtcaatttcacaccacagaacggcatcacgccactgcacatcgcctcccgcaggggcaacgtgatcatggtgcggctgctgctggatcggggagcccagatagaaaccaagaccaaggacgaattgacacctctccactgtgcagctcgaaatgggcacgtgcgaatctcagagatcctgctggaccacggggcaccaatccaagccaaaaccaagaacggcctgtccccaattcacatggcggctcagggagaccacctcgactgtgtccggctcctgttgcaatacgacgcagagatagacgacatcaccctggaccacctgaccccactccacgtggctgcccactgtggacaccacagggtggctaaggtccttctggataaaggggccaaacccaactccagagccctgaatggctttacccccttacacatcgcctgcaaaaagaaccacgtccgtgtcatggagctgctgctgaagacgggagcctcgatcgacgcggtcaccgagtctggcctgacacctctccacgtggcctccttcatggggcaccttcccatcgtgaagaacctcctgcagcggggggcgtcgcccaacgtctccaacgtgaaagtggagaccccgctacacatggcagccagagccgggcacacggaagtggccaaatatttactccagaacaaagccaaagtcaatgccaaggccaaggatgaccagaccccacttcactgtgcagctcgcatcggccacacaaacatggtgaagctcctgctggaaaataacgccaaccccaacctggccaccaccgccgggcacacccccctgcacattgcagcccgtgagggccatgtggaaacagtcctggcccttctggaaaaggaagcatcccaggcctgcatgaccaagaaaggatttacccctctgcacgtggcggccaagtacgggaaggtgcgggtggcagagctgctgctggagcgggacgcacacccgaatgctgccggaaaaaatggcctgacccccctgcacgtggccgtccatcacaacaacctggacatcgtcaagctgctgcttccccggggcggctccccgcacagccctgcctggaatggctacacccctttgcacatcgctgccaagcagaaccaggtggaggtggcccgtagtctgctgcagtatgggggctcagcaaacgccgagtcggtgcaaggtgtgacgccccttcacctggccgcccaggagggccacgcagagatggtggctctgctgctctcgaaacaagccaatggcaacctggggaacaagagcggactcactcccctccatctggtagcacaagaaggccacgttccagtggcagatgtgctgatcaaacacggcgtcatggtggacgccaccacccggatgggctacactcccctccatgtggccagtcactatggaaacatcaagctggtgaagtttctgctgcagcaccaggcagatgtcaatgccaagaccaagctaggatacagccccctgcaccaggcagcccagcagggacacacagacatcgtgactctgcttctgaaaaacggtgcttccccaaacgaggtcagctcggatggaaccacacctctggccatagccaagcgcttgggctacatttctgtcaccgacgtgctcaaggtcgtcacggatgaaaccagtttcgtgttagtcagtgataagcatcgaatgagtttccctgagacagttgatgagatcctggatgtctcggaagatgaaggggaagaactcatcagcttcaaggctgagaggcgggattccagggatgttgatgaagagaaggagctgctggattttgtgccgaagctagaccaagtggtggaatctccagccatccccaggattccctgtgccatgcctgagacagtggtgatcaggtcagaagagcaggagcaggcatctaaagagtatgatgaggactccctcatccccagcagcccggccaccgagacctcagacaacatcagcccggtggccagcccggtgcatacagggtttctggtgagcttcatggttgacgcccggggtggttccatgagaggaagtcgccacaacggcctgcgagtggtgatcccgccacggacgtgcgcagcgcccacccgcatcacctgccgcctggtcaagccccagaagctcagcacgccgcccccactggccgaggaggagggcctggccagcaggatcatagcactggggcccacgggggcacagttcctgagccctgtaatcgtggagatcccgcactttgcctcccatggccgtggagaccgcgagctcgtggttctgaggagcgaaaacggctccgtgtggaaggagcacaggagccgctatggagagagctacctggatcagatcctcaacgggatggacgaagagctggggagcctggaggagctagagaagaagagggtgtgccgaatcatcaccaccgacttcccgctgtacttcgtgatcatgtcacggctctgccaggactacgacaccatcggtcccgaagggggctccctgaagagcaagctggtgcccctggtacaggcaacgttcccggagaatgccgtcaccaagagagtgaagctggctctgcaggcccagcctgtcccggatgagcttgtcactaagctcctgggcaaccaggccacattcagccccattgtcaccgtggagccccggcgccggaagttccaccgccccattgggcttcggatcccactacctccttcctggaccgacaacccgagggacagcggggagggagacaccaccagcctgcgcctgctttgcagcgtcattggaggaacagaccaagcccagtgggaagacataacaggaaccaccaaacttgtatatgccaacgagtgcgccaacttcaccaccaatgtctctgccaggttttggctgtcggactgtcctcggactgctgaggctgtgaactttgccaccctgctgtacaaagagctcactgcagtgccctacatggccaaattcgtcatctttgccaagatgaatgacccccgagaggggcgcctgcgctgctactgcatgacagatgataaagtggacaagaccctggagcagcatgagaacttcgtggaggtggcccggagcagggacatagaggtgttggaaggaatgtccctgtttgcagaactctctgggaacctggtgcctgtgaagaaagctgcccagcagcggagcttccacttccagtcatttcgggagaaccgtctggccatgcctgtaaaggtgagggacagcagtcgagagccgggagggtccctgtcgtttctgcgcaaggcgatgaagtacgaggacacccagcacattctctgccacctgaacatcaccatgcccccctgcgccaagggaagtggagccgaagataggagaaggaccccgacgcccctggccctgcgatacagcattctcagtgagtccacaccaggttctctcagtgggacagagcaggcagagatgaagatggctgttatctcagagcacctcggtctcagctgggcagagttggcccgggagctgcagttcagtgtggaagacatcaacaggatccgagtggaaaatcccaactccctgttggagcagagtgtggccttgctgaacctctgggtcatccgtgaaggccaaaacgcaaacatggagaatctgtacacagccctgcagagcattgaccgtggcgagatcgtgaacatgctggagggttccggccgacagagccgcaacttgaagccagacaggcggcacaccgaccgcgactactcgctgtcaccctcccagatgaatggttactcctcactgcaggacgagctgctgtcccctgcctccctgggctgtgcactttcctctccgctacgtgcagaccagtactggaatgaggtggccgtcctagacgccatccccttggcggccacggagcatgacaccatgctggagatgtctgacatgcaggtgtggtctgcgggcctcacgccttctctggtcactgctgaggactcctctctggagtgtagcaaggctgaggactctgatgccacaggtcacgagtggaagttggagggggcactctcagaggaaccgcggggccccgagttgggctctctggaacttgtggaggacgacacagtggattcagatgccacaaatggccttatcgatttgcttgaacaggaggaaggtcagaggtcagaagagaagctgccaggttctaagaggcaggatgacgcgacaggtgcagggcaggactcagagaatgaagtgtctcttgtttcaggccatcagagggggcaagcccgaatcacacattcccccaccgtgagtcaggtgacggagaggagtcaggacagactgcaggactgggatgcagacggctcgattgtctcatacctgcaagatgctgcacaaggttcctggcaagaggaggtcacgcaaggtccacactcattccagggaacaagtaccatgactgaagggctagagcccggtggatctcaggagtacgagaaggtcctggtgtctgtaagtgagcacacgtggacagaacagcccgaggctgagagctcccaggccgacagggaccggaggcagcaaggccaagaagagcaggtgcaggaggccaagaacaccttcacccaagtggtgcaggggaatgagtttcagaatattccaggggagcaggtgacagaggagcaattcacggatgagcagggcaacattgtcaccaagaagatcattcgcaaggtggttcgacagatagacttgtccagcgccgatgccgcccaggagcacgaggaggtggagctgagagggagtggcctacagccggacctgatagagggcaggaagggggcgcagatagtgaagcgggccagcctgaaaagggggaaacagtgaccccgagccgctctccttggagtagcctctcgggaggatcacacctcgacacccaacccctgaaccccacacactctgccatgcacacaggaggagagctggacctgagggccaccgcagcggtgcacacattcctctgggctgacggcatgacctctgtaagggactcctgctagtcccctcttggcatgaatgactgactgtagacgcatgacctccaggcttcaatcctgcctcttgcaatgacagctgatctgtcggaaccaggacacaaaagcagcaagaagcggggagagagagggatagaaaacaagcgcaggagagcctgcgaacgcaaaagtgaatgagggctttttgtggctggggatgggttttggttttggggttttttttttaaattgttttgacttcgtacagggtactttttcccaacctcatctgtcagaaatccatgtgggcttcctggaaagaaaaaaaaaaaaaagaaaactaggcatgaaatcagtttaacaccttaatcttaagccatgtcctcatctgcccaccctccccaacccacatacctccattccacttgtgacaccccctcgactccctggtgacgctcctcccagatcgctctacatgacattcaggacacacacacacacacacacacaccactcgcctccactgaatctacacacagattttactgtgacttctgaagctgtatagactctgctgtggataaattggaattttttatgttgtctctctctctgccaatttcaatacgaatcatcttccaatggaaaatcattaccttgaagagtgcattcggggttccttgtgttagggacttaagaatctgaggcgaggacccccaggcttacctgtaggactcaaagggagccaggaccccatctgaaagggtctcctctctcagttgggggacaggccggtggctgacccaggattgcaccagcatgtccatagagaagaggttttctatgtcttcaagcactatatcatagtccgtgttcaaagtgtaaactgtacagtaatcagccttgtgtatatgaaaaacaataaatactatgcaaaccaatagaaacatttagcagtacgtacagagcctgacagcgcagctcctgaggacttctgcggctgcaggagaaggagctgtggcctgtctttcagtgaaagaggaaggaaaggagtagggctagtgaatgtatctgccaggtcttagaagtcaggaccacccagggtctcccagagtgaacttggtgctctaagtccaggcagcctgcaggctggggaccctgggtgcaggtgccaggctcgaggctgttccctgtcctgcctcagtgcctcccctctgcccagcccctgtggcctcttggagaggcgagccagggggctccccggaccgcatggccggtgagagtagagtcggaggcggagagcctggacgcccagaggccggggccaggctctgggtcaaggcaggaaggagacagacagctggcagttcctcgcctcggtgccatcagggaggagccttaagttccactagagcctccggcccagggaggccagaatcagcacaatcccggccccgccctcgcggcgggcgcccccagggccaggagagagagacagggctggctcctctcgcccctggagccgcggtgtggacggcccggccccgtccgccccgccgctctgcgggagtgtcctcgggacacacttaaaccttccaagtagcacagaagccccctccacgtcagaggccccctggccgcggggcctgtgagcggagaggggccctgcttcccacacaaatccgccccggtgcacccccggccaggcaggccccggggcggcctaggcgccttgtcggccgggggtggggctgcttttgcttcctttagaggggcgggcagggagaggaagctctagctccgggcctgagtttccccgaggctgcgtcggaggagctgcagggcgagcccggacggctgccgtctccgccagaggccaccccggcccggcctccagggcgcagaggcgcccccctccatcctcccccatcccgggggccacggcaggggggccgcacagcgcggctgggaccgattcggtgacggcccaaggaagctgggctcagggctcgcctctcccgcctcgatcctgcaccttcctctcccaggtcgctgctgcagccaacccagtagcccccttagcgcccccgcggaccccgcagctccagactccgctttggcacctctgctccggctggcatggctgcacgctccggctgctagtaggagccgttaggggaggagtttggggtctccacacgatgcctagagaatgctgcagtctgcacattagacgctttttagaagttttgaaattaccttgatttttttaattgttatgaaaatggatcttttcttgactctcccacatgctctgttatgggagagaatcccctaccctactctgatgtatagaccattctcccttcaccagccgaaccaatgtcaaaattaataaagaaatggactaatggcacaggg

SEQ ID NO: 277 - DNA, 8225 bp, Artificial Sequence
  derived and/or modified sequence
agaggctgcggtgagtccgccagccccagctgctcctcctcaagcccccaaggcccttcggcgggcccctgctgaaagaccggcatgccctattctgtgggcttccgcgaagccgatgctgctaccagctttctgagagcagcaagatcaggtaacttggacaaagctttggatcacctgcggaatggggtagatattaacacctgtaaccagaatgggttgaatggcttgcatctggcttctaaggaaggccatgtgaaaatggtggttgaacttctgcacaaagaaatcattctagaaacgacaaccaagaaggggaacacggccctgcacatcgctgctctagccgggcaggatgaggtggtccgggagcttgtcaactatggagccaacgtcaacgcccagtcacagaaaggttttacacccctgtacatggcagcacaagagaaccacttggaagtggttaagtttttactggaaaatggagctaaccagaatgtagccacagaagacggcttcacgcctctggcggtagccctgcagcagggccatgagaacgtcgtcgcgcacctcatcaactacggcaccaaggggaaggtgcgcctcccggccctgcacatcgcggcccgcaacgacgacacgcgcacggctgcggtgctgctgcagaacgaccccaacccggacgtgctttccaagacgggattcacgcccctgcacattgcggctcactacgagaacctcaacgtggcccagttgctcctcaacagaggagccagcgtcaatttcacaccacagaacggcatcacgccactgcacatcgcctcccgcaggggcaacgtgatcatggtgcggctgctgctggatcggggagcccagatagaaaccaagaccaaggacgaattgacacctctccactgtgcagctcgaaatgggcacgtgcgaatctcagagatcctgctggaccacggggcaccaatccaagccaaaaccaagaacggcctgtccccaattcacatggcggctcagggagaccacctcgactgtgtccggctcctgttgcaatacgacgcagagatagacgacatcaccctggaccacctgaccccactccacgtggctgcccactgtggacaccacagggtggctaaggtccttctggataaaggggccaaacccaactccagagccctgaatggctttacccccttacacatcgcctgcaaaaagaaccacgtccgtgtcatggagctgctgctgaagacgggagcctcgatcgacgcggtcaccgagtctggcctgacacctctccacgtggcctccttcatggggcaccttcccatcgtgaagaacctcctgcagcggggggcgtcgcccaacgtctccaacgtgaaagtggagaccccgctacacatggcagccagagccgggcacacggaagtggccaaatatttactccagaacaaagccaaagtcaatgccaaggccaaggatgaccagaccccacttcactgtgcagctcgcatcggccacacaaacatggtgaagctcctgctggaaaataacgccaaccccaacctggccaccaccgccgggcacacccccctgcacattgcagcccgtgagggccatgtggaaacagtcctggcccttctggaaaaggaagcatcccaggcctgcatgaccaagaaaggatttacccctctgcacgtggcggccaagtacgggaaggtgcgggtggcagagctgctgctggagcgggacgcacacccgaatgctgccggaaaaaatggcctgacccccctgcacgtggccgtccatcacaacaacctggacatcgtcaagctgctgcttccccggggcggctccccgcacagccctgcctggaatggctacacccctttgcacatcgctgccaagcagaaccaggtggaggtggcccgtagtctgctgcagtatgggggctcagcaaacgccgagtcggtgcaaggtgtgacgccccttcacctggccgcccaggagggccacgcagagatggtggctctgctgctctcgaaacaagccaatggcaacctggggaacaagagcggactcactcccctccatctggtagcacaagaaggccacgttccagtggcagatgtgctgatcaaacacggcgtcatggtggacgccaccacccggatgggctacactcccctccatgtggccagtcactatggaaacatcaagctggtgaagtttctgctgcagcaccaggcagatgtcaatgccaagaccaagctaggatacagccccctgcaccaggcagcccagcagggacacacagacatcgtgactctgcttctgaaaaacggtgcttccccaaacgaggtcagctcggatggaaccacacctctggccatagccaagcgcttgggctacatttctgtcaccgacgtgctcaaggtcgtcacggatgaaaccagtttcgtgttagtcagtgataagcatcgaatgagtttccctgagacagttgatgagatcctggatgtctcggaagatgaaggggaagaactcatcagcttcaaggctgagaggcgggattccagggatgttgatgaagagaaggagctgctggattttgtgccgaagctagaccaagtggtggaatctccagccatccccaggattccctgtgccatgcctgagacagtggtgatcaggtcagaagagcaggagcaggcatctaaagagtatgatgaggactccctcatccccagcagcccggccaccgagacctcagacaacatcagcccggtggccagcccggtgcatacagggtttctggtgagcttcatggttgacgcccggggtggttccatgagaggaagtcgccacaacggcctgcgagtggtgatcccgccacggacgtgcgcagcgcccacccgcatcacctgccgcctggtcaagccccagaagctcagcacgccgcccccactggccgaggaggagggcctggccagcaggatcatagcactggggcccacgggggcacagttcctgagccctgtaatcgtggagatcccgcactttgcctcccatggccgtggagaccgcgagctcgtggttctgaggagcgaaaacggctccgtgtggaaggagcacaggagccgctatggagagagctacctggatcagatcctcaacgggatggacgaagagctggggagcctggaggagctagagaagaagagggtgtgccgaatcatcaccaccgacttcccgctgtacttcgtgatcatgtcacggctctgccaggactacgacaccatcggtcccgaagggggctccctgaagagcaagctggtgcccctggtacaggcaacgttcccggagaatgccgtcaccaagagagtgaagctggctctgcaggcccagcctgtcccggatgagcttgtcactaagctcctgggcaaccaggccacattcagccccattgtcaccgtggagccccggcgccggaagttccaccgccccattgggcttcggatcccactacctccttcctggaccgacaacccgagggacagcggggagggagacaccaccagcctgcgcctgctttgcagcgtcattggaggaacagaccaagcccagtgggaagacataacaggaaccaccaaacttgtatatgccaacgagtgcgccaacttcaccaccaatgtctctgccaggttttggctgtcggactgtcctcggactgctgaggctgtgaactttgccaccctgctgtacaaagagctcactgcagtgccctacatggccaaattcgtcatctttgccaagatgaatgacccccgagaggggcgcctgcgctgctactgcatgacagatgataaagtggacaagaccctggagcagcatgagaacttcgtggaggtggcccggagcagggacatagaggtgttggaaggaatgtccctgtttgcagaactctctgggaacctggtgcctgtgaagaaagctgcccagcagcggagcttccacttccagtcatttcgggagaaccgtctggccatgcctgtaaaggtgagggacagcagtcgagagccgggagggtccctgtcgtttctgcgcaaggcgatgaagtacgaggacacccagcacattctctgccacctgaacatcaccatgcccccctgcgccaagggaagtggagccgaagataggagaaggaccccgacgcccctggccctgcgatacagcattctcagtgagtccacaccaggttctctcagtgggacagagcaggcagagatgaagatggctgttatctcagagcacctcggtctcagctgggcagagttggcccgggagctgcagttcagtgtggaagacatcaacaggatccgagtggaaaatcccaactccctgttggagcagagtgtggccttgctgaacctctgggtcatccgtgaaggccaaaacgcaaacatggagaatctgtacacagccctgcagagcattgaccgtggcgagatcgtgaacatgctggagggttccggccgacagagccgcaacttgaagccagacaggcggcacaccgaccgcgactactcgctgtcaccctcccagatgaatggttactcctcactgcaggacgagctgctgtcccctgcctccctgggctgtgcactttcctctccgctacgtgcagaccagtactggaatgaggtggccgtcctagacgccatccccttggcggccacggagcatgacaccatgctggagatgtctgacatgcaggtgtggtctgcgggcctcacgccttctctggtcactgctgaggactcctctctggagtgtagcaaggctgaggactctgatgccacaggtcacgagtggaagttggagggggcactctcagaggaaccgcggggccccgagttgggctctctggaacttgtggaggacgacacagtggattcagatgccacaaatggccttatcgatttgcttgaacaggaggaaggtcagaggtcagaagagaagctgccaggttctaagaggcaggatgacgcgacaggtgcagggcaggactcagagaatgaagtgtctcttgtttcaggccatcagagggggcaagcccgaatcacacattcccccaccgtgagtcaggtgacggagaggagtcaggacagactgcaggactgggatgcagacggctcgattgtctcatacctgcaagatgctgcacaaggttcctggcaagaggaggtcacgcaaggtccacactcattccagggaacaagtaccatgactgaagggctagagcccggtggatctcaggagtacgagaaggtcctggtgtctgtaagtgagcacacgtggacagaacagcccgaggctgagagctcccaggccgacagggaccggaggcagcaaggccaagaagagcaggtgcaggaggccaagaacaccttcacccaagtggtgcaggggaatgagtttcagaatattccaggggagcaggtgacagaggagcaattcacggatgagcagggcaacattgtcaccaagaaggtggagctgagagggagtggcctacagccggacctgatagagggcaggaagggggcgcagatagtgaagcgggccagcctgaaaagggggaaacagtgaccccgagccgctctccttggagtagcctctcgggaggatcacacctcgacacccaacccctgaaccccacacactctgccatgcacacaggaggagagctggacctgagggccaccgcagcggtgcacacattcctctgggctgacggcatgacctctgtaagggactcctgctagtcccctcttggcatgaatgactgactgtagacgcatgacctccaggcttcaatcctgcctcttgcaatgacagctgatctgtcggaaccaggacacaaaagcagcaagaagcggggagagagagggatagaaaacaagcgcaggagagcctgcgaacgcaaaagtgaatgagggctttttgtggctggggatgggttttggttttggggttttttttttaaattgttttgacttcgtacagggtactttttcccaacctcatctgtcagaaatccatgtgggcttcctggaaagaaaaaaaaaaaaaagaaaactaggcatgaaatcagtttaacaccttaatcttaagccatgtcctcatctgcccaccctccccaacccacatacctccattccacttgtgacaccccctcgactccctggtgacgctcctcccagatcgctctacatgacattcaggacacacacacacacacacacacaccactcgcctccactgaatctacacacagattttactgtgacttctgaagctgtatagactctgctgtggataaattggaattttttatgttgtctctctctctgccaatttcaatacgaatcatcttccaatggaaaatcattaccttgaagagtgcattcggggttccttgtgttagggacttaagaatctgaggcgaggacccccaggcttacctgtaggactcaaagggagccaggaccccatctgaaagggtctcctctctcagttgggggacaggccggtggctgacccaggattgcaccagcatgtccatagagaagaggttttctatgtcttcaagcactatatcatagtccgtgttcaaagtgtaaactgtacagtaatcagccttgtgtatatgaaaaacaataaatactatgcaaaccaatagaaacatttagcagtacgtacagagcctgacagcgcagctcctgaggacttctgcggctgcaggagaaggagctgtggcctgtctttcagtgaaagaggaaggaaaggagtagggctagtgaatgtatctgccaggtcttagaagtcaggaccacccagggtctcccagagtgaacttggtgctctaagtccaggcagcctgcaggctggggaccctgggtgcaggtgccaggctcgaggctgttccctgtcctgcctcagtgcctcccctctgcccagcccctgtggcctcttggagaggcgagccagggggctccccggaccgcatggccggtgagagtagagtcggaggcggagagcctggacgcccagaggccggggccaggctctgggtcaaggcaggaaggagacagacagctggcagttcctcgcctcggtgccatcagggaggagccttaagttccactagagcctccggcccagggaggccagaatcagcacaatcccggccccgccctcgcggcgggcgcccccagggccaggagagagagacagggctggctcctctcgcccctggagccgcggtgtggacggcccggccccgtccgccccgccgctctgcgggagtgtcctcgggacacacttaaaccttccaagtagcacagaagccccctccacgtcagaggccccctggccgcggggcctgtgagcggagaggggccctgcttcccacacaaatccgccccggtgcacccccggccaggcaggccccggggcggcctaggcgccttgtcggccgggggtggggctgcttttgcttcctttagaggggcgggcagggagaggaagctctagctccgggcctgagtttccccgaggctgcgtcggaggagctgcagggcgagcccggacggctgccgtctccgccagaggccaccccggcccggcctccagggcgcagaggcgcccccctccatcctcccccatcccgggggccacggcaggggggccgcacagcgcggctgggaccgattcggtgacggcccaaggaagctgggctcagggctcgcctctcccgcctcgatcctgcaccttcctctcccaggtcgctgctgcagccaacccagtagcccccttagcgcccccgcggaccccgcagctccagactccgctttggcacctctgctccggctggcatggctgcacgctccggctgctagtaggagccgttaggggaggagtttggggtctccacacgatgcctagagaatgctgcagtctgcacattagacgctttttagaagttttgaaattaccttgatttttttaattgttatgaaaatggatcttttcttgactctcccacatgctctgttatgggagagaatcccctaccctactctgatgtatagaccattctcccttcaccagccgaaccaatgtcaaaattaataaagaaatggactaatggc

SEQ ID NO: 278 - DNA, 5643 bp, Artificial Sequence
  derived and/or modified sequence
atgccctacagcgtgggattcagggaagctgacgcagccactagctttctacgtgccgcaagaagcggtaacctagataaggctctcgatcacctgcgcaatggggtggatatcaatacttgtaatcagaacggattaaatggactgcacctggccagcaaagagggccatgtcaaaatggtggtggaattactccacaaagaaatcatcttggaaactacaaccaaaaagggcaatactgcccttcacattgcagcactggccggacaggacgaggtcgtgcgagaactggtaaactacggagctaatgtgaatgcgcaaagccagaagggcttcacaccgttgtatatggctgcgcaagagaatcacctggaggtcgtgaagtttttgctggagaacggagctaatcagaacgtcgccactgaggacgggtttactccactcgccgtggccctgcaacagggacacgaaaatgtggtggcccatctgattaattacgggacaaaaggcaaggtccggcttcccgcactgcatatagctgcacgcaatgatgatacacgaacggccgctgtactattgcagaatgacccaaatcccgacgtgttgagcaaaacaggcttcacaccacttcacatagccgcacattacgagaatctgaacgtggctcagttgcttctgaacaggggggcttccgtgaatttcacgccgcaaaacggcatcacccctcttcatattgcctcacgcaggggaaacgtaatcatggtcagactgttgttggaccgcggagcccaaatagaaacaaagacaaaggacgagctgactcccctccactgcgccgctagaaacggacacgtacgcataagcgagatactgttggaccatggcgcaccaattcaggctaagacgaagaacggactctcacccatccatatggccgctcagggggaccatcttgactgcgtcagactcctgttacagtacgacgctgagatagacgatattaccctggatcacttgacacctctgcatgtggccgctcattgtgggcatcatcgtgtggccaaggtattgttggacaagggagccaaaccgaattctagggccctcaatggcttcactccgctgcacattgcgtgtaaaaaaaatcacgtgcgggtcatggaacttctcctaaaaacaggggcttctatagatgctgttaccgagtccggcctgaccccgctacacgtggcctctttcatgggccacctgcccatcgtgaaaaatttgttgcagagaggcgcttctccaaatgtatctaacgttaaagtagagacgcctttacatatggcagccagagcaggacacacagaggtggccaagtaccttctgcaaaacaaggcaaaagtcaacgcgaaagccaaggacgaccagactccactccattgcgcggctcggatcgggcacaccaatatggtgaagcttctgctcgagaacaatgctaacccaaacttagctaccaccgccggtcacacgcctctccacatagcggctcgggaaggacatgtcgaaaccgtcctggccctcctggagaaagaggcctctcaagcctgcatgaccaagaagggctttacccctcttcatgtcgctgcaaagtacggaaaggtcagagtggcagagctcctgctggaacgcgatgcacaccctaatgccgcaggtaagaatggcctgaccccgctgcacgtggccgtgcaccacaacaaccttgacattgtgaagctgttgctgccacgcggaggttctccacactctcctgcatggaacgggtacaccccattgcacatcgccgctaaacagaaccaggtggaggtcgctagatctctactgcaatatggtggtagcgccaacgcagagtctgtgcagggcgtgacccccttacacttggcggctcaggaagggcacgccgagatggtcgcgctgctcttgagcaagcaggcaaatgggaatcttgggaataagtcgggactgacaccactgcacttggtagcacaggaaggacacgtgcctgtggccgatgtactgatcaagcatggagtgatggttgacgctaccacacgcatgggatacactccactacacgtagcatcacattacgggaacattaagttagtgaagttcctgcttcaacatcaagccgatgtgaatgccaaaaccaagctgggatattcccctctgcaccaagctgcccagcaaggccacaccgatatagtgacactgttattgaaaaatggcgcaagccccaacgaagtctcaagtgatggaaccacgcccctggccattgctaagaggttaggctatatttccgtgacggacgttttgaaggtggtgactgacgaaacctccttcgtattggttagtgacaagcatagaatgtcttttccagaaaccgtagatgaaatcttggacgtttcagaagacgagggagaagagctgatttcttttaaagccgagagaagagactctcgtgacgtcgacgaagaaaaagaactgctcgatttcgtgcccaagctcgaccaagttgtggaatccccagccatcccgagaattccttgtgcaatgccagagacagtggttatccggtctgaagagcaagagcaagcttctaaggagtacgatgaggacagcctgattccttcgtcaccggctacggagacatctgacaacatctcacccgtggcctcccccgtgcacacagggttcctggtctcgtttatggttgatgcgagaggcggatctatgcggggtagccggcacaatggactgagggtcgtcattcctcccaggacttgcgcagctcccaccaggatcacttgtcggctcgtgaaaccccaaaagctgtcgacacccccacctctggcagaagaagagggcctggcatcaagaataatagccctcggccctacaggagcccagtttctctcgccggtgatcgttgagatacctcacttcgctagccacgggcgtggggaccgggaattagtggtgctccggagcgaaaacggctctgtttggaaagaacacagaagcaggtacggggagagctacctggatcagattttaaatgggatggacgaagagctgggttcattagaggagctggagaaaaaacgggtgtgccgcattattacgacagacttccctttgtactttgtcattatgagcagactgtgccaggattacgacacaatcggtcctgaggggggatctctgaaaagcaaactcgtacctcttgttcaggctacctttcctgaaaacgctgtaactaaaagggtgaaactggccctacaggcccaaccagtgccagatgagctagtgaccaagctcctcggcaaccaggctacatttagtcctattgtgactgtcgagccccgacggaggaaatttcacagacctattggtcttcgaatccccctgcctccatcgtggacggataaccccagggatagcggggagggcgataccaccagcctgcgtctgctctgttcagtgatcggagggacagaccaggcacagtgggaagacattacaggcactacgaaattggtatacgctaacgagtgcgccaattttactactaatgtgagcgccagattttggttgtctgattgccccagaactgctgaggcagtgaactttgccaccctgctctataaggagcttactgccgtcccttacatggccaagttcgtgatttttgctaaaatgaatgatcccagagaagggcgactgcgctgttactgcatgaccgacgacaaggtggacaagactttggaacaacatgaaaactttgtcgaggtggctaggagccgagacatagaggtgctagaaggaatgtccctgtttgcagaactcagcgggaatctagttcccgtgaaaaaggcagcccagcaacgttcctttcacttccagtcttttcgcgagaatagattggcaatgcctgttaaggtcagagactcaagccgggaacctggcggttcactgtctttcctgagaaaagccatgaaatatgaagatacccagcacatactatgtcaccttaacatcactatgcccccttgcgccaaaggatctggcgctgaggacagacggaggactcccacgcccctggcactccgatattccattctctctgagtccacgcccggttccctcagtgggaccgaacaggccgaaatgaagatggctgtgatctccgagcacttggggttgagctgggctgagctggcaagagaacttcagttttccgtggaagacatcaaccggatacgggtggaaaacccgaactcgctgcttgagcaatctgttgctctgctcaacctgtgggtgattcgcgaagggcaaaacgcgaatatggagaacctgtacactgccctgcagagcattgaccggggtgaaattgttaatatgctcgaaggatcagggaggcagagtcggaatctgaaacccgaccggcgacacaccgaccgggattattccctgagccctagtcagatgaacgggtacagttccttgcaagatgagctcctgtccccggctagcctgggctgtgccttgagcagccctctgagagccgatcagtattggaatgaagtcgcagttctcgacgctatcccactagctgctactgaacatgataccatgctagaaatgtcagacatgcaggtttggagcgcgggattgactccctctttagtaactgcggaggatagcagtcttgaatgttctaaggcagaggactctgatgccaccggacatgaatggaagctggaaggggctctgtccgaagaacctcggggtcctgaactgggttcccttgagctggtcgaggatgacactgtggacagtgatgctacaaatggcctgattgatttgcttgagcaggaggagggacagaggtcagaagaaaagctccctggttccaaacgtcaagatgatgctacaggggctggtcaggattccgagaacgaggtcagtctcgtttctggacatcagcgcggtcaggcacggatcacacactcaccaacagtgagccaggtaaccgagcgctcccaggaccgcctgcaggactgggatgctgatgggtccattgtcagctacttacaggacgcggctcagggttcatggcaggaggaggtaacccagggcccacacagcttccagggcacatccactatgactgaggggttagagcccggtggaagccaggaatacgagaaggtgctggtgtccgtctcagaacacacttggactgaacagccagaggcggaatcatcacaggccgacagagaccgtcgccaacagggacaggaggagcaagttcaggaagcaaaaaacacatttacacaggttgttcagggcaatgagtttcagaatatccctggggagcaagttaccgaggagcagtttactgacgaacaggggaacattgtgactaaaaaaattatacgtaaggtggtgagacaaatagacctgagctcagccgatgccgcacaagagcatgaggaggtcgagctgcgcggatccggactgcagcccgacctgatagagggtcgcaaaggcgcacagatagtgaagagggcgtccctaaaaaggggaaaacaatat

SEQ ID NO: 279 - DNA, 5576 bp, Artificial Sequence
  derived and/or modified sequence
atgccttactcagtcggtttcagagaagctgacgctgccactagcttcttgcgcgctgccagaagcggaaacctggataaggcactggatcacctgcgaaacggcgttgacataaatacatgcaaccagaatggactcaatgggctgcacctggcctccaaagaagggcacgtgaagatggtcgttgaactgttgcacaaggagattattctggagactaccacaaaaaaggggaacacagccctgcatattgcagctctggccggtcaggacgaggtggtcagggagttggttaactatggagccaatgtgaacgcgcagagccagaaagggttcacccccctgtacatggcagctcaggaaaaccacctcgaagtagtgaagttcctgctggagaatggagcgaaccagaacgtggctaccgaggatggttttacacccctggcagtggcgttgcagcagggacacgaaaacgtcgttgcgcatttgatcaattacgggacaaaaggtaaagtccgactccctgctctgcatattgccgcacgcaacgatgacactaggaccgcggctgttcttcttcagaatgatccaaatcctgacgtactgtccaagactgggtttactccattgcacatcgccgcacactatgaaaacctcaacgtggctcagctcctccttaacagaggcgcttcagtgaactttaccccacagaacgggattacccccctgcatatagccagtcggagggggaacgttatcatggtgcggctcttgctggaccgcggagcacagatcgaaactaagacaaaggatgaactcacaccactacattgtgctgcacggaatgggcacgtgagaatcagcgaaattttgctcgatcacggagcacctattcaagccaagacaaaaaacggactatcacctattcacatggccgctcagggagaccatctggactgcgtccggctgctcctgcagtacgatgccgaaatcgatgacataacacttgaccacctcacccctcttcatgtggctgcccactgcggccaccaccgcgtggccaaggtgctcttagacaaaggcgcaaaacctaacagccgagccctgaatggcttcactccattacatattgcttgcaagaagaatcatgtgcgagtaatggagctgctcctgaagacgggtgcatctattgatgccgttaccgaatcagggctgactcctctgcatgtggccagctttatgggacatctgccaattgtaaaaaacctgctgcaacgaggtgctagccccaacgtttccaatgtgaaagttgagaccccgcttcatatggccgcacgcgcaggacacaccgaggtggccaaatacttattacagaataaggccaaagtgaatgcaaaggcaaaggatgatcagaccccactgcactgtgccgcacgcattggccatactaacatggtcaagctcctcctagaaaataacgcgaatcccaatctcgccacaactgctggtcacacaccattgcacattgctgcccgagagggccacgttgaaaccgtgcttgctttgttggaaaaggaagcgtcccaagcttgcatgacaaagaagggatttaccccccttcacgtcgccgctaagtacggaaaggtaagagttgccgagctcttgctggagcgagacgcacatcccaacgctgccggtaagaatggcctgacacctctgcatgtggcggtgcatcacaataacctcgatatagttaagctgctcctaccgagagggggttccccccattcacccgcatggaatggatacactcccctgcacattgccgcaaaacagaatcaagtagaagtagctaggagcttgctccagtatggcggttcagcaaacgccgagtccgttcagggtgtcacacctctgcatttggctgcacaggaggggcatgccgaaatggtggcgctcctgttgagcaaacaggccaatggaaatctgggcaacaagtccggactgacccccctccacttagtggcccaggaagggcatgtaccagtcgccgatgtcctgatcaagcatggagtcatggtggacgctactaccagaatgggttacactccactgcacgtagcaagtcactacggcaacatcaaactcgttaagttcctgctgcagcaccaggcggacgtaaacgccaagactaagctagggtattcgccattacaccaagcagcccaacaaggtcacaccgatatagtcactctgttactgaagaacggcgcttcaccaaacgaggttagttccgatggaactacaccactggcaatcgcaaaacgactcggctacatcagtgtgaccgacgttctgaaagtggtgaccgatgagacatcatttgtcttggtgtctgataagcaccgaatgagtttccctgagacagttgacgagatcttggacgtttcagaggacgagggagaggagttgatcagcttcaaagcggaaaggagagatagcagggacgtggacgaggaaaaggagcttttggatttcgtccctaaactggaccaggttgttgagtccccggcaatccctcgtatcccgtgcgccatgcctgaaacagtcgtcatccgaagcgaggagcaggaacaggcatccaaagagtacgatgaagactctctgataccttctagtccagccacggagacgtccgataatataagtcctgtggcgtctcccgtccatacaggctttctcgtctccttcatggttgacgccagggggggatccatgagggggagtagacataacggcctccgggtagtcattccacctagaacctgcgctgcacccacccggatcacatgccgtttggttaagcctcagaagctgagcaccccccctccgctggctgaggaagagggattggctagcagaattatagctctcgggcctaccggggctcagttcctgagccctgtcatcgtggaaatcccccacttcgcgagtcacggaaggggggaccgcgaactcgtcgtgcttagatcagaaaacggcagtgtgtggaaggagcaccggagccggtatggagagtcttacctggatcagattctgaacggcatggacgaggaactggggagcctagaggagctggaaaagaagcgggtgtgtcggatcataacaacggatttccccctgtacttcgtgataatgtcacgcctctgccaggactacgacacaattggacccgagggcggttctctgaaaagtaagctcgtgcctctggtacaggctacatttcccgagaatgcagtgacaaaacgggtcaagctggctctgcaggcccagcccgtcccagacgagctggtcaccaagctcctgggcaatcaggctaccttctccccgatcgtaaccgttgaaccgagacggcgaaaatttcatcgtcctatcgggctgaggattcccctgccgccttcttggacagataaccctagggattccggggagggcgataccacttctctgcgcctgctatgctcggttatcgggggtacagatcaggcacagtgggaagacatcaccggcaccaccaagcttgtgtacgctaatgaatgtgctaacttcacgacgaatgtgagtgcacggttctggctaagcgactgccccaggacagccgaagcggtaaacttcgcaacgctgctgtataaggaactcactgctgtgccgtatatggcgaagttcgtgatctttgcgaagatgaatgatccaagggagggccgtctgaggtgctattgcatgacggacgataaagtggacaagaccctggagcaacacgagaacttcgtcgaggtggctcgctcaagagacattgaagtgttggagggcatgtctctttttgcagagctgtctggcaatctggttcctgtgaaaaaagccgctcagcaacgtagcttccatttccagtcattcagggaaaaccggctcgctatgcctgtgaaggtccgggacagttctcgggaacctggtgggtctctgagcttcctccgcaaagctatgaaatacgaagacacgcagcacattctgtgtcacctgaatatcactatgcccccatgtgcaaaaggctctggcgctgaagaccgaaggcgcacccccacacctctcgctcttcgatattcaatcttgagtgaaagcacacccggatctctgtccggcaccgagcaggcagaaatgaaaatggctgttatatctgagcacctgggcctgagctgggcggagttagcaagggagctacagttctcagtggaggacattaacagaatacgggtggaaaatccaaacagtctcctggagcagtctgtcgctcttttaaatctatgggtcattcgggagggccagaacgccaacatggagaacctgtacactgccctgcagtccattgacaggggtgaaatagtgaacatgctcgagggttcaggaaggcaaagccgtaacttgaagcccgacagaagacacactgaccgggattactctcttagtccatcacagatgaatggatactcttctctgcaggatgagctcttgtccccagctagcctggggtgtgcgctgtccagtcccctcagggccgaccaatattggaacgaagtggctgtgttggacgccataccactggccgctaccgagcacgatacgatgctggagatgagcgacatgcaggtctggagtgcaggactaaccccctcactcgttacagctgaggatagcagccttgagtgctcaaaggcggaggattccgatgccacaggccatgagtggaaacttgagggagccctgtccgaagaacctcggggtccagagttaggttctctggagttagtggaggatgacactgtggactctgacgccactaacggcttaatcgaccttctcgagcaggaagagggccaacggtctgaagagaagctgcccggatctaagagacaagacgacgcaactggcgctgggcaggactcagagaacgaagtttcccttgtgtcggggcaccaacgtgggcaggctagaattacacactctcccacggtgagtcaggtgacagaacgctcccaggataggctgcaggactgggatgctgatgggagtatcgtcagctatttgcaggacgcagcgcagggatcctggcaggaggaggtgacccaaggaccacattctttccagggcactagcactatgacagaaggacttgagcctgggggaagtcaggagtacgagaaggttttggtcagcgtatccgaacatacatggaccgaacagcctgaagcagagagctcacaggcagatagggacagaagacagcaggggcaggaggaacaggtgcaggaggcaaagaataccttcactcaagtggtccagggtaatgaattccagaatatccctggcgagcaggtgaccgaggagcagttcacagacgagcaggggaacattgtgactaaaaaggtggagcttcgcggatccggtctccagccagacttaattgaggggagaaaaggtgcccaaattgttaaaagggcatcactcaaaaggggtaagcagta

SEQ ID NO: 280 - DNA, 5643 bp, Artificial Sequence
  derived and/or modified sequence
atgccctacagcgtgggcttcagagaggccgacgccgccaccagcttcctgagagccgccagaagcggcaacctggacaaggccctggaccacctgagaaacggcgtggacatcaacacctgcaaccagaacggcctgaacggcctgcacctggccagcaaggagggccacgtgaagatggtggtggagctgctgcacaaggagatcatcctggagaccaccaccaagaagggcaacaccgccctgcacatcgccgccctggccggccaggacgaggtggtgagagagctggtgaactacggcgccaacgtgaacgcccagagccagaagggcttcacccccctgtacatggccgcccaggagaaccacctggaggtggtgaagttcctgctggagaacggcgccaaccagaacgtggccaccgaggacggcttcacccccctggccgtggccctgcagcagggccacgagaacgtggtggcccacctgatcaactacggcaccaagggcaaggtgagactgcccgccctgcacatcgccgccagaaacgacgacaccagaaccgccgccgtgctgctgcagaacgaccccaaccccgacgtgctgagcaagaccggcttcacccccctgcacatcgccgcccactacgagaacctgaacgtggcccagctgctgctgaacagaggcgccagcgtgaacttcaccccccagaacggcatcacccccctgcacatcgccagcagaagaggcaacgtgatcatggtgagactgctgctggacagaggcgcccagatcgagaccaagaccaaggacgagctgacccccctgcactgcgccgccagaaacggccacgtgagaatcagcgagatcctgctggaccacggcgcccccatccaggccaagaccaagaacggcctgagccccatccacatggccgcccagggcgaccacctggactgcgtgagactgctgctgcagtacgacgccgagatcgacgacatcaccctggaccacctgacccccctgcacgtggccgcccactgcggccaccacagagtggccaaggtgctgctggacaagggcgccaagcccaacagcagagccctgaacggcttcacccccctgcacatcgcctgcaagaagaaccacgtgagagtgatggagctgctgctgaagaccggcgccagcatcgacgccgtgaccgagagcggcctgacccccctgcacgtggccagcttcatgggccacctgcccatcgtgaagaacctgctgcagagaggcgccagccccaacgtgagcaacgtgaaggtggagacccccctgcacatggccgccagagccggccacaccgaggtggccaagtacctgctgcagaacaaggccaaggtgaacgccaaggccaaggacgaccagacccccctgcactgcgccgccagaatcggccacaccaacatggtgaagctgctgctggagaacaacgccaaccccaacctggccaccaccgccggccacacccccctgcacatcgccgccagagagggccacgtggagaccgtgctggccctgctggagaaggaggccagccaggcctgcatgaccaagaagggcttcacccccctgcacgtggccgccaagtacggcaaggtgagagtggccgagctgctgctggagagagacgcccaccccaacgccgccggcaagaacggcctgacccccctgcacgtggccgtgcaccacaacaacctggacatcgtgaagctgctgctgcccagaggcggcagcccccacagccccgcctggaacggctacacccccctgcacatcgccgccaagcagaaccaggtggaggtggccagaagcctgctgcagtacggcggcagcgccaacgccgagagcgtgcagggcgtgacccccctgcacctggccgcccaggagggccacgccgagatggtggccctgctgctgagcaagcaggccaacggcaacctgggcaacaagagcggcctgacccccctgcacctggtggcccaggagggccacgtgcccgtggccgacgtgctgatcaagcacggcgtgatggtggacgccaccaccagaatgggctacacccccctgcacgtggccagccactacggcaacatcaagctggtgaagttcctgctgcagcaccaggccgacgtgaacgccaagaccaagctgggctacagccccctgcaccaggccgcccagcagggccacaccgacatcgtgaccctgctgctgaagaacggcgccagccccaacgaggtgagcagcgacggcaccacccccctggccatcgccaagagactgggctacatcagcgtgaccgacgtgctgaaggtggtgaccgacgagaccagcttcgtgctggtgagcgacaagcacagaatgagcttccccgagaccgtggacgagatcctggacgtgagcgaggacgagggcgaggagctgatcagcttcaaggccgagagaagagacagcagagacgtggacgaggagaaggagctgctggacttcgtgcccaagctggaccaggtggtggagagccccgccatccccagaatcccctgcgccatgcccgagaccgtggtgatcagaagcgaggagcaggagcaggccagcaaggagtacgacgaggacagcctgatccccagcagccccgccaccgagaccagcgacaacatcagccccgtggccagccccgtgcacaccggcttcctggtgagcttcatggtggacgccagaggcggcagcatgagaggcagcagacacaacggcctgagagtggtgatcccccccagaacctgcgccgcccccaccagaatcacctgcagactggtgaagccccagaagctgagcacccccccccccctggccgaggaggagggcctggccagcagaatcatcgccctgggccccaccggcgcccagttcctgagccccgtgatcgtggagatcccccacttcgccagccacggcagaggcgacagagagctggtggtgctgagaagcgagaacggcagcgtgtggaaggagcacagaagcagatacggcgagagctacctggaccagatcctgaacggcatggacgaggagctgggcagcctggaggagctggagaagaagagagtgtgcagaatcatcaccaccgacttccccctgtacttcgtgatcatgagcagactgtgccaggactacgacaccatcggccccgagggcggcagcctgaagagcaagctggtgcccctggtgcaggccaccttccccgagaacgccgtgaccaagagagtgaagctggccctgcaggcccagcccgtgcccgacgagctggtgaccaagctgctgggcaaccaggccaccttcagccccatcgtgaccgtggagcccagaagaagaaagttccacagacccatcggcctgagaatccccctgccccccagctggaccgacaaccccagagacagcggcgagggcgacaccaccagcctgagactgctgtgcagcgtgatcggcggcaccgaccaggcccagtgggaggacatcaccggcaccaccaagctggtgtacgccaacgagtgcgccaacttcaccaccaacgtgagcgccagattctggctgagcgactgccccagaaccgccgaggccgtgaacttcgccaccctgctgtacaaggagctgaccgccgtgccctacatggccaagttcgtgatcttcgccaagatgaacgaccccagagagggcagactgagatgctactgcatgaccgacgacaaggtggacaagaccctggagcagcacgagaacttcgtggaggtggccagaagcagagacatcgaggtgctggagggcatgagcctgttcgccgagctgagcggcaacctggtgcccgtgaagaaggccgcccagcagagaagcttccacttccagagcttcagagagaacagactggccatgcccgtgaaggtgagagacagcagcagagagcccggcggcagcctgagcttcctgagaaaggccatgaagtacgaggacacccagcacatcctgtgccacctgaacatcaccatgcccccctgcgccaagggcagcggcgccgaggacagaagaagaacccccacccccctggccctgagatacagcatcctgagcgagagcacccccggcagcctgagcggcaccgagcaggccgagatgaagatggccgtgatcagcgagcacctgggcctgagctgggccgagctggccagagagctgcagttcagcgtggaggacatcaacagaatcagagtggagaaccccaacagcctgctggagcagagcgtggccctgctgaacctgtgggtgatcagagagggccagaacgccaacatggagaacctgtacaccgccctgcagagcatcgacagaggcgagatcgtgaacatgctggagggcagcggcagacagagcagaaacctgaagcccgacagaagacacaccgacagagactacagcctgagccccagccagatgaacggctacagcagcctgcaggacgagctgctgagccccgccagcctgggctgcgccctgagcagccccctgagagccgaccagtactggaacgaggtggccgtgctggacgccatccccctggccgccaccgagcacgacaccatgctggagatgagcgacatgcaggtgtggagcgccggcctgacccccagcctggtgaccgccgaggacagcagcctggagtgcagcaaggccgaggacagcgacgccaccggccacgagtggaagctggagggcgccctgagcgaggagcccagaggccccgagctgggcagcctggagctggtggaggacgacaccgtggacagcgacgccaccaacggcctgatcgacctgctggagcaggaggagggccagagaagcgaggagaagctgcccggcagcaagagacaggacgacgccaccggcgccggccaggacagcgagaacgaggtgagcctggtgagcggccaccagagaggccaggccagaatcacccacagccccaccgtgagccaggtgaccgagagaagccaggacagactgcaggactgggacgccgacggcagcatcgtgagctacctgcaggacgccgcccagggcagctggcaggaggaggtgacccagggcccccacagcttccagggcaccagcaccatgaccgagggcctggagcccggcggcagccaggagtacgagaaggtgctggtgagcgtgagcgagcacacctggaccgagcagcccgaggccgagagcagccaggccgacagagacagaagacagcagggccaggaggagcaggtgcaggaggccaagaacaccttcacccaggtggtgcagggcaacgagttccagaacatccccggcgagcaggtgaccgaggagcagttcaccgacgagcagggcaacatcgtgaccaagaagatcatcagaaaggtggtgagacagatcgacctgagcagcgccgacgccgcccaggagcacgaggaggtggagctgagaggcagcggcctgcagcccgacctgatcgagggcagaaagggcgcccagatcgtgaagagagccagcctgaagagaggcaagcagtag

SEQ ID NO: 281 - DNA, 5577 bp, Artificial Sequence
  derived and/or modified sequence
atgccctacagcgtgggcttcagagaggccgacgccgccaccagcttcctgagagccgccagaagcggcaacctggacaaggccctggaccacctgagaaacggcgtggacatcaacacctgcaaccagaacggcctgaacggcctgcacctggccagcaaggagggccacgtgaagatggtggtggagctgctgcacaaggagatcatcctggagaccaccaccaagaagggcaacaccgccctgcacatcgccgccctggccggccaggacgaggtggtgagagagctggtgaactacggcgccaacgtgaacgcccagagccagaagggcttcacccccctgtacatggccgcccaggagaaccacctggaggtggtgaagttcctgctggagaacggcgccaaccagaacgtggccaccgaggacggcttcacccccctggccgtggccctgcagcagggccacgagaacgtggtggcccacctgatcaactacggcaccaagggcaaggtgagactgcccgccctgcacatcgccgccagaaacgacgacaccagaaccgccgccgtgctgctgcagaacgaccccaaccccgacgtgctgagcaagaccggcttcacccccctgcacatcgccgcccactacgagaacctgaacgtggcccagctgctgctgaacagaggcgccagcgtgaacttcaccccccagaacggcatcacccccctgcacatcgccagcagaagaggcaacgtgatcatggtgagactgctgctggacagaggcgcccagatcgagaccaagaccaaggacgagctgacccccctgcactgcgccgccagaaacggccacgtgagaatcagcgagatcctgctggaccacggcgcccccatccaggccaagaccaagaacggcctgagccccatccacatggccgcccagggcgaccacctggactgcgtgagactgctgctgcagtacgacgccgagatcgacgacatcaccctggaccacctgacccccctgcacgtggccgcccactgcggccaccacagagtggccaaggtgctgctggacaagggcgccaagcccaacagcagagccctgaacggcttcacccccctgcacatcgcctgcaagaagaaccacgtgagagtgatggagctgctgctgaagaccggcgccagcatcgacgccgtgaccgagagcggcctgacccccctgcacgtggccagcttcatgggccacctgcccatcgtgaagaacctgctgcagagaggcgccagccccaacgtgagcaacgtgaaggtggagacccccctgcacatggccgccagagccggccacaccgaggtggccaagtacctgctgcagaacaaggccaaggtgaacgccaaggccaaggacgaccagacccccctgcactgcgccgccagaatcggccacaccaacatggtgaagctgctgctggagaacaacgccaaccccaacctggccaccaccgccggccacacccccctgcacatcgccgccagagagggccacgtggagaccgtgctggccctgctggagaaggaggccagccaggcctgcatgaccaagaagggcttcacccccctgcacgtggccgccaagtacggcaaggtgagagtggccgagctgctgctggagagagacgcccaccccaacgccgccggcaagaacggcctgacccccctgcacgtggccgtgcaccacaacaacctggacatcgtgaagctgctgctgcccagaggcggcagcccccacagccccgcctggaacggctacacccccctgcacatcgccgccaagcagaaccaggtggaggtggccagaagcctgctgcagtacggcggcagcgccaacgccgagagcgtgcagggcgtgacccccctgcacctggccgcccaggagggccacgccgagatggtggccctgctgctgagcaagcaggccaacggcaacctgggcaacaagagcggcctgacccccctgcacctggtggcccaggagggccacgtgcccgtggccgacgtgctgatcaagcacggcgtgatggtggacgccaccaccagaatgggctacacccccctgcacgtggccagccactacggcaacatcaagctggtgaagttcctgctgcagcaccaggccgacgtgaacgccaagaccaagctgggctacagccccctgcaccaggccgcccagcagggccacaccgacatcgtgaccctgctgctgaagaacggcgccagccccaacgaggtgagcagcgacggcaccacccccctggccatcgccaagagactgggctacatcagcgtgaccgacgtgctgaaggtggtgaccgacgagaccagcttcgtgctggtgagcgacaagcacagaatgagcttccccgagaccgtggacgagatcctggacgtgagcgaggacgagggcgaggagctgatcagcttcaaggccgagagaagagacagcagagacgtggacgaggagaaggagctgctggacttcgtgcccaagctggaccaggtggtggagagccccgccatccccagaatcccctgcgccatgcccgagaccgtggtgatcagaagcgaggagcaggagcaggccagcaaggagtacgacgaggacagcctgatccccagcagccccgccaccgagaccagcgacaacatcagccccgtggccagccccgtgcacaccggcttcctggtgagcttcatggtggacgccagaggcggcagcatgagaggcagcagacacaacggcctgagagtggtgatcccccccagaacctgcgccgcccccaccagaatcacctgcagactggtgaagccccagaagctgagcacccccccccccctggccgaggaggagggcctggccagcagaatcatcgccctgggccccaccggcgcccagttcctgagccccgtgatcgtggagatcccccacttcgccagccacggcagaggcgacagagagctggtggtgctgagaagcgagaacggcagcgtgtggaaggagcacagaagcagatacggcgagagctacctggaccagatcctgaacggcatggacgaggagctgggcagcctggaggagctggagaagaagagagtgtgcagaatcatcaccaccgacttccccctgtacttcgtgatcatgagcagactgtgccaggactacgacaccatcggccccgagggcggcagcctgaagagcaagctggtgcccctggtgcaggccaccttccccgagaacgccgtgaccaagagagtgaagctggccctgcaggcccagcccgtgcccgacgagctggtgaccaagctgctgggcaaccaggccaccttcagccccatcgtgaccgtggagcccagaagaagaaagttccacagacccatcggcctgagaatccccctgccccccagctggaccgacaaccccagagacagcggcgagggcgacaccaccagcctgagactgctgtgcagcgtgatcggcggcaccgaccaggcccagtgggaggacatcaccggcaccaccaagctggtgtacgccaacgagtgcgccaacttcaccaccaacgtgagcgccagattctggctgagcgactgccccagaaccgccgaggccgtgaacttcgccaccctgctgtacaaggagctgaccgccgtgccctacatggccaagttcgtgatcttcgccaagatgaacgaccccagagagggcagactgagatgctactgcatgaccgacgacaaggtggacaagaccctggagcagcacgagaacttcgtggaggtggccagaagcagagacatcgaggtgctggagggcatgagcctgttcgccgagctgagcggcaacctggtgcccgtgaagaaggccgcccagcagagaagcttccacttccagagcttcagagagaacagactggccatgcccgtgaaggtgagagacagcagcagagagcccggcggcagcctgagcttcctgagaaaggccatgaagtacgaggacacccagcacatcctgtgccacctgaacatcaccatgcccccctgcgccaagggcagcggcgccgaggacagaagaagaacccccacccccctggccctgagatacagcatcctgagcgagagcacccccggcagcctgagcggcaccgagcaggccgagatgaagatggccgtgatcagcgagcacctgggcctgagctgggccgagctggccagagagctgcagttcagcgtggaggacatcaacagaatcagagtggagaaccccaacagcctgctggagcagagcgtggccctgctgaacctgtgggtgatcagagagggccagaacgccaacatggagaacctgtacaccgccctgcagagcatcgacagaggcgagatcgtgaacatgctggagggcagcggcagacagagcagaaacctgaagcccgacagaagacacaccgacagagactacagcctgagccccagccagatgaacggctacagcagcctgcaggacgagctgctgagccccgccagcctgggctgcgccctgagcagccccctgagagccgaccagtactggaacgaggtggccgtgctggacgccatccccctggccgccaccgagcacgacaccatgctggagatgagcgacatgcaggtgtggagcgccggcctgacccccagcctggtgaccgccgaggacagcagcctggagtgcagcaaggccgaggacagcgacgccaccggccacgagtggaagctggagggcgccctgagcgaggagcccagaggccccgagctgggcagcctggagctggtggaggacgacaccgtggacagcgacgccaccaacggcctgatcgacctgctggagcaggaggagggccagagaagcgaggagaagctgcccggcagcaagagacaggacgacgccaccggcgccggccaggacagcgagaacgaggtgagcctggtgagcggccaccagagaggccaggccagaatcacccacagccccaccgtgagccaggtgaccgagagaagccaggacagactgcaggactgggacgccgacggcagcatcgtgagctacctgcaggacgccgcccagggcagctggcaggaggaggtgacccagggcccccacagcttccagggcaccagcaccatgaccgagggcctggagcccggcggcagccaggagtacgagaaggtgctggtgagcgtgagcgagcacacctggaccgagcagcccgaggccgagagcagccaggccgacagagacagaagacagcagggccaggaggagcaggtgcaggaggccaagaacaccttcacccaggtggtgcagggcaacgagttccagaacatccccggcgagcaggtgaccgaggagcagttcaccgacgagcagggcaacatcgtgaccaagaaggtggagctgagaggcagcggcctgcagcccgacctgatcgagggcagaaagggcgcccagatcgtgaagagagccagcctgaagagaggcaagcagtag

SEQ ID NO: 282 - protein, 99 aa, Artificial Sequence
  derived and/or modified sequence
MQPRVLLVVALLALLASARASEAEDASLLSFMQGYMKHATKTAKDALSSVQESQVAQQARGWVTDGFSSLKDYWSTVKDKFSEFWDLDPEVRPTSAVAA

SEQ ID NO: 283 - protein, 117 aa, Artificial Sequence
  derived and/or modified sequence
MGTWGAPHRTLPCRNRGAMQPRVLLVVALLALLASARASEAEDASLLSFMQGYMKHATKTAKDALSSVQESQVAQQARGWVTDGFSSLKDYWSTVKDKFSEFWDLDPEVRPTSAVAA

SEQ ID NO: 284 - protein, 55 aa, Artificial Sequence
  derived and/or modified sequence
MQPRVLLVVALLALLASARASEAEDASLLSFMQGYMKHATKTAKDALSSVQESQV

SEQ ID NO: 285 - DNA, 354 bp, Artificial Sequence
  derived and/or modified sequence
atgggtacatggggtgctccacaccggaccctgccctgcaggaatcggggcgcaatgcagccacgcgttttactagtggtcgccctgctagccttgttagcatcggcaagagcgtctgaggctgaagatgcttctctcctctccttcatgcaaggatacatgaaacatgctaccaagaccgccaaagatgctctttccagtgttcaggagagccaggtggctcagcaggccaggggctgggttacagatggttttagttctcttaaagattactggtcaaccgtgaaagacaagtttagcgagttctgggacctggatcctgaggtccggccgacttccgctgtcgccgcgtag

SEQ ID NO: 286 - DNA, 168 bp, Artificial Sequence
  derived and/or modified sequence
atgcagccgagagtcttattagtcgtggctctgctggccctgctggcaagtgccagggcctccgaggccgaagatgccagcctattgtcgttcatgcaaggatatatgaagcacgcaacgaagacggcaaaagatgctttgagcagtgttcaggaatctcaggtgtag

SEQ ID NO: 287 - DNA, 300 bp, Artificial Sequence
  derived and/or modified sequence
atgcaacctagagtactcctggtggttgcccttctcgcgctcctggcctcagcgagagccagcgaggctgaggacgcttctctcttgagcttcatgcaaggttacatgaaacatgctaccaagacagctaaagacgcactcagttctgttcaagagagtcaagtcgctcagcaagcacgagggtgggtgactgacggatttagctcgttgaaagactactggtctaccgtgaaagacaaattctcggagttttgggatcttgaccctgaggtgcggcccacaagtgcagtcgccgcttag

SEQ ID NO: 288 - DNA, 354 bp, Artificial Sequence
  derived and/or modified sequence
atgggcacctggggcgccccccacaggaccctgccctgcaggaacagaggagccatgcagccccgggtgctgctggtggtggccctgctggccctgctggccagcgcccgggccagcgaggccgaggatgccagcctgctgtccttcatgcagggctacatgaagcacgccaccaagacagccaaggatgccctgagctctgtgcaggagagccaggtggcccagcaggcccggggctgggtgacagatggcttcagcagcctgaaggactactggagcacagtgaaggacaagttcagcgagttctgggacctggaccctgaggtgcggcccaccagcgctgtggccgcctag

SEQ ID NO: 289 - DNA, 168 bp, Artificial Sequence
  derived and/or modified sequence
atgcagccccgggtgctgctggtggtggccctgctggccctgctggccagcgcccgggccagcgaggccgaggatgccagcctgctgtccttcatgcagggctacatgaagcacgccaccaagacagccaaggatgccctgagctctgtgcaggagagccaggtgtag

SEQ ID NO: 290 - DNA, 300 bp, Artificial Sequence
  derived and/or modified sequence
atgcagccccgggtgctgctggtggtggccctgctggccctgctggccagcgcccgggccagcgaggccgaggatgccagcctgctgtccttcatgcagggctacatgaagcacgccaccaagacagccaaggatgccctgagctctgtgcaggagagccaggtggcccagcaggcccggggctgggtgacagatggcttcagcagcctgaaggactactggagcacagtgaaggacaagttcagcgagttctgggacctggaccctgaggtgcggcccaccagcgctgtggccgcctag

SEQ ID NO: 291 - DNA, 354 bp, Artificial Sequence
  derived and/or modified sequence
atgggcacctggggcgccccccaccggaccctgccctgccggaacagaggggctatgcagccaagagtgcttctcgtcgtcgcacttctggcactgctggcctctgcccgcgcatcagaagctgaggatgcatcccttctgtccttcatgcagggttatatgaaacacgcaaccaaaactgctaaggatgccctttcaagcgtccaggagtctcaagtcgcacagcaggcaagaggctgggtcacagacggattttcttctctgaaggactattggtcgactgtcaaggacaaattctccgaattttgggatcttgaccccgaggttcgacccacttcggctgttgccgcatag

SEQ ID NO: 292 - DNA, 168 bp, Artificial Sequence
  derived and/or modified sequence
atgcagccccgggtgctgctggtggtggccctgctggccctgctggccagcgctcgggcttccgaggctgaagatgcctcactcctgtcctttatgcagggatatatgaaacacgcgacaaaaactgcaaaagatgccctgagcagtgtccaggaaagtcaggtatag

SEQ ID NO: 293 - DNA, 300 bp, Artificial Sequence
  derived and/or modified sequence
atgcagccccgggtgctgctggtggtggccctgctggccctgctggcttccgcgcgcgcgtcggaagccgaggacgctagtctgctgtcttttatgcagggttacatgaagcatgccacaaagacggcaaaggacgctttaagtagcgttcaggagtctcaggttgctcaacaggcgagaggttgggttaccgatgggttttccagtcttaaggattactggtctaccgtcaaggacaaattttcagagttctgggacctggaccctgaagttcggcctacatcggcggtggctgcatag

SEQ ID NO: 294 - DNA, 354 bp, Artificial Sequence
  derived and/or modified sequence
atgggaacttggggtgcacctcacagaaccctgccgtgccggaatagaggcgctatgcagccgagagtactgcttgtagtcgccctcctcgcacttctggctagtgctcgcgcttccgaggctgaagacgcttctcttctgtcctttatgcagggttatatgaaacacgccactaaaacagccaaggacgccttgagctccgtccaggaatcacaggtcgcgcaacaagcccgaggatgggttacagatggattctcctctctcaaggattattggagcaccgtgaaggacaagttttctgagttctgggacttggaccccgaggttagacccacttccgctgtggccgcttag

SEQ ID NO: 295 - DNA, 168 bp, Artificial Sequence
  derived and/or modified sequence
atgcaacctagagtcctgctggttgtggcgctattagccctcctagccagcgccagggcttctgaagcggaggatgcctcattactatccttcatgcaggggtacatgaaacatgcaacaaagacagccaaggatgcactgagctccgttcaggagagccaggtgtag

SEQ ID NO: 296 - DNA, 550 bp, Artificial Sequence
  derived and/or modified sequence
aaccctcctgcctgtctgctcagttcatccctagaggcagctgctccaggaacagaggtgccatgcagccccgggtactccttgttgttgccctcctggcgctcctggcctctgcccgagcttcagaggccgaggatgcctcccttctcagcttcatgcagggttacatgaagcacgccaccaagaccgccaaggatgcactgagcagcgtgcaggagtcccaggtggcccagcaggccaggggctgggtgaccgatggcttcagttccctgaaagactactggagcaccgttaaggacaagttctctgagttctgggatttggaccctgaggtcagaccaacttcagccgtggctgcctgagacctcaataccccaagtccacctgcctatccatcctgcgagctccttgggtcctgcaatctccagggctgcccctgtaggttgcttaaaagggacagtattctcagtgctctcctaccccacctcatgcctggcccccctccaggcatgctggcctcccaataaagctggacaagaagctgctatga

SEQ ID NO: 297 - DNA, 604 bp, Artificial Sequence
  derived and/or modified sequence
ttcatccctagaggcagctgctccaggggccacgccacctccccagggaggggtccagaggcatggggacctggggtgcccctcacaggacacttccttgcaggaacagaggtgccatgcagccccgggtactccttgttgttgccctcctggcgctcctggcctctgcccgagcttcagaggccgaggatgcctcccttctcagcttcatgcagggttacatgaagcacgccaccaagaccgccaaggatgcactgagcagcgtgcaggagtcccaggtggcccagcaggccaggggctgggtgaccgatggcttcagttccctgaaagactactggagcaccgttaaggacaagttctctgagttctgggatttggaccctgaggtcagaccaacttcagccgtggctgcctgagacctcaataccccaagtccacctgcctatccatcctgcgagctccttgggtcctgcaatctccagggctgcccctgtaggttgcttaaaagggacagtattctcagtgctctcctaccccacctcatgcctggcccccctccaggcatgctggcctcccaataaagctggacaagaagctgctatga

SEQ ID NO: 298 - DNA, 359 bp, Artificial Sequence
  derived and/or modified sequence
ggctgcagggctggcgggacagcagcgtggactcagtctcctagggatttcccaactctcccgcccgcttgctgcatctggacaccctgcctcaggccctcatctccactggtcagcaggtgacctttgcccagcgccctgggtcctcagtgcctgctgccctggagatgatataaaacaggaacagaggtgccatgcagccccgggtactccttgttgttgccctcctggcgctcctggcctctgcccgagcttcagaggccgaggatgcctcccttctcagcttcatgcagggttacatgaagcacgccaccaagaccgccaaggatgcactgagcagcgtgcaggagtcccaggtg

SEQ ID NO: 299 - DNA, 300 bp, Artificial Sequence
  derived and/or modified sequence
atgcagccccgtgtgctgctggttgtggccctcctggccctgcttgccagtgctcgagcctcagaagcggaggacgcctctctgttgtcattcatgcagggctacatgaagcacgcgacgaagacagcaaaggacgcattgtcatctgtgcaggagtcacaagtagcccaacaggcacgtggctgggtaaccgatggcttttcctccctgaaggattactggtccaccgtgaaagacaagttttccgaattctgggatttggaccctgaggtgcggcctacatccgcggttgccgcttag

SEQ ID NO: 300 - DNA, 354 bp, Artificial Sequence
  derived and/or modified sequence
atgggaacctggggcgccccacatcggaccctgccatgcagaaatcgcggcgctatgcagccgcgtgtcttactagtggtggccctcctcgcccttcttgcttctgctagggccagtgaagcggaggatgcgtcccttttatcgttcatgcagggctacatgaaacatgctaccaagaccgccaaggatgctttgagctccgtccaggagtcacaagtcgcgcagcaggctagaggatgggtaacagatggcttttcttccctgaaagattattggtctactgttaaggacaagttctccgagttctgggatctggatcctgaagtcaggcccactagcgcagtggctgcctag

SEQ ID NO: 301 - DNA, 168 bp, Artificial Sequence
  derived and/or modified sequence
atgcagcccagagtcttactcgtagtcgccctactagccctgttagcgtccgctagagcgagcgaggcagaagacgccagtctactgtcctttatgcagggatacatgaagcatgccactaaaactgcaaaagatgccttgtcctcagtccaagaatcacaggtgtag

SEQ ID NO: 302 - DNA, 300 bp, Artificial Sequence
  derived and/or modified sequence
atgcaacctagagtactactagtggtggccctgctcgctctcctggcctctgcgcgcgcctccgaagcagaggacgccagcctcttgtctttcatgcaagggtacatgaagcacgcgaccaagacagccaaggatgccctctctagtgtccaagaaagccaagtagcacagcaggccagaggatgggtgacagacgggttttcatcacttaaagactattggtcaactgtaaaagataaattcagcgagttttgggatctcgaccccgaggtgcgcccaactagtgctgtcgccgcctag

SEQ ID NO: 303 - DNA, 354 bp, Artificial Sequence
  derived and/or modified sequence
atgggaacctggggcgccccacatcggaccctgccatgcagaaatcgcggcgctatgcagccgcgtgtcttactagtggtggccctcctcgcccttcttgcttctgctagggccagtgaagcggaggatgcgtcccttttatcgttcatgcagggctacatgaaacatgctaccaagaccgccaaggatgctttgagctccgtccaggagtcacaagtcgcgcagcaggctagaggatgggtaacagatggcttttcttccctgaaagattattggtctactgttaaggacaagttctccgagttttgggacttggatccagaggttagacccacctccgcagtggccgcatag

SEQ ID NO: 304 - DNA, 354 bp, Artificial Sequence
  derived and/or modified sequence
atgggcacctggggcgccccccacagaaccctgccctgcagaaacagaggcgccatgcagcccagagtgctgctggtggtggccctgctggccctgctggccagcgccagagccagcgaggccgaggacgccagcctgctgagcttcatgcagggctacatgaagcacgccaccaagaccgccaaggacgccctgagcagcgtgcaggagagccaggtggcccagcaggccagaggctgggtgaccgacggcttcagcagcctgaaggactactggagcaccgtgaaggacaagttcagcgagttctgggacctggaccccgaggtgagacccaccagcgccgtggccgcctag

SEQ ID NO: 305 - DNA, 168 bp, Artificial Sequence
  derived and/or modified sequence
atgcagcccagagtgctgctggtggtggccctgctggccctgctggccagcgccagagccagcgaggccgaggacgccagcctgctgagcttcatgcagggctacatgaagcacgccaccaagaccgccaaggacgccctgagcagcgtgcaggagagccaggtgtag

SEQ ID NO: 306 - DNA, 300 bp, Artificial Sequence
  derived and/or modified sequence
atgcagcccagagtgctgctggtggtggccctgctggccctgctggccagcgccagagccagcgaggccgaggacgccagcctgctgagcttcatgcagggctacatgaagcacgccaccaagaccgccaaggacgccctgagcagcgtgcaggagagccaggtggcccagcaggccagaggctgggtgaccgacggcttcagcagcctgaaggactactggagcaccgtgaaggacaagttcagcgagttctgggacctggaccccgaggtgagacccaccagcgccgtggccgcctag

SEQ ID NO: 307 - RNA, 168 nt, Artificial Sequence
  derived and/or modified sequence
augcagcccagagucuuacucguagucgcccuacuagcccuguuagcguccgcuagagcgagcgaggcagaagacgccagucuacuguccuuuaugcagggauacaugaagcaugccacuaaaacugcaaaagaugccuuguccucaguccaagaaucacagguguag

SEQ ID NO: 308 - RNA, 300 nt, Artificial Sequence
  derived and/or modified sequence
augcaaccuagaguacuacuagugguggcccugcucgcucuccuggccucugcgcgcgccuccgaagcagaggacgccagccucuugucuuucaugcaaggguacaugaagcacgcgaccaagacagccaaggaugcccucucuaguguccaagaaagccaaguagcacagcaggccagaggaugggugacagacggguuuucaucacuuaaagacuauuggucaacuguaaaagauaaauucagcgaguuuugggaucucgaccccgaggugcgcccaacuagugcugucgccgccuag

SEQ ID NO: 309 - protein, 345 aa, Artificial Sequence
  derived and/or modified sequence
MISPVLILFSSFLCHVAIAGRTCPKPDDLPFSTVVPLKTFYEPGEEITYSCKPGYVSRGGMRKFICPLTGLWPINTLKCTPRVCPFAGILENGAVRYTTFEYPNTISFSCNTGFYLNGADSAKCTEEGKWSPELPVCAPIICPPPSIPTFATLRVYKPSAGNNSLYRDTAVFECLPQHAMFGNDTITCTTHGNWTKLPECREVKCPFPSRPDNGFVNYPAKPTLYYKDKATFGCHDGYSLDGPEEIECTKLGNWSAMPSCKASCKVPVKKATVVYQGERVKIQEKFKNGMLHGDKVSFFCKNKEKKCSYTEDAQCIDGTIEVPKCFKEHSSLAFWKTDASDVKPC

SEQ ID NO: 310 - DNA, 1038 bp, Artificial Sequence
  derived and/or modified sequence
atgatttccccggtgctgattctgttttcgagcttcctttgtcacgtcgccatcgccggcaggacatgtcccaaaccggatgacttgcctttctccactgtggtgcccttgaaaacgttctacgaacccggggaagaaatcacatatagctgcaagcctgggtatgtctcgagaggaggaatgcgaaagtttatttgccctctcaccggcctgtggccgattaatacccttaaatgcaccccaagggtgtgcccctttgctgggatattggaaaacggggcagttagatacacaaccttcgaatatccaaatacaatatctttctcgtgcaatactggcttttatcttaacggtgcggactctgccaagtgcaccgaagagggtaagtggagccctgaactacctgtttgtgccccaatcatttgtcctccccccagcatacccacattcgcgaccctccgggtgtataaaccatccgcgggaaataactccttgtatcgcgatacagccgtgtttgaatgcttaccacagcacgcaatgttcgggaatgacacaattacgtgtaccacacatgggaattggaccaaattgcctgaatgtagagaggttaagtgtccatttccatccagacccgataacggatttgtgaattatcctgccaaacctaccctctattacaaggataaggctacatttgggtgccatgacggttactcattggatggtcctgaggagatcgagtgcaccaagctagggaactggtctgctatgccatcttgcaaggcgtcctgtaaagtaccagtgaagaaggcaaccgtcgtataccaaggagaaagagttaagatccaggagaagtttaagaacggaatgctgcacggagataaagtgagctttttctgcaagaataaggagaagaagtgctcatacacagaggatgctcagtgcatagacggaacaatcgaggttccaaaatgctttaaagagcactccagtctcgctttctggaaaacagatgccagcgacgtgaagccttgctag

SEQ ID NO: 311 - DNA, 1038 bp, Artificial Sequence
  derived and/or modified sequence
atgatcagccctgtgctgatcctcttcagcagcttcctgtgccacgtggccatcgccggccgcacctgccccaagccagatgacctgcccttcagcacagtggtgcccctgaagaccttctatgagcctggagaggagatcacctacagctgcaagccaggctacgtgtccagaggaggcatgaggaagttcatctgccccctgaccggcctgtggcccatcaacaccctgaagtgcaccccccgggtgtgcccctttgctggcatcctggagaatggagctgtgcgctacaccacctttgagtaccccaacaccatctccttcagctgcaacacaggcttctacctgaatggagctgacagcgccaagtgcacagaggagggcaagtggagccctgagctgcctgtgtgtgcccccatcatctgccccccacccagcatccccacctttgccaccctgcgggtgtacaagcccagcgctggcaacaacagcctgtacagagacacagctgtgtttgaatgtctgccccagcacgccatgtttggaaatgacaccatcacctgcaccacccacggcaactggaccaagctgcctgaatgtcgggaggtgaagtgccccttccccagcaggccagacaatggatttgtgaactacccagccaagcccaccctgtactacaaggacaaggccaccttcggctgccatgatggctacagcctggatggccctgaggagattgaatgtaccaagctgggcaactggagcgccatgcccagctgcaaggccagctgcaaggtgcctgtgaagaaggccaccgtggtgtaccagggcgagcgggtgaagatccaggagaagttcaagaatggcatgctgcacggggacaaggtgtccttcttctgcaagaacaaggagaagaagtgcagctacacagaagatgcccagtgcattgatggcaccatcgaggtgcccaagtgcttcaaggagcacagcagcctggccttctggaagacagatgccagtgatgtgaagccctgctag

SEQ ID NO: 312 - DNA, 1038 bp, Artificial Sequence
  derived and/or modified sequence
atgatcagccccgtgctgatcctgttcagcagcttcctgtgccacgtggctatcgcaggtagaacgtgccctaagcctgacgatctgcctttcagcaccgtcgtgccgttgaaaacattctatgaacctggagaggaaattacttatagttgtaaaccaggctatgtgagccgtggcgggatgcgtaagttcatctgtcctctgacaggcctgtggccaattaataccctgaagtgcactcccagggtctgtccttttgccggtatcctagaaaacggtgcagtgcggtataccacatttgagtatcccaataccatcagcttttcctgcaatactggcttttatctcaacggggcggactccgcaaagtgcacagaggaggggaaatggtccccggaactcccagtctgcgctccgatcatttgcccacccccatccatacctacatttgccacacttagagtttacaagccctctgccggcaacaacagtctgtacagagatactgcagttttcgagtgcttaccacagcatgctatgtttgggaacgataccatcacctgcacgacccatggcaactggactaaactgcctgagtgtcgggaagtaaaatgtccttttccgtcaagaccagacaacggtttcgtgaattacccggccaagccaacactgtactataaggacaaagccactttcggctgccacgacggttacagtctggacgggcctgaagagattgaatgtactaagctggggaattggtcggccatgccaagctgtaaggccagttgcaaagttccagtgaagaaagccacagtcgtttaccagggagaacgcgtcaagatccaggaaaaattcaagaacggcatgctccacggagataaagtgtctttcttctgcaaaaataaagagaagaagtgctcctacactgaggacgcccaatgcattgatggtaccattgaggttcccaagtgcttcaaagaacattcgtcattggccttctggaaaaccgacgcgtccgatgtaaagccctgctag

SEQ ID NO: 313 - DNA, 1038 bp, Artificial Sequence
  derived and/or modified sequence
atgatcagcccagtactgattttattttcatcctttctgtgccatgtcgccatagctgggaggacctgccctaaacccgatgacctccctttcagtaccgtagtcccgttaaagaccttttatgagccaggagaggagattacatacagctgcaaacccggttatgtgtcaaggggtggcatgaggaaatttatatgtcctctaacaggcctgtggcctatcaatactctcaagtgtacccccagggtgtgtccttttgctggcatcctcgaaaatggcgcagttcgttatactacattcgaataccctaacaccatatctttcagctgtaatacagggttttacttgaatggagctgattcagccaaatgcacggaggagggcaaatggtctccagaactgcccgtgtgcgctcctatcatatgccctccaccaagtatccccaccttcgccactttgcgcgtctataagccctccgctggcaacaactctttgtacagagacacagcagtcttcgagtgcttgcctcagcacgcaatgttcggtaatgacactatcacatgcaccactcacgggaactggacaaaactccccgagtgcagagaagtgaagtgccctttcccttctagacccgacaacggctttgtcaattatccagctaagcccacgctctattataaagataaagcgactttcggttgtcacgacggatatagtcttgacggccctgaggaaatagagtgtactaagctgggaaactggtcagctatgcctagttgtaaagcaagctgtaaggtgccagtgaagaaagccacagtggtgtaccagggcgagcgcgtgaagattcaggaaaagtttaagaacgggatgctgcacggcgataaagtgtcctttttctgcaaaaacaaagagaaaaagtgcagctatactgaggacgcccagtgcatcgatggcaccatcgaggtgccgaaatgttttaaagaacatagttcactcgctttctggaagaccgacgcttctgatgtcaagccttgttag

SEQ ID NO: 314 - DNA, 1038 bp, Artificial Sequence
  derived and/or modified sequence
atgatcagccccgtgctgatcctgttcagcagcttcctgtgccacgtggccatcgccggcagaacctgccccaagcccgacgacctgcccttcagcaccgtggtgcccctgaagaccttctacgagcccggcgaggagatcacctacagctgcaagcccggctacgtgagcagaggcggcatgagaaagttcatctgccccctgaccggcctgtggcccatcaacaccctgaagtgcacccccagagtgtgccccttcgccggcatcctggagaacggcgccgtgagatacaccaccttcgagtaccccaacaccatcagcttcagctgcaacaccggcttctacctgaacggcgccgacagcgccaagtgcaccgaggagggcaagtggagccccgagctgcccgtgtgcgcccccatcatctgccccccccccagcatccccaccttcgccaccctgagagtgtacaagcccagcgccggcaacaacagcctgtacagagacaccgccgtgttcgagtgcctgccccagcacgccatgttcggcaacgacaccatcacctgcaccacccacggcaactggaccaagctgcccgagtgcagagaggtgaagtgccccttccccagcagacccgacaacggcttcgtgaactaccccgccaagcccaccctgtactacaaggacaaggccaccttcggctgccacgacggctacagcctggacggccccgaggagatcgagtgcaccaagctgggcaactggagcgccatgcccagctgcaaggccagctgcaaggtgcccgtgaagaaggccaccgtggtgtaccagggcgagagagtgaagatccaggagaagttcaagaacggcatgctgcacggcgacaaggtgagcttcttctgcaagaacaaggagaagaagtgcagctacaccgaggacgcccagtgcatcgacggcaccatcgaggtgcccaagtgcttcaaggagcacagcagcctggccttctggaagaccgacgccagcgacgtgaagccctgctag

SEQ ID NO: 315 - DNA, 1200 bp, Artificial Sequence
  derived and/or modified sequence
ggctctgtctttttagcagacgaaaaccactttggtagtgccagtgtgactcatccacaatgatttctccagtgctcatcttgttctcgagttttctctgccatgttgctattgcaggacggacctgtcccaagccagatgatttaccattttccacagtggtcccgttaaaaacattctatgagccaggagaagagattacgtattcctgcaagccgggctatgtgtcccgaggagggatgagaaagtttatctgccctctcacaggactgtggcccatcaacactctgaaatgtacacccagagtatgtccttttgctggaatcttagaaaatggagccgtacgctatacgacttttgaatatcccaacacgatcagtttttcttgtaacactgggttttatctgaatggcgctgattctgccaagtgcactgaggaaggaaaatggagcccggagcttcctgtctgtgctcccatcatctgccctccaccatccatacctacgtttgcaacacttcgtgtttataagccatcagctggaaacaattccctctatcgggacacagcagtttttgaatgtttgccacaacatgcgatgtttggaaatgatacaattacctgcacgacacatggaaattggactaaattaccagaatgcagggaagtaaaatgcccattcccatcaagaccagacaatggatttgtgaactatcctgcaaaaccaacactttattacaaggataaagccacatttggctgccatgatggatattctctggatggcccggaagaaatagaatgtaccaaactgggaaactggtctgccatgccaagttgtaaagcatcttgtaaagtacctgtgaaaaaagccactgtggtgtaccaaggagagagagtaaagattcaggaaaaatttaagaatggaatgctacatggtgataaagtttctttcttctgcaaaaataaggaaaagaagtgtagctatacagaggatgctcagtgtatagatggcactatcgaagtccccaaatgcttcaaggaacacagttctctggctttttggaaaactgatgcatccgatgtaaagccatgctaaggtggttttcagattccacacaaaatgtcacacttgtttcttgttcatccaaggaacctaattgaaatttaaaaataaagctactgaatttattgccgcaccc

SEQ ID NO: 316 - protein, 220 aa, Artificial Sequence
  derived and/or modified sequence
MLGIWTLLPLVLTSVARLSSKSVNAQVTDINSKGLELRKTVTTVETQNLEGLHHDGQFCHKPCPPGERKARDCTVNGDEPDCVPCQEGKEYTDKAHFSSKCRRCRLCDEGHGLEVEINCTRTQNTKCRCKPNFFCNSTVCEHCDPCTKCEHGIIKECTLTSNTKCKEEGSRSNLGWLCLLLLPIPLIVWVKRKEVQKTCRKHRKENQGSHESPTLNPMLT

SEQ ID NO: 317 - protein, 335 aa, Artificial Sequence
  derived and/or modified sequence
MLGIWTLLPLVLTSVARLSSKSVNAQVTDINSKGLELRKTVTTVETQNLEGLHHDGQFCHKPCPPGERKARDCTVNGDEPDCVPCQEGKEYTDKAHFSSKCRRCRLCDEGHGLEVEINCTRTQNTKCRCKPNFFCNSTVCEHCDPCTKCEHGIIKECTLTSNTKCKEEGSRSNLGWLCLLLLPIPLIVWVKRKEVQKTCRKHRKENQGSHESPTLNPETVAINLSDVDLSKYITTIAGVMTLSQVKGFVRKNGVNEAKIDEIKNDNVQDTAEQKVQLLRNWHQLHGKKEAYDTLIKDLKKANLCTLAEKIQTIILKDITSDSENSNFRNEIQSLV

SEQ ID NO: 318 - protein, 244 aa, Artificial Sequence
  derived and/or modified sequence
MLGIWTLLPLVLTSVARLSSKSVNAQVTDINSKGLELRKTVTTVETQNLEGLHHDGQFCHKPCPPGERKARDCTVNGDEPDCVPCQEGKEYTDKAHFSSKCRRCRLCDEGHGLEVEINCTRTQNTKCRCKPNFFCNSTVCEHCDPCTKCEHGIIKECTLTSNTKCKEEGSRSNLGWLCLLLLPIPLIVWVKRKEVQKTCRKHRKENQGSHESPTLNPETVAINLSDVDLSKYHHYCWSHDTKSS

SEQ ID NO: 319 - DNA, 1008 bp, Artificial Sequence
  derived and/or modified sequence
atgctgggcatctggaccctgctgcccctggtgctgaccagcgtggccagactgagcagcaagagcgtgaacgcccaggtgaccgacatcaacagcaagggcctggagctgagaaagaccgtgaccaccgtggagacccagaacctggagggcctgcaccacgacggccagttctgccacaagccctgcccccccggcgagagaaaggccagagactgcaccgtgaacggcgacgagcccgactgcgtgccctgccaggagggcaaggagtacaccgacaaggcccacttcagcagcaagtgcagaagatgcagactgtgcgacgagggccacggcctggaggtggagatcaactgcaccagaacccagaacaccaagtgcagatgcaagcccaacttcttctgcaacagcaccgtgtgcgagcactgcgacccctgcaccaagtgcgagcacggcatcatcaaggagtgcaccctgaccagcaacaccaagtgcaaggaggagggcagcagaagcaacctgggctggctgtgcctgctgctgctgcccatccccctgatcgtgtgggtgaagagaaaggaggtgcagaagacctgcagaaagcacagaaaggagaaccagggcagccacgagagccccaccctgaaccccgagaccgtggccatcaacctgagcgacgtggacctgagcaagtacatcaccaccatcgccggcgtgatgaccctgagccaggtgaagggcttcgtgagaaagaacggcgtgaacgaggccaagatcgacgagatcaagaacgacaacgtgcaggacaccgccgagcagaaggtgcagctgctgagaaactggcaccagctgcacggcaagaaggaggcctacgacaccctgatcaaggacctgaagaaggccaacctgtgcaccctggccgagaagatccagaccatcatcctgaaggacatcaccagcgacagcgagaacagcaacttcagaaacgagatccagagcctggtgtag

SEQ ID NO: 320 - DNA, 735 bp, Artificial Sequence
  derived and/or modified sequence
atgctgggcatctggaccctgctgcccctggtgctgaccagcgtggccagactgagcagcaagagcgtgaacgcccaggtgaccgacatcaacagcaagggcctggagctgagaaagaccgtgaccaccgtggagacccagaacctggagggcctgcaccacgacggccagttctgccacaagccctgcccccccggcgagagaaaggccagagactgcaccgtgaacggcgacgagcccgactgcgtgccctgccaggagggcaaggagtacaccgacaaggcccacttcagcagcaagtgcagaagatgcagactgtgcgacgagggccacggcctggaggtggagatcaactgcaccagaacccagaacaccaagtgcagatgcaagcccaacttcttctgcaacagcaccgtgtgcgagcactgcgacccctgcaccaagtgcgagcacggcatcatcaaggagtgcaccctgaccagcaacaccaagtgcaaggaggagggcagcagaagcaacctgggctggctgtgcctgctgctgctgcccatccccctgatcgtgtgggtgaagagaaaggaggtgcagaagacctgcagaaagcacagaaaggagaaccagggcagccacgagagccccaccctgaaccccgagaccgtggccatcaacctgagcgacgtggacctgagcaagtaccaccactactgctggagccacgacaccaagagcagctag

SEQ ID NO: 321 - DNA, 1008 bp, Artificial Sequence
  derived and/or modified sequence
atgctcggaatatggaccctcttacccctcgtgctaacaagtgtggcccgcctgtcaagcaaatcagtcaacgctcaggtcacggatatcaacagcaagggactcgaactgaggaagaccgtcaccacagtcgaaacccagaacttagagggcctccatcacgacggtcaattttgtcacaaaccatgtccccctggggagagaaaggctagggactgcacggtgaacggcgatgaacctgactgtgtgccctgccaagagggtaaagagtatactgataaagcacatttctccagtaaatgccgtcgctgtcggctgtgcgacgagggacacgggctggaggtggagatcaactgcacaaggacccagaacacaaaatgcaggtgcaaaccaaattttttttgcaacagtaccgtttgcgaacattgcgacccctgcacgaagtgcgagcacggtataattaaagagtgcactcttacgagcaacacaaagtgcaaggaggagggatcccggtcaaacctggggtggctttgcctcctcctgctccccatccccctgatcgtttgggttaaaagaaaggaggtgcagaaaacctgcaggaaacataggaaggagaaccaggggagtcacgaaagcccaacactgaaccccgagaccgtggccatcaatctcagcgatgtggacttgtccaagtacatcacaacaatagctggtgtgatgactctgagccaggtaaaaggatttgtaaggaagaacggcgtgaacgaggctaagatcgatgagataaaaaatgataacgtgcaggatacagcagagcagaaagttcaactgttgagaaactggcaccagttgcatggcaaaaaggaagcctacgatactctgattaaagatcttaaaaaggccaacctgtgtactttagcagagaaaattcagacgattattttaaaggacatcacgtcagattctgaaaatagcaattttagaaacgagattcaatcactggtctag

SEQ ID NO: 322 - DNA, 735 bp, Artificial Sequence
  derived and/or modified sequence
atgctcggtatttggacactgctaccgttggtgctaactagcgttgctcggctcagcagcaaaagcgtgaatgctcaggtcaccgacatcaatagtaagggccttgagctgcggaaaaccgtgactaccgtggaaacacaaaacttagaaggacttcatcatgacgggcagttctgccacaaaccttgtcctccaggggagcggaaagcgagggattgcacagtgaacggcgatgaacccgactgcgttccttgccaagagggtaaagaatacacagataaggctcacttttcgtccaaatgccggagatgtaggctgtgtgacgaaggacacggattggaggtggagattaattgtacccgcactcagaatactaaatgcaggtgtaagcctaacttcttttgcaacagtactgtctgtgagcattgtgacccatgtactaaatgtgagcatggtatcataaaggagtgcacactaaccagcaacactaaatgcaaagaggaggggtccagatccaacctgggatggctgtgcctgctgctgctgcccattcccttgatcgtgtgggttaagaggaaagaagtgcaaaaaacctgtagaaaacaccgcaaggagaatcaaggctctcatgaaagccctactctcaatccagagacagttgcgatcaacttgtcagatgtagacctttccaagtatcatcattactgctggtcacatgacaccaaaagctcttag

SEQ ID NO: 323 - DNA, 2563 bp, Artificial Sequence
  derived and/or modified sequence
gcaagagtgacacacaggtgttcaaagacgcttctggggagtgagggaagcggtttacgagtgacttggctggagcctcaggggcgggcactggcacggaacacaccctgaggccagccctggctgcccaggcggagctgcctcttctcccgcgggttggtggacccgctcagtacggagttggggaagctctttcacttcggaggattgctcaacaaccatgctgggcatctggaccctcctacctctggttcttacgtctgttgctagattatcgtccaaaagtgttaatgcccaagtgactgacatcaactccaagggattggaattgaggaagactgttactacagttgagactcagaacttggaaggcctgcatcatgatggccaattctgccataagccctgtcctccaggtgaaaggaaagctagggactgcacagtcaatggggatgaaccagactgcgtgccctgccaagaagggaaggagtacacagacaaagcccatttttcttccaaatgcagaagatgtagattgtgtgatgaaggacatggcttagaagtggaaataaactgcacccggacccagaataccaagtgcagatgtaaaccaaactttttttgtaactctactgtatgtgaacactgtgacccttgcaccaaatgtgaacatggaatcatcaaggaatgcacactcaccagcaacaccaagtgcaaagaggaaggatccagatctaacttggggtggctttgtcttcttcttttgccaattccactaattgtttgggtgaagagaaaggaagtacagaaaacatgcagaaagcacagaaaggaaaaccaaggttctcatgaatctccaactttaaatcctgaaacagtggcaataaatttatctgatgttgacttgagtaaatatatcaccactattgctggagtcatgacactaagtcaagttaaaggctttgttcgaaagaatggtgtcaatgaagccaaaatagatgagatcaagaatgacaatgtccaagacacagcagaacagaaagttcaactgcttcgtaattggcatcaacttcatggaaagaaagaagcgtatgacacattgattaaagatctcaaaaaagccaatctttgtactcttgcagagaaaattcagactatcatcctcaaggacattactagtgactcagaaaattcaaacttcagaaatgaaatccaaagcttggtctagagtgaaaaacaacaaattcagttctgagtatatgcaattagtgtttgaaaagattcttaatagctggctgtaaatactgcttggttttttactgggtacattttatcatttattagcgctgaagagccaacatatttgtagatttttaatatctcatgattctgcctccaaggatgtttaaaatctagttgggaaaacaaacttcatcaagagtaaatgcagtggcatgctaagtacccaaataggagtgtatgcagaggatgaaagattaagattatgctctggcatctaacatatgattctgtagtatgaatgtaatcagtgtatgttagtacaaatgtctatccacaggctaaccccactctatgaatcaatagaagaagctatgaccttttgctgaaatatcagttactgaacaggcaggccactttgcctctaaattacctctgataattctagagattttaccatatttctaaactttgtttataactctgagaagatcatatttatgtaaagtatatgtatttgagtgcagaatttaaataaggctctacctcaaagacctttgcacagtttattggtgtcatattatacaatatttcaattgtgaattcacatagaaaacattaaattataatgtttgactattatatatgtgtatgcattttactggctcaaaactacctacttctttctcaggcatcaaaagcattttgagcaggagagtattactagagctttgccacctctccatttttgccttggtgctcatcttaatggcctaatgcacccccaaacatggaaatatcaccaaaaaatacttaatagtccaccaaaaggcaagactgcccttagaaattctagcctggtttggagatactaactgctctcagagaaagtagctttgtgacatgtcatgaacccatgtttgcaatcaaagatgataaaatagattcttatttttcccccacccccgaaaatgttcaataatgtcccatgtaaaacctgctacaaatggcagcttatacatagcaatggtaaaatcatcatctggatttaggaattgctcttgtcatacccccaagtttctaagatttaagattctccttactactatcctacgtttaaatatctttgaaagtttgtattaaatgtgaattttaagaaataatatttatatttctgtaaatgtaaactgtgaagatagttataaactgaagcagatacctggaaccacctaaagaacttccatttatggaggatttttttgccccttgtgtttggaattataaaatataggtaaaagtacgtaattaaataatgtttttggta

SEQ ID NO: 324 - DNA, 1006 bp, Artificial Sequence
  derived and/or modified sequence
atgctgggcatctggaccctcctacctctggttcttacgtctgttgctagattatcgtccaaaagtgttaatgcccaagtgactgacatcaactccaagggattggaattgaggaagactgttactacagttgagactcagaacttggaaggcctgcatcatgatggccaattctgccataagccctgtcctccaggtgaaaggaaagctagggactgcacagtcaatggggatgaaccagactgcgtgccctgccaagaagggaaggagtacacagacaaagcccatttttcttccaaatgcagaagatgtagattgtgtgatgaaggacatggcttagaagtggaaataaactgcacccggacccagaataccaagtgcagatgtaaaccaaactttttttgtaactctactgtatgtgaacactgtgacccttgcaccaaatgtgaacatggaatcatcaaggaatgcacactcaccagcaacaccaagtgcaaagaggaaggatccagatctaacttggggtggctttgtcttcttcttttgccaattccactaattgtttgggtgaagagaaaggaagtacagaaaacatgcagaaagcacagaaaggaaaaccaaggttctcatgaatctccaactttaaatcctgaaacagtggcaataaatttatctgatgttgacttgagtaaatatcaccactattgctggagtcatgacactaagtcaagttaaaggctttgttcgaaagaatggtgtcaatgaagccaaaatagatgagatcaagaatgacaatgtccaagacacagcagaacagaaagttcaactgcttcgtaattggcatcaacttcatggaaagaaagaagcgtatgacacattgattaaagatctcaaaaaagccaatctttgtactcttgcagagaaaattcagactatcatcctcaaggacattactagtgactcagaaaattcaaacttcagaaatgaaatccaaagcttggtctag

SEQ ID NO: 325 - DNA, 1008 bp, Artificial Sequence
  derived and/or modified sequence
atgctgggcatctggaccctgctgcccctggtgctgacctctgtggcccggctgagcagcaagtctgtgaatgcccaggtgacagacatcaacagcaagggcctggagctgaggaagacagtgaccaccgtggagacccagaacctggagggcctgcaccatgatggccagttctgccacaagccctgccccccaggagagaggaaggcccgggactgcaccgtgaatggagatgagccagactgtgtgccctgccaggagggcaaggagtacacagacaaggcccacttcagcagcaagtgccgccgctgccgcctgtgtgatgagggccacggcctggaggtggagatcaactgcaccaggacccagaacaccaagtgccgctgcaagcccaacttcttctgcaacagcacagtgtgtgagcactgtgacccctgcaccaagtgtgaacatggcatcatcaaggagtgcaccctgaccagcaacaccaagtgcaaggaggagggcagccgcagcaacctgggctggctgtgcctgctgctgctgcccatccccctgattgtgtgggtgaagaggaaggaggtgcagaagacctgcaggaagcacaggaaagaaaaccagggcagccatgagagccccaccctgaaccctgagaccgtggccatcaacctgagtgatgtggacctgagcaagtacatcaccaccatcgccggcgtgatgaccctgagccaggtgaagggctttgtgaggaagaatggagtgaatgaggccaagattgatgagatcaagaatgacaacgtgcaggacacagctgagcagaaggtgcagctgctgaggaactggcaccagctgcacggcaagaaggaggcctatgacaccctcatcaaggacctgaagaaggccaacctgtgcaccctggccgagaagatccagaccatcatcctgaaggacatcaccagtgacagcgagaacagcaacttcagaaatgagatccagagcctggtgtag

SEQ ID NO: 326 - DNA, 735 bp, Artificial Sequence
  derived and/or modified sequence
atgctgggcatctggaccctgctgcccctggtgctgacctctgtggcccggctgagcagcaagtctgtgaatgcccaggtgacagacatcaacagcaagggcctggagctgaggaagacagtgaccaccgtggagacccagaacctggagggcctgcaccatgatggccagttctgccacaagccctgccccccaggagagaggaaggcccgggactgcaccgtgaatggagatgagccagactgtgtgccctgccaggagggcaaggagtacacagacaaggcccacttcagcagcaagtgccgccgctgccgcctgtgtgatgagggccacggcctggaggtggagatcaactgcaccaggacccagaacaccaagtgccgctgcaagcccaacttcttctgcaacagcacagtgtgtgagcactgtgacccctgcaccaagtgtgaacatggcatcatcaaggagtgcaccctgaccagcaacaccaagtgcaaggaggagggcagccgcagcaacctgggctggctgtgcctgctgctgctgcccatccccctgattgtgtgggtgaagaggaaggaggtgcagaagacctgcaggaagcacaggaaagaaaaccagggcagccatgagagccccaccctgaaccctgagaccgtggccatcaacctgagtgatgtggacctgagcaagtaccaccactactgctggagccatgacaccaagagcagctag

SEQ ID NO: 327 - DNA, 1008 bp, Artificial Sequence
  derived and/or modified sequence
atgctgggcatctggaccctgctgcccctggtgctgaccagcgtggcccgcctctcgagcaaatctgtgaatgcccaggtgaccgacattaactctaaggggcttgaattgcgaaaaaccgtgaccaccgtcgagacccagaacctggaaggactgcatcatgatggtcaattctgtcacaagccgtgcccccctggggaacgcaaagctcgtgattgtactgtgaatggggacgagcctgactgtgtgccttgccaggaaggcaaggagtacaccgacaaagctcatttttcatctaaatgcagaaggtgccgcctgtgtgacgaaggccacggcctggaggtggagataaattgtacgcgtacgcagaacaccaaatgtaggtgcaagcccaacttcttttgtaatagtaccgtctgcgaacactgcgacccctgtactaagtgcgagcacgggatcatcaaggagtgcaccctgacgagcaacaccaagtgcaaggaagagggatcccggtccaacctgggttggctttgcctgctcttgctccccatccccctgatcgtttgggtgaagcgcaaagaggtccagaaaacctgtaggaagcacagaaaagagaatcaaggcagtcacgagtcccccacccttaaccctgaaacggtcgctatcaacctgagcgatgttgacttatctaaatacatcacaaccatcgctggtgttatgactctctctcaggtaaagggttttgtgcgcaaaaacggggtaaacgaagcgaagatcgatgagatcaagaatgataacgtgcaggacacagcagagcagaaagtccagctgctgcggaattggcaccaactgcatggcaaaaaggaggcttacgacacactaatcaaggacttaaaaaaagccaatttgtgcactttggcagagaagatccagacaatcatcctcaaggacattacatctgacagtgaaaactcaaactttcggaacgaaatacagtcactggtatag

SEQ ID NO: 328 - DNA, 735 bp, Artificial Sequence
  derived and/or modified sequence
atgctgggcatctggaccctgctgcccctggtgctgaccagcgtggccagattgtcttccaaaagcgtgaatgcacaggtgactgacattaactctaaaggtctggagcttcggaaaaccgttaccaccgtggaaactcagaatctagaagggttgcaccatgacgggcagttctgtcataagccatgcccccccggcgagaggaaagctagagactgcaccgtgaacggcgatgagcctgactgtgtaccctgccaggagggaaaagagtatactgacaaggctcacttcagctctaagtgtcgacgttgccgtctctgcgatgaaggccacggtctggaagtggaaattaactgtaccagaacacagaacactaagtgccgctgcaaacctaattttttctgtaactcaacagtgtgtgagcattgtgatccctgcaccaagtgtgagcacggcattattaaagagtgcacactgacttccaataccaagtgtaaagaggagggcagccgctccaatcttggttggctctgcctccttctcctccccattcccctcattgtctgggtgaagcgcaaggaggtacagaaaacgtgcaggaagcacagaaaggagaaccagggcagccacgagagccccacccttaatccagaaacagtagcgatcaatctgtccgatgtcgacctatcaaagtatcatcattactgctggagtcacgacaccaagtcctcctag

SEQ ID NO: 329 - DNA, 1008 bp, Artificial Sequence
  derived and/or modified sequence
atgctcggaatttggaccttgcttccattagtgttaacctctgtggcccgtctaagcagcaaatcagtgaatgcgcaggtgaccgatatcaacagcaagggccttgaactgcgcaagaccgttacgacagttgagacccaaaacctggaggggctgcatcacgacggacaattctgccataagccttgccctcccggtgagagaaaagctcgcgactgcactgttaacggggacgagccggactgtgtcccgtgtcaagagggcaaggaatacacggataaggctcacttttctagcaaatgccgacggtgcagactatgtgatgagggacacggattagaggtcgaaattaattgtactaggactcaaaatactaagtgccgctgcaaacctaattttttttgtaacagcacagtttgcgaacattgcgacccctgtactaagtgcgagcacggcataataaaggagtgcacactcacatctaatactaagtgcaaagaagaaggctcacgatctaacttgggatggctgtgcctattactcctgcccatccctctcattgtctgggtgaagaggaaggaggtgcagaaaacatgccggaaacatagaaaagaaaatcaaggcagtcacgaatcccccaccctgaatcccgagacagtggccattaacctgtcggacgttgatttgtcgaaatatataactaccattgcaggggtgatgaccttgtctcaagtcaagggcttcgtgcgcaaaaacggcgtgaatgaggccaagatagacgaaataaagaacgataacgtccaggatactgccgaacaaaaggttcagctccttcggaactggcaccagcttcacggcaagaaggaagcttacgacactttaatcaaagatctgaaaaaagccaacctatgtacactcgctgaaaagatccaaactatcattctcaaggatattacttctgattccgaaaattcaaattttcgaaatgaaattcagagccttgtgtag

SEQ ID NO: 330 - DNA, 735 bp, Artificial Sequence
  derived and/or modified sequence
atgttgggcatttggacgttgctaccattggtgcttaccagcgttgcacggttgagctcaaagtcagtaaatgcccaggtgactgatatcaactcaaaggggttggaactgagaaagacagtgactaccgtcgaaacacaaaacttggagggattgcatcacgacgggcagttttgccacaaaccgtgtccccctggagaaagaaaggctcgcgactgcacagtgaacggtgacgaacccgattgtgtgccatgccaagagggcaaggagtacacggacaaggctcactttagtagtaagtgtcgcagatgccgactatgtgacgaggggcatggcctggaggttgaaatcaactgcaccaggacacagaatacgaaatgtcgctgcaagcctaactttttttgtaactctactgtctgtgaacactgtgatccctgcactaagtgcgaacatggaattatcaaagaatgcactctcacttcaaacaccaaatgcaaagaggaggggtcccgtagtaatcttggttggttatgtctgctactgctacctattcccctcattgtgtgggtgaagaggaaggaggttcagaaaacttgccgaaagcatcgcaaggagaatcagggaagccacgagtcacctactctaaacccggagaccgttgcaatcaacctttcagatgttgatttgtctaaataccaccactattgttggagccacgacacaaagtccagttag

SEQ ID NO: 331 - protein, 644 aa, Artificial Sequence
  derived and/or modified sequence
MEVQLGLGRVYPRPPSKTYRGAFQNLFQSVREVIQNPGPRHPEAASAAPPGASLLLLQQQQQQQQQQQQQQQQQQQQQQQETSPRQQQQQQGEDGSPQAHRRGPTGYLVLDEEQQPSQPQSALECHPERGCVPEPGAAVAASKGLPQQLPAPPDEDDSAAPSTLSLLGPTFPGLSSCSADLKDILSEASTMQLLQQQQQEAVSEGSSSGRAREASGAPTSSKDNYLGGTSTISDNAKELCKAVSVSMGLGVEALEHLSPGEQLRGDCMYAPLLGVPPAVRPTPCAPLAECKGSLLDDSAGKSTEDTAEYSPFKGGYTKGLEGESLGCSGSAAAGSSGTLELPSTLSLYKSGALDEAAAYQSRDYYNFPLALAGPPPPPPPPHPHARIKLENPLDYGSAWAAAAAQCRYGDLASLHGAGAAGPGSGSPSAAASSSWHTLFTAEEGQLYGPCGGGGGGGGGGGGGGGGGGGGGGGEAGAVAPYGYTRPPQGLAGQESDFTAPDVWYPGGMVSRVPYPSPTCVKSEMGPWMDSYSGPYGDMRLETARDHVLPIDYYFPPQKTCLICGDEASGCHYGALTCGSCKVFFKRAAEGKQKYLCASRNDCTIDKFRRKNCPSCRLRKCYEAGMTLGEKFRVGNCKHLKMTRP

SEQ ID NO: 332 - protein, 600 aa, Artificial Sequence
  derived and/or modified sequence
MEVQLGLGRVYPRPPSKTYRGAFQNLFQSVREVIQNPGPRHPEAASAAPPGASLLLLQQQQQQQQQQQQQQQQQQQQQQQETSPRQQQQQQGEDGSPQAHRRGPTGYLVLDEEQQPSQPQSALECHPERGCVPEPGAAVAASKGLPQQLPAPPDEDDSAAPSTLSLLGPTFPGLSSCSADLKDILSEASTMQLLQQQQQEAVSEGSSSGRAREASGAPTSSKDNYLGGTSTISDNAKELCKAVSVSMGLGVEALEHLSPGEQLRGDCMYAPLLGVPPAVRPTPCAPLAECKGSLLDDSAGKSTEDTAEYSPFKGGYTKGLEGESLGCSGSAAAGSSGTLELPSTLSLYKSGALDEAAAYQSRDYYNFPLALAGPPPPPPPPHPHARIKLENPLDYGSAWAAAAAQCRYGDLASLHGAGAAGPGSGSPSAAASSSWHTLFTAEEGQLYGPCGGGGGGGGGGGGGGGGGGGGGGGEAGAVAPYGYTRPPQGLAGQESDFTAPDVWYPGGMVSRVPYPSPTCVKSEMGPWMDSYSGPYGDMRLETARDHVLPIDYYFPPQKTCLICGDEASGCHYGALTCGSCKVFFKRAAEGFFRMNKLKES

SEQ ID NO: 333 - protein, 920 aa, Artificial Sequence
  derived and/or modified sequence
MEVQLGLGRVYPRPPSKTYRGAFQNLFQSVREVIQNPGPRHPEAASAAPPGASLLLLQQQQQQQQQQQQQQQQQQQQQQQETSPRQQQQQQGEDGSPQAHRRGPTGYLVLDEEQQPSQPQSALECHPERGCVPEPGAAVAASKGLPQQLPAPPDEDDSAAPSTLSLLGPTFPGLSSCSADLKDILSEASTMQLLQQQQQEAVSEGSSSGRAREASGAPTSSKDNYLGGTSTISDNAKELCKAVSVSMGLGVEALEHLSPGEQLRGDCMYAPLLGVPPAVRPTPCAPLAECKGSLLDDSAGKSTEDTAEYSPFKGGYTKGLEGESLGCSGSAAAGSSGTLELPSTLSLYKSGALDEAAAYQSRDYYNFPLALAGPPPPPPPPHPHARIKLENPLDYGSAWAAAAAQCRYGDLASLHGAGAAGPGSGSPSAAASSSWHTLFTAEEGQLYGPCGGGGGGGGGGGGGGGGGGGGGGGEAGAVAPYGYTRPPQGLAGQESDFTAPDVWYPGGMVSRVPYPSPTCVKSEMGPWMDSYSGPYGDMRLETARDHVLPIDYYFPPQKTCLICGDEASGCHYGALTCGSCKVFFKRAAEGKQKYLCASRNDCTIDKFRRKNCPSCRLRKCYEAGMTLGARKLKKLGNLKLQEEGEASSTTSPTEETTQKLTVSHIEGYECQPIFLNVLEAIEPGVVCAGHDNNQPDSFAALLSSLNELGERQLVHVVKWAKALPGFRNLHVDDQMAVIQYSWMGLMVFAMGWRSFTNVNSRMLYFAPDLVFNEYRMHKSRMYSQCVRMRHLSQEFGWLQITPQEFLCMKALLLFSIIPVDGLKNQKFFDELRMNYIKELDRIIACKRKNPTSCSRRFYQLTKLLDSVQPIARELHQFTFDLLIKSHMVSVDFPEMMAEIISVQVPKILSGKVKPIYFHTQ

SEQ ID NO: 334 - protein, 734 aa, Artificial Sequence
  derived and/or modified sequence
MEVQLGLGRVYPRPPSKTYRGAFQNLFQSVREVIQNPGPRHPEAASAAPPGASLLLLQQQQQQQQQQQQQQQQQQQQQQQETSPRQQQQQQGEDGSPQAHRRGPTGYLVLDEEQQPSQPQSALECHPERGCVPEPGAAVAASKGLPQQLPAPPDEDDSAAPSTLSLLGPTFPGLSSCSADLKDILSEASTMQLLQQQQQEAVSEGSSSGRAREASGAPTSSKDNYLGGTSTISDNAKELCKAVSVSMGLGVEALEHLSPGEQLRGDCMYAPLLGVPPAVRPTPCAPLAECKGSLLDDSAGKSTEDTAEYSPFKGGYTKGLEGESLGCSGSAAAGSSGTLELPSTLSLYKSGALDEAAAYQSRDYYNFPLALAGPPPPPPPPHPHARIKLENPLDYGSAWAAAAAQCRYGDLASLHGAGAAGPGSGSPSAAASSSWHTLFTAEEGQLYGPCGGGGGGGGGGGGGGGGGGGGGGGEAGAVAPYGYTRPPQGLAGQESDFTAPDVWYPGGMVSRVPYPSPTCVKSEMGPWMDSYSGPYGDMRLETARDHVLPIDYYFPPQKTCLICGDEASGCHYGALTCGSCKVFFKRAAEGKQKYLCASRNDCTIDKFRRKNCPSCRLRKCYEAGMTLGARKLKKLGNLKLQEEGEASSTTSPTEETTQKLTVSHIEGYECQPIFLNVLEAIEPGVVCAGHDNNQPDSFAALLSSLNELGERQLVHVVKWAKALPDCERAASVHF

SEQ ID NO: 335 - protein, 531 aa, Artificial Sequence
  derived and/or modified sequence
MEVQLGLGRVYPRPPSKTYRGAFQNLFQSVREVIQNPGPRHPEAASAAPPGASLLLLQQQQQQQQQQQQQQQETSPRQQQQQQGEDGSPQAHRRGPTGYLVLDEEQQPSQPQSALECHPERGCVPEPGAAVAASKGLPQQLPAPPDEDDSAAPSTLSLLGPTFPGLSSCSADLKDILSEASTMQLLQQQQQEAVSEGSSSGRAREASGAPTSSKDNYLGGTSTISDNAKELCKAVSVSMGLGVEALEHLSPGEQLRGDCMYAPLLGVPPAVRPTPCAPLAECKGSLLDDSAGKSTEDTAEYSPFKGGYTKGLEGESLGCSGSAAAGSSGTLELPSTLSLYKSGALDEAAAYQSRDYYNFPLALAGPPPPPPPPHPHARIKLENPLDYGSAWAAAAAQCRYGDLASLHGAGAAGPGSGSPSAAASSSWHTLFTAEEGQLYGPCGGGGGGGGGGGGGGGGGGGGGGGEAGAVAPYGYTRPPQGLAGQESDFTAPDVWYPGGMVSRVPYPSPTCVKSEMGPWMDSYSGPYGDMR

SEQ ID NO: 336 - protein, 738 aa, Artificial Sequence
  derived and/or modified sequence
MQLLQQQQQEAVSEGSSSGRAREASGAPTSSKDNYLGGTSTISDNAKELCKAVSVSMGLGVEALEHLSPGEQLRGDCMYAPLLGVPPAVRPTPCAPLAECKGSLLDDSAGKSTEDTAEYSPFKGGYTKGLEGESLGCSGSAAAGSSGTLELPSTLSLYKSGALDEAAAYQSRDYYNFPLALAGPPPPPPPPHPHARIKLENPLDYGSAWAAAAAQCRYGDLASLHGAGAAGPGSGSPSAAASSSWHTLFTAEEGQLYGPCGGGGGGGGGGGGGGGGGGGGGGGEAGAVAPYGYTRPPQGLAGQESDFTAPDVWYPGGMVSRVPYPSPTCVKSEMGPWMDSYSGPYGDMRLETARDHVLPIDYYFPPQKTCLICGDEASGCHYGALTCGSCKVFFKRAAEGKQKYLCASRNDCTIDKFRRKNCPSCRLRKCYEAGMTLGARKLKKLGNLKLQEEGEASSTTSPTEETTQKLTVSHIEGYECQPIFLNVLEAIEPGVVCAGHDNNQPDSFAALLSSLNELGERQLVHVVKWAKALPGFRNLHVDDQMAVIQYSWMGLMVFAMGWRSFTNVNSRMLYFAPDLVFNEYRMHKSRMYSQCVRMRHLSQEFGWLQITPQEFLCMKALLLFSITFCLHPTSVPVDGLKNQKFFDELRMNYIKELDRIIACKRKNPTSCSRRFYQLTKLLDSVQPIARELHQFTFDLLIKSHMVSVDFPEMMAEIISVQVPKILSGKVKPIYFHTQ

SEQ ID NO: 337 - DNA, 4314 bp, Artificial Sequence
  derived and/or modified sequence
cgagatcccggggagccagcttgctgggagagcgggacggtccggagcaagcccagaggcagaggaggcgacagagggaaaaagggccgagctagccgctccagtgctgtacaggagccgaagggacgcaccacgccagccccagcccggctccagcgacagccaacgcctcttgcagcgcggcggcttcgaagccgccgcccggagctgccctttcctcttcggtgaagtttttaaaagctgctaaagactcggaggaagcaaggaaagtgcctggtaggactgacggctgcctttgtcctcctcctctccaccccgcctccccccaccctgccttccccccctcccccgtcttctctcccgcagctgcctcagtcggctactctcagccaacccccctcaccacccttctccccacccgcccccccgcccccgtcggcccagcgctgccagcccgagtttgcagagaggtaactccctttggctgcgagcgggcgagctagctgcacattgcaaagaaggctcttaggagccaggcgactggggagcggcttcagcactgcagccacgacccgcctggttaggctgcacgcggagagaaccctctgttttcccccactctctctccacctcctcctgccttccccaccccgagtgcggagccagagatcaaaagatgaaaaggcagtcaggtcttcagtagccaaaaaacaaaacaaacaaaaacaaaaaagccgaaataaaagaaaaagataataactcagttcttatttgcacctacttcagtggacactgaatttggaaggtggaggattttgtttttttcttttaagatctgggcatcttttgaatctacccttcaagtattaagagacagactgtgagcctagcagggcagatcttgtccaccgtgtgtcttcttctgcacgagactttgaggctgtcagagcgctttttgcgtggttgctcccgcaagtttccttctctggagcttcccgcaggtgggcagctagctgcagcgactaccgcatcatcacagcctgttgaactcttctgagcaagagaaggggaggcggggtaagggaagtaggtggaagattcagccaagctcaaggatggaagtgcagttagggctgggaagggtctaccctcggccgccgtccaagacctaccgaggagctttccagaatctgttccagagcgtgcgcgaagtgatccagaacccgggccccaggcacccagaggccgcgagcgcagcacctcccggcgccagtttgctgctgctgcagcagcagcagcagcagcagcagcagcagcagcagcagcagcagcagcagcagcagcagcagcagcaagagactagccccaggcagcagcagcagcagcagggtgaggatggttctccccaagcccatcgtagaggccccacaggctacctggtcctggatgaggaacagcaaccttcacagccgcagtcggccctggagtgccaccccgagagaggttgcgtcccagagcctggagccgccgtggccgccagcaaggggctgccgcagcagctgccagcacctccggacgaggatgactcagctgccccatccacgttgtccctgctgggccccactttccccggcttaagcagctgctccgctgaccttaaagacatcctgagcgaggccagcaccatgcaactccttcagcaacagcagcaggaagcagtatccgaaggcagcagcagcgggagagcgagggaggcctcgggggctcccacttcctccaaggacaattacttagggggcacttcgaccatttctgacaacgccaaggagttgtgtaaggcagtgtcggtgtccatgggcctgggtgtggaggcgttggagcatctgagtccaggggaacagcttcggggggattgcatgtacgccccacttttgggagttccacccgctgtgcgtcccactccttgtgccccattggccgaatgcaaaggttctctgctagacgacagcgcaggcaagagcactgaagatactgctgagtattcccctttcaagggaggttacaccaaagggctagaaggcgagagcctaggctgctctggcagcgctgcagcagggagctccgggacacttgaactgccgtctaccctgtctctctacaagtccggagcactggacgaggcagctgcgtaccagagtcgcgactactacaactttccactggctctggccggaccgccgccccctccgccgcctccccatccccacgctcgcatcaagctggagaacccgctggactacggcagcgcctgggcggctgcggcggcgcagtgccgctatggggacctggcgagcctgcatggcgcgggtgcagcgggacccggttctgggtcaccctcagccgccgcttcctcatcctggcacactctcttcacagccgaagaaggccagttgtatggaccgtgtggtggtggtgggggtggtggcggcggcggcggcggcggcggcggcggcggcggcggcggcggcggcggcgaggcgggagctgtagccccctacggctacactcggccccctcaggggctggcgggccaggaaagcgacttcaccgcacctgatgtgtggtaccctggcggcatggtgagcagagtgccctatcccagtcccacttgtgtcaaaagcgaaatgggcccctggatggatagctactccggaccttacggggacatgcgtttggagactgccagggaccatgttttgcccattgactattactttccaccccagaagacctgcctgatctgtggagatgaagcttctgggtgtcactatggagctctcacatgtggaagctgcaaggtcttcttcaaaagagccgctgaagggaaacagaagtacctgtgcgccagcagaaatgattgcactattgataaattccgaaggaaaaattgtccatcttgtcgtcttcggaaatgttatgaagcagggatgactctgggagcccggaagctgaagaaacttggtaatctgaaactacaggaggaaggagaggcttccagcaccaccagccccactgaggagacaacccagaagctgacagtgtcacacattgaaggctatgaatgtcagcccatctttctgaatgtcctggaagccattgagccaggtgtagtgtgtgctggacacgacaacaaccagcccgactcctttgcagccttgctctctagcctcaatgaactgggagagagacagcttgtacacgtggtcaagtgggccaaggccttgcctggcttccgcaacttacacgtggacgaccagatggctgtcattcagtactcctggatggggctcatggtgtttgccatgggctggcgatccttcaccaatgtcaactccaggatgctctacttcgcccctgatctggttttcaatgagtaccgcatgcacaagtcccggatgtacagccagtgtgtccgaatgaggcacctctctcaagagtttggatggctccaaatcaccccccaggaattcctgtgcatgaaagcactgctactcttcagcattattccagtggatgggctgaaaaatcaaaaattctttgatgaacttcgaatgaactacatcaaggaactcgatcgtatcattgcatgcaaaagaaaaaatcccacatcctgctcaagacgcttctaccagctcaccaagctcctggactccgtgcagcctattgcgagagagctgcatcagttcacttttgacctgctaatcaagtcacacatggtgagcgtggactttccggaaatgatggcagagatcatctctgtgcaagtgcccaagatcctttctgggaaagtcaagcccatctatttccacacccagtgaagcattggaaaccctatttccccaccccagctcatgccccctttcagatgtcttctgcctgttataactctgcactactcctctgcagtgccttggggaatttcctctattgatgtacagtctgtcatgaacatgttcctgaattctatttgctgggctttttttttctctttctctcctttctttttcttcttccctccctatctaaccctcccatggcaccttcagactttgcttcccattgtggctcctatctgtgttttgaatggtgttgtatgcctttaaatctgtgatgatcctcatatggcccagtgtcaagttgtgcttgtttacagcactactctgtgccagccacacaaacgtttacttatcttatgccacgggaagtttagagagctaagattatctggggaaatcaaaacaaaaacaagcaaac

SEQ ID NO: 338 - DNA, 1935 bp, Artificial Sequence
  derived and/or modified sequence
atggaagtccaacttggcctgggccgggtgtacccaagacctccttctaagacctatcgaggtgcattccaaaaccttttccagtccgtgcgcgaggtcattcagaatccagggcccaggcatcctgaagccgcttctgctgccccccccggggcttcactcctgctgttacagcagcagcagcaacagcagcaacaacagcagcaacagcagcagcagcagcagcaacagcagcagcaggagacttcccctagacagcaacagcaacaacagggcgaggacggcagcccgcaagctcacaggagaggaccaacaggttacctggtgcttgatgaagaacagcagccgtcgcaaccccagagcgcgctagaatgtcatcctgaaaggggatgcgtccccgaaccaggggccgcagtggctgcatcaaagggactcccccagcagctgcccgctccgccagatgaagatgactccgctgccccctccacattgtccctgctcggccccacctttcctgggttgtcctcatgttcggccgacctcaaggatatcttatctgaggccagtacaatgcaactgctgcagcagcaacaacaggaggcggtgagcgaaggaagctcttctggaagggctagagaggctagcggcgcacctacatcctctaaagacaactacctgggtggtacctccaccatatcagataacgctaaagagctctgtaaggccgtgtctgttagcatgggtcttggggtggaagctctggaacatctgtcacccggcgaacagctgcgcggggattgtatgtacgctcccctgctgggagttccgccggcagtgcgcccaaccccatgcgcaccgttggctgaatgcaagggaagtctcctcgacgattccgcaggaaagtccacagaggacaccgccgagtactctccatttaaaggaggatataccaagggcttagaaggggaatccttgggctgtagcggtagcgccgctgctggctcttccggaactctagagttgccttcaacactcagcctgtataaatctggcgctttagatgaggccgccgcgtatcagagtcgggactattacaactttccactggcccttgccgggccacctcccccaccacccccgcctcaccctcatgcaaggattaaattagagaatcccctggactatgggtctgcctgggcagctgccgctgctcagtgtcgatacggggatttggcaagtcttcacggagctggtgctgctggaccaggatcaggcagtccgtctgctgctgcctcctcctcttggcacacacttttcactgctgaggaaggccagctgtacggtccgtgcggaggaggagggggaggcggggggggcggcgggggtggaggaggcggcggcggagggggcggcggcggggaggccggtgccgttgctccttacggctacacacgtcctccgcaggggctggccggacaggaatccgactttacagctcctgatgtctggtatccgggtggaatggtaagtcgcgtgccctatcctagtcctacctgtgtgaagtccgaaatgggaccgtggatggacagttatagcggaccttatggagatatgcgactggagaccgcccgtgatcacgtgttgcccatcgactattattttccaccccagaagacatgtctcatctgcggagatgaagccagcggctgtcactacggcgcactgacctgtggttcctgcaaagtgttctttaaacgggccgctgaaggcaaacagaaatacctctgtgcaagcaggaatgattgcactattgataagttccggaggaagaattgtccttcttgccgccttagaaaatgctacgaggcaggcatgacactcggggagaagttcagagtggggaattgtaaacacctgaaaatgactagaccatag

SEQ ID NO: 339 - DNA, 1803 bp, Artificial Sequence
  derived and/or modified sequence
atggaagtccagctgggcctggggagggtttaccctcgaccccctagcaagacatatcgaggcgcctttcagaatctcttccaatcagtgcgcgaggtaattcagaatccaggtcctaggcacccagaagctgcttcggcagcaccaccgggagcctctctgcttctcttgcagcagcagcagcagcagcagcagcaacagcagcagcagcaacagcagcagcagcagcaacagcaacaggaaacttcacctcgtcagcagcaacagcagcaaggggaagacggctccccacaagcccatcgccgtggccctacagggtacctcgtgctggatgaggaacaacagccatctcaaccccagtccgctctggagtgtcaccctgaacgcggctgcgtgcccgagccaggcgcagctgtggctgccagcaaagggttacctcagcagcttccagcccctcccgatgaagacgactctgccgcaccatcgactttatctctcttgggaccaacgttccctggtctctcttcctgctcagccgacttaaaggatattctttccgaggctagtacaatgcagctgcttcagcagcagcagcaggaggccgtgtctgagggctcctcttccggcagagccagggaggcctctggcgccccgacgagcagcaaggataattatcttggcgggacgtccactataagcgacaacgcaaaagagctctgcaaagccgtcagtgtttccatgggattaggcgtggaggcgctggaacacctaagccccggggagcagttgaggggggattgcatgtatgcccctttgttaggtgtgcctcccgcagtgcggccgactccttgtgccccacttgccgagtgcaaggggagcctcttggacgattccgccggaaagagtactgaagacacagccgaatattctccatttaaagggggctatactaagggcctggaaggcgagagccttggctgctcaggctctgccgcagccgggagctctggtacgctagaattgccaagcacacttagcctgtataagagcggcgcattggacgaggcagctgcctaccaatcgcgggactactacaatttcccattggcattggccggccctcctcccccacccccgccaccccatccgcacgcccggatcaagctggaaaaccccctcgactatggcagtgcttgggctgccgccgctgcacagtgcaggtacggggacctggcgagcctccatggagctggtgcggctggaccgggttcgggtagtcctagcgccgcagcctctagcagttggcacaccctgtttactgctgaggagggccagctgtacggcccgtgtggaggtggtggtggcgggggaggcggcggtggcggagggggcggcggtgggggcggaggggggggaggagaggccggtgccgtggctccttacgggtacacacgtccaccccagggactggcggggcaggagtccgatttcacggcaccagatgtgtggtatcctggggggatggtgtcgagagtcccatacccctccccaacctgcgtgaaaagcgagatgggcccctggatggacagttatagcgggccttacggggatatgagactcgaaaccgcaagagaccatgtgttgccaatcgactattatttccctccacagaaaacgtgcctcatctgtggggacgaggcatcagggtgccactacggtgcactgacctgtgggagttgcaaggtcttctttaagagagccgccgagggattcttcagaatgaataaactcaaggagagttag

SEQ ID NO: 340 - DNA, 1935 bp, Artificial Sequence
  derived and/or modified sequence
atggaggtgcagctgggcctgggccgggtgtacccccggccccccagcaagacctacagaggagccttccagaacctcttccagagcgtgcgggaggtgatccagaaccctggccccaggcaccctgaggccgccagcgctgcccctcctggggccagcctgctgctgctgcagcagcagcagcagcagcagcagcagcagcagcagcagcagcagcagcagcagcagcagcagcagcaggagaccagcccccggcagcagcagcagcagcagggagaagatggcagcccccaggcccacagaagaggccccaccggctacctggtgctggatgaggagcagcagcccagccagccccagagcgccctggagtgccaccctgagcggggctgtgtgcctgagcctggagctgctgtggccgccagcaagggcctgccccagcagctgcctgcccccccagatgaagatgacagcgctgcccccagcaccctgagcctgctgggccccaccttccctggcctgagcagctgcagcgctgacctgaaggacatcctgtctgaggccagcaccatgcagctgctgcagcagcagcagcaggaggccgtgtctgagggcagcagcagcggccgggcccgggaggccagcggggcccccaccagcagcaaggacaactacctgggcggcaccagcaccatcagtgacaatgccaaggagctgtgcaaggctgtgtctgtgtccatgggcctgggcgtggaggccctggagcacctgagccctggagagcagctgcggggggactgcatgtatgcccccctgctgggcgtgcccccagctgtgcggcccaccccctgtgcccccctggctgaatgtaaaggcagcctgctggatgacagcgctgggaagagcacagaggacacagctgagtacagccccttcaagggcggctacaccaagggcctggagggggagagcctgggctgcagcggcagcgctgctgctggcagcagcggcaccctggagctgcccagcaccctgagcctgtacaagagcggggccctggatgaggccgccgcctaccagagccgggactactacaacttccccctggccctggccggccccccacctcctcctcctccaccccacccccacgcccgcatcaagctggagaaccccctggactatggcagcgcctgggccgctgctgctgcccagtgccgctacggggacctggccagcctgcatggagctggagctgctggccctggcagcggcagccccagcgctgctgccagcagctcctggcacaccctcttcaccgctgaggagggccagctgtatggcccctgtggcggcggcggcggcggcggcggcggcggcggcggcggcggcggcggcggcggcggcggcggcggcggggaggccggggctgtggccccctacggctacacccggcccccccagggcctggccggccaggagagtgacttcaccgccccagatgtgtggtacccaggcggcatggtgtcccgggtgccctaccccagccccacctgtgtgaagtctgagatgggcccctggatggacagctacagcggcccctatggagacatgaggctggagacagcccgggaccacgtgctgcccatcgactactacttccccccccagaagacctgcctgatctgtggagatgaggccagcggctgccactacggggccctgacctgtggcagctgcaaggtgttcttcaagagagctgctgagggcaagcagaagtacctgtgtgccagcagaaatgactgcaccatcgacaagttccggaggaagaactgccccagctgccgcctgaggaaatgttatgaagctggcatgaccctgggggagaagttccgggtgggcaactgcaagcacctgaagatgacccggccctag

SEQ ID NO: 341 - DNA, 1803 bp, Artificial Sequence
  derived and/or modified sequence
atggaggtgcagctgggcctgggccgggtgtacccccggccccccagcaagacctacagaggagccttccagaacctcttccagagcgtgcgggaggtgatccagaaccctggccccaggcaccctgaggccgccagcgctgcccctcctggggccagcctgctgctgctgcagcagcagcagcagcagcagcagcagcagcagcagcagcagcagcagcagcagcagcagcagcagcaggagaccagcccccggcagcagcagcagcagcagggagaagatggcagcccccaggcccacagaagaggccccaccggctacctggtgctggatgaggagcagcagcccagccagccccagagcgccctggagtgccaccctgagcggggctgtgtgcctgagcctggagctgctgtggccgccagcaagggcctgccccagcagctgcctgcccccccagatgaagatgacagcgctgcccccagcaccctgagcctgctgggccccaccttccctggcctgagcagctgcagcgctgacctgaaggacatcctgtctgaggccagcaccatgcagctgctgcagcagcagcagcaggaggccgtgtctgagggcagcagcagcggccgggcccgggaggccagcggggcccccaccagcagcaaggacaactacctgggcggcaccagcaccatcagtgacaatgccaaggagctgtgcaaggctgtgtctgtgtccatgggcctgggcgtggaggccctggagcacctgagccctggagagcagctgcggggggactgcatgtatgcccccctgctgggcgtgcccccagctgtgcggcccaccccctgtgcccccctggctgaatgtaaaggcagcctgctggatgacagcgctgggaagagcacagaggacacagctgagtacagccccttcaagggcggctacaccaagggcctggagggggagagcctgggctgcagcggcagcgctgctgctggcagcagcggcaccctggagctgcccagcaccctgagcctgtacaagagcggggccctggatgaggccgccgcctaccagagccgggactactacaacttccccctggccctggccggccccccacctcctcctcctccaccccacccccacgcccgcatcaagctggagaaccccctggactatggcagcgcctgggccgctgctgctgcccagtgccgctacggggacctggccagcctgcatggagctggagctgctggccctggcagcggcagccccagcgctgctgccagcagctcctggcacaccctcttcaccgctgaggagggccagctgtatggcccctgtggcggcggcggcggcggcggcggcggcggcggcggcggcggcggcggcggcggcggcggcggcggcggggaggccggggctgtggccccctacggctacacccggcccccccagggcctggccggccaggagagtgacttcaccgccccagatgtgtggtacccaggcggcatggtgtcccgggtgccctaccccagccccacctgtgtgaagtctgagatgggcccctggatggacagctacagcggcccctatggagacatgaggctggagacagcccgggaccacgtgctgcccatcgactactacttccccccccagaagacctgcctgatctgtggagatgaggccagcggctgccactacggggccctgacctgtggcagctgcaaggtgttcttcaagagagctgctgagggcttcttcaggatgaacaagctgaaggagagctag

SEQ ID NO: 342 - DNA, 1935 bp, Artificial Sequence
  derived and/or modified sequence
atggaggtgcagctgggcctgggccgggtgtacccccggcccccctccaaaacatacagaggtgccttccagaacctcttccaaagcgtacgcgaggtcatccaaaaccctggtcccagacatcctgaagcagcctccgccgcaccgccaggggcatctctgcttttgcttcagcagcagcagcagcagcagcagcagcaacagcagcagcagcagcaacaacaacagcagcaacagcaggaaacttctccaaggcagcagcagcagcagcagggcgaagacggctccccccaggcacatcggagagggcccactgggtacctggtgctggacgaggagcagcagccgtctcagcctcagtctgctctggagtgccatcctgagagaggttgtgtcccagaacctggggcggccgtggcagcgagcaagggtctgccacagcagcttcctgctcctccagacgaggatgattcagccgccccttccacattgtccttgctggggcccacttttccagggctgtccagctgctctgccgatctcaaagacatcctatcggaggcttccaccatgcagctcctgcaacagcaacagcaggaggccgtgtccgaaggctcatcaagtgggagagcacgtgaagcctctggagcccccacgtcttctaaggataattatctgggaggcactagcacaatttctgacaacgcaaaagagctctgcaaggccgtaagcgtgtccatgggattgggcgtcgaagcattggaacatctatcgccgggggaacagttaaggggggactgtatgtatgcgccgctgcttggggttcccccggccgtgcgccctacaccttgcgctccactggccgaatgcaagggctcactactcgatgactccgccggcaagtcaactgaggacactgccgaatacagtccctttaagggaggatacacaaaaggcctggaaggcgaatctttgggttgcagtggatcagccgctgccggctcttctggaactctggagctgccgagcacgcttagcctttacaaatcaggagccctcgacgaggcggctgcatatcaaagccgcgactattacaattttcctctggccttggcaggccctccacctcccccccctccaccccatccccacgcccgcataaagctggagaaccctctggattatggttcagcctgggctgccgccgccgcacagtgcagatacggcgacctggcctcacttcacggggccggcgcagccggcccaggtagcggttctccgtccgctgccgcctcctcttcttggcataccctctttaccgccgaggaggggcagctatacgggccatgtgggggagggggcggcggcggaggcggtggcggggggggagggggtggaggaggaggtggcggagggggcgaagcaggagccgtagctccttatggatacacccggccgcctcagggcttggctggacaggaatccgacttcaccgctccagacgtgtggtacccaggtggcatggtctcacgcgtaccatatccgtcccccacttgtgtgaaatccgagatgggcccctggatggattcctatagtgggccttatggagatatgcggctcgagacagcccgcgatcatgtgctccctattgattactacttccctcctcagaagacgtgcctgatatgtggtgatgaagcctctgggtgtcattacggggccctgacatgtggttcttgcaaagtgttttttaagagagcagccgagggaaaacagaaatatctgtgtgcctcccgcaacgactgcactatagataagtttcgacgaaagaactgcccatcatgtcgtcttcgcaaatgctatgaagctggaatgaccctcggtgagaaatttcgagtcgggaactgtaaacacctcaagatgacccgtccctag

SEQ ID NO: 343 - DNA, 1803 bp, Artificial Sequence
  derived and/or modified sequence
atggaggtgcagctgggcctgggccgggtgtacccccggccccccagtaaaacctatagaggcgcattccaaaacctgttccagagcgtgcgcgaggttatccagaatccaggccctcgtcaccccgaagctgcttcagctgcccccccaggggcctcattactgctgctgcagcagcagcagcaacagcaacagcagcagcagcagcaacagcagcagcaacagcagcagcagcagcaagagacatccccacggcaacaacagcagcaacagggggaggatggcagtcctcaggcgcacagacgaggtcctactggctacttagtgttggatgaagagcaacaaccttctcaaccacagagtgccctggaatgccatcctgagagagggtgtgtgccagagcctggggctgccgtggcggcatccaaaggtctgcctcaacagctcccagcaccccccgatgaagatgatagtgccgctcctagcactttgagtctgcttgggccaactttcccggggctctcttcatgtagcgctgacttgaaggacatattatctgaggcatccacgatgcagctcctacagcagcagcaacaggaggccgtgtctgagggatcttcatctgggcgggccagggaagcctcaggtgcacctacgtcaagcaaggacaattatcttggaggcactagtacaatctcagataatgcaaaagagctctgcaaagctgttagtgtgtcgatgggcctcggcgtcgaggctctggagcacttgagcccaggtgagcagttaaggggcgactgcatgtacgctcctctgctcggcgtgcctcctgcagttcggccgacaccctgcgcccctttagctgaatgcaaagggtcgctcttggatgacagtgccggaaaatctaccgaagacactgcagaatatagtccgttcaagggcggttatacaaaaggcctggaaggcgaatccttgggttgctccggttccgctgcggccgggtctagtggcacactggaattgccgtcaactctgtcattgtataagagtggcgccctggatgaggcggctgcttaccaaagtagggactattataatttccctctggccttggccgggcctcctccacccccacctccccctcacccccatgccaggatcaagctagaaaatccactggactatggtagcgcctgggccgctgccgccgctcaatgtcgctatggcgatttggcctctctgcacggggccggcgctgccggacccggcagcggctctccatcagcagctgctagtagctcttggcacactctttttacggcagaggaagggcagctgtacggaccctgtggaggaggcggcggcggaggaggtgggggaggtgggggcggtgggggcggcggaggtggcggcggaggagaggccggtgccgttgcaccatacggttacacccgccccccgcaaggtctggccggacaggagagtgatttcacagctccagatgtatggtaccccggtggtatggtctccagagtgccttacccttcacccacctgcgttaagtccgaaatgggcccttggatggatagctacagcggaccatatggagacatgcgtctggagactgcccgcgaccacgtgttgccaatcgattactatttccccccccagaaaacctgtcttatctgcggggacgaggcgtcgggatgccactacggcgcattgacttgtgggagctgtaaggtgttcttcaaacgtgctgctgaaggattcttccggatgaataagttgaaggaatcgtag

SEQ ID NO: 344 - DNA, 1935 bp, Artificial Sequence
  derived and/or modified sequence
atggaggtccagcttggactagggcgtgtgtatcccaggcctccatcgaaaacgtatcggggagccttccagaacttgttccagtcagtgcgagaggtcatacagaatcccggacctcgccatccggaggctgctagcgcagctcctcctggcgcttcactattgcttctgcagcagcaacagcagcagcagcaacagcagcagcagcagcagcagcaacagcagcagcagcagcagcaagaaaccagccctcgacaacagcaacagcaacagggagaggacggatccccacaggcccacaggcggggacccaccggctacttagtcctcgatgaagagcagcagccatcccaaccacagtcggccctggagtgtcaccctgagcgaggctgcgtgccagagccgggagctgcagtggcggcatctaaaggcttgccacagcaactacccgcacctccagatgaggacgactccgccgctccgtccacgctgtctcttttaggaccaacattcccgggactgtccagttgcagcgcagatctgaaagacattctgagcgaagcgagtacaatgcaattgctccagcagcagcagcaagaggcagtatctgaaggtagctcctccggcagagcccgtgaagcctcgggggcacccacttcaagcaaggacaactacttgggcggaacttccaccatctctgacaacgctaaggagctgtgtaaggcagtgtcagtctccatggggctgggcgtcgaagcgctggaacacctaagcccgggagaacaattgaggggtgactgtatgtatgctcccttgttgggcgtacccccagcggtccgacctactccttgtgcacccctggccgagtgtaaaggttctctgttggacgattccgcaggcaagtctacagaagataccgccgaatacagcccctttaaaggtggttatacaaaaggcctcgaaggagaaagcctgggctgtagtgggtcagcagctgctggctcaagcggcacattggaactcccctcaaccctgagtctgtacaaaagtggtgcactcgatgaggcggcagcatatcaaagccgcgactattataattttcccttggctctcgccggtccgccaccccctccacccccaccccaccctcatgctaggatcaagctcgagaatcccctcgactacggaagtgcatgggcagccgctgcagcccaatgcaggtacggcgacttggcctcgctgcacggagccggtgccgctgggccaggctctggctccccgtcggcggctgcgtcttcttcctggcacacgttgttcaccgctgaagaaggacaactgtacggtccttgtggtggaggcggtggcggtggcggtggtggtggagggggagggggtggtgggggaggcggaggcggaggggaagcaggtgcagtggcaccatacggatatactcgacctcctcagggtctggccggtcaggagtccgactttaccgcccctgatgtctggtatccaggaggcatggtgagcagggtcccctacccttcacccacatgtgtcaaatctgaaatggggccatggatggattcttattccggaccatacggggatatgcgactggagacggccagagatcacgtgctaccgatcgactactactttccaccccaaaagacctgtttaatctgtggcgatgaggctagcggttgtcactacggggcattgacttgcggttcttgtaaagtgtttttcaaacgggcagctgagggcaaacagaagtatctgtgcgcgtcccgaaacgactgtactatagataaattcagacgaaagaactgtccatcctgtcggctgaggaaatgctacgaagccggaatgacgctgggggagaagtttcgcgtcggtaactgtaagcacctgaaaatgaccagaccatag

SEQ ID NO: 345 - DNA, 1803 bp, Artificial Sequence
  derived and/or modified sequence
atggaggtgcaattgggccttggacgcgtgtacccaagaccgcctagcaagacctaccgaggggcatttcaaaatctctttcaatccgttcgggaggttattcaaaatccgggacccaggcatccagaggctgcctcggcggcaccaccaggagccagcctgctcttactacagcaacaacagcagcagcagcagcagcagcaacagcagcagcagcagcagcagcagcaacagcagcaagaaaccagcccccgacagcagcagcaacagcagggcgaggatgggtcgccccaggcacatcgccgtggtcctaccggctatttggtgttggatgaagaacagcaaccatctcagccccaatcagcgctggaatgccatcctgagcgaggctgcgtgccagaacctggcgctgccgttgcggcatcaaaaggtctgcctcagcaactgccagcaccaccagacgaggacgatagtgctgcgccatccacgctgagcctactcgggccaaccttcccgggactatcgtcctgctccgccgatctgaaagacatcctaagcgaagcctccactatgcaactgctgcagcaacaacagcaagaggccgtttctgaaggcagcagttcaggacgagccagagaggccagtggcgcaccgacatcgtccaaggataactacttggggggtacttcaacaatctctgacaacgctaaagaactgtgcaaagctgtctctgtctctatgggactcggcgtcgaagcactggagcacctgagtcctggcgaacagctgcgtggcgattgcatgtacgcccctttgctcggtgttcctcctgccgttcgtccaactccctgtgcacccctcgctgagtgcaagggatctctgctggatgactcggctggcaagagcaccgaggatactgccgaatactcgcccttcaagggcggttacactaagggtttggaaggcgagtctctcggatgctccggttctgctgcagcaggaagttcaggaactctggagttgccttcaactctcagcctgtataagagtggagcattggacgaggccgctgcctaccagagccgcgattactacaacttcccactggccttggcaggacctcctcccccaccgccacccccacacccacacgccagaattaagctggagaaccctctggattatgggtccgcctgggcagccgctgcagcacagtgcaggtacggcgatctggccagtctgcacggggctggcgcagcaggcccaggatccggtagcccgagcgctgccgcttcgagcagctggcacactctgtttaccgcagaagaaggccagctctatggaccctgcggcggaggagggggaggcggtgggggaggcggtggtggtgggggaggcggagggggaggtggcggaggtgaagcaggcgcagtggcaccatatggctacaccagacctccccaaggcttagctggccaggaaagcgacttcacagcacctgatgtgtggtatccgggtggcatggttagcagggttccctacccttcaccaacctgtgtgaagtcagaaatgggtccatggatggattcctactcaggtccctatggagatatgagactggaaaccgctcgcgatcacgtgctaccaatagactattattttcccccacagaagacttgtcttatttgcggagacgaagcttccggttgtcattacggagcattgacctgcggcagctgtaaggtgttttttaagagggcagccgaaggcttcttccgcatgaataaactgaaggagtcctag

SEQ ID NO: 346 - DNA, 3615 bp, Artificial Sequence
  derived and/or modified sequence
gacactgaatttggaaggtggaggattttgtttttttcttttaagatctgggcatcttttgaatctacccttcaagtattaagagacagactgtgagcctagcagggcagatcttgtccaccgtgtgtcttcttctgcacgagactttgaggctgtcagagcgctttttgcgtggttgctcccgcaagtttccttctctggagcttcccgcaggtgggcagctagctgcagcgactaccgcatcatcacagcctgttgaactcttctgagcaagagaaggggaggcggggtaagggaagtaggtggaagattcagccaagctcaaggatggaagtgcagttagggctgggaagggtctaccctcggccgccgtccaagacctaccgaggagctttccagaatctgttccagagcgtgcgcgaagtgatccagaacccgggccccaggcacccagaggccgcgagcgcagcacctcccggcgccagtttgctgctgctgcagcagcagcagcagcagcagcagcagcagcagcagcagcagcagcagcagcagcagcagcagcagcaagagactagccccaggcagcagcagcagcagcagggtgaggatggttctccccaagcccatcgtagaggccccacaggctacctggtcctggatgaggaacagcaaccttcacagccgcagtcggccctggagtgccaccccgagagaggttgcgtcccagagcctggagccgccgtggccgccagcaaggggctgccgcagcagctgccagcacctccggacgaggatgactcagctgccccatccacgttgtccctgctgggccccactttccccggcttaagcagctgctccgctgaccttaaagacatcctgagcgaggccagcaccatgcaactccttcagcaacagcagcaggaagcagtatccgaaggcagcagcagcgggagagcgagggaggcctcgggggctcccacttcctccaaggacaattacttagggggcacttcgaccatttctgacaacgccaaggagttgtgtaaggcagtgtcggtgtccatgggcctgggtgtggaggcgttggagcatctgagtccaggggaacagcttcggggggattgcatgtacgccccacttttgggagttccacccgctgtgcgtcccactccttgtgccccattggccgaatgcaaaggttctctgctagacgacagcgcaggcaagagcactgaagatactgctgagtattcccctttcaagggaggttacaccaaagggctagaaggcgagagcctaggctgctctggcagcgctgcagcagggagctccgggacacttgaactgccgtctaccctgtctctctacaagtccggagcactggacgaggcagctgcgtaccagagtcgcgactactacaactttccactggctctggccggaccgccgccccctccgccgcctccccatccccacgctcgcatcaagctggagaacccgctggactacggcagcgcctgggcggctgcggcggcgcagtgccgctatggggacctggcgagcctgcatggcgcgggtgcagcgggacccggttctgggtcaccctcagccgccgcttcctcatcctggcacactctcttcacagccgaagaaggccagttgtatggaccgtgtggtggtggtgggggtggtggcggcggcggcggcggcggcggcggcggcggcggcggcggcggcggcggcgaggcgggagctgtagccccctacggctacactcggccccctcaggggctggcgggccaggaaagcgacttcaccgcacctgatgtgtggtaccctggcggcatggtgagcagagtgccctatcccagtcccacttgtgtcaaaagcgaaatgggcccctggatggatagctactccggaccttacggggacatgcgtttggagactgccagggaccatgttttgcccattgactattactttccaccccagaagacctgcctgatctgtggagatgaagcttctgggtgtcactatggagctctcacatgtggaagctgcaaggtcttcttcaaaagagccgctgaagggaaacagaagtacctgtgcgccagcagaaatgattgcactattgataaattccgaaggaaaaattgtccatcttgtcgtcttcggaaatgttatgaagcagggatgactctgggagaaaaattccgggttggcaattgcaagcatctcaaaatgaccagaccctgaagaaaggctgacttgcctcattcaaaatgagggctctagagggctctagtggatagtctggagaaacctggcgtctgaggcttaggagcttaggtttttgctcctcaacacagactttgacgttggggttgggggctactctcttgattgctgactccctccagcgggaccaatagtgttttcctacctcacagggatgttgtgaggacgggctgtagaagtaatagtggttaccattcatgtagttgtgagtatcatgattattgtttcctgtaatgtggcttggcattggcaaagtgctttttgattgttcttgatcacatatgatgggggccaggcactgactcaggcggatgcagtgaagctctggctcagtcgcttgcttttcgtggtgtgctgccaggaagaaactttgctgatgggactcaaggtgtcaccttggacaagaagcaactgtgtctgtctgaggttcctgtggccatctttatttgtgtattaggcaattcgtatttcccccttaggttctagccttctggatcccagccagtgacctagatcttagcctcaggccctgtcactgagctgaaggtagtagctgatccacagaagttcagtaaacaaggaccagatttctgcttctccaggagaagaagccagccaacccctctcttcaaacacactgagagactacagtccgactttccctcttacatctagccttactgtagccacactccttgattgctctctcacatcacatgcttctcttcatcagttgtaagcctctcattcttctcccaagccagactcaaatattgtattgatgtcaaagaagaatcacttagagtttggaatatcttgttctctctctgctccatagcttccatattgacaccagtttctttctagtggagaagtggagtctgtgaagccagggaaacacacatgtgagagtcagaaggactctccctgacttgcctggggcctgtctttcccaccttctccagtctgtctaaacacacacacacacacacacacacacacacacacgctctctctctctctccccccccaacacacacacactctctctctctctcacacacacacacatacacacacacttctttctctttcccctgactcagcaacattctggagaaaagccaaggaaggacttcaggaggggagtttcccccttctcagggcagaattttaatctccagaccaacaagaagttccctaatgtggattgaaaggctaatgaggtttatttttaactactttctatttgtttgaatgttgcatatttctactagtgaaattttcccttaataaagccattaatacacc

SEQ ID NO: 347 - DNA, 3899 bp, Artificial Sequence
  derived and/or modified sequence
gacactgaatttggaaggtggaggattttgtttttttcttttaagatctgggcatcttttgaatctacccttcaagtattaagagacagactgtgagcctagcagggcagatcttgtccaccgtgtgtcttcttctgcacgagactttgaggctgtcagagcgctttttgcgtggttgctcccgcaagtttccttctctggagcttcccgcaggtgggcagctagctgcagcgactaccgcatcatcacagcctgttgaactcttctgagcaagagaaggggaggcggggtaagggaagtaggtggaagattcagccaagctcaaggatggaagtgcagttagggctgggaagggtctaccctcggccgccgtccaagacctaccgaggagctttccagaatctgttccagagcgtgcgcgaagtgatccagaacccgggccccaggcacccagaggccgcgagcgcagcacctcccggcgccagtttgctgctgctgcagcagcagcagcagcagcagcagcagcagcagcagcagcagcagcagcagcagcagcagcagcagcaagagactagccccaggcagcagcagcagcagcagggtgaggatggttctccccaagcccatcgtagaggccccacaggctacctggtcctggatgaggaacagcaaccttcacagccgcagtcggccctggagtgccaccccgagagaggttgcgtcccagagcctggagccgccgtggccgccagcaaggggctgccgcagcagctgccagcacctccggacgaggatgactcagctgccccatccacgttgtccctgctgggccccactttccccggcttaagcagctgctccgctgaccttaaagacatcctgagcgaggccagcaccatgcaactccttcagcaacagcagcaggaagcagtatccgaaggcagcagcagcgggagagcgagggaggcctcgggggctcccacttcctccaaggacaattacttagggggcacttcgaccatttctgacaacgccaaggagttgtgtaaggcagtgtcggtgtccatgggcctgggtgtggaggcgttggagcatctgagtccaggggaacagcttcggggggattgcatgtacgccccacttttgggagttccacccgctgtgcgtcccactccttgtgccccattggccgaatgcaaaggttctctgctagacgacagcgcaggcaagagcactgaagatactgctgagtattcccctttcaagggaggttacaccaaagggctagaaggcgagagcctaggctgctctggcagcgctgcagcagggagctccgggacacttgaactgccgtctaccctgtctctctacaagtccggagcactggacgaggcagctgcgtaccagagtcgcgactactacaactttccactggctctggccggaccgccgccccctccgccgcctccccatccccacgctcgcatcaagctggagaacccgctggactacggcagcgcctgggcggctgcggcggcgcagtgccgctatggggacctggcgagcctgcatggcgcgggtgcagcgggacccggttctgggtcaccctcagccgccgcttcctcatcctggcacactctcttcacagccgaagaaggccagttgtatggaccgtgtggtggtggtgggggtggtggcggcggcggcggcggcggcggcggcggcggcggcggcggcggcggcggcgaggcgggagctgtagccccctacggctacactcggccccctcaggggctggcgggccaggaaagcgacttcaccgcacctgatgtgtggtaccctggcggcatggtgagcagagtgccctatcccagtcccacttgtgtcaaaagcgaaatgggcccctggatggatagctactccggaccttacggggacatgcgtttggagactgccagggaccatgttttgcccattgactattactttccaccccagaagacctgcctgatctgtggagatgaagcttctgggtgtcactatggagctctcacatgtggaagctgcaaggtcttcttcaaaagagccgctgaaggatttttcagaatgaacaaattaaaagaatcataatcagacactaaccccaagccatactgcatggcagcaccaatgggactgacagaaaacaacagaaataggaagaaatcctacagagaaacaaacttgaaagctgtctcatggcctttgaatcatacttaagttttatgatggaaggatacgactatgaagaaagacacagagcaacatcagacagtcaagaatttcagagccagctggcatgcagtggacctcatgccagcccattttatgactatttagggaaacagaagtacctgtgcgccagcagaaatgattgcactattgataaattccgaaggaaaaattgtccatcttgtcgtcttcggaaatgttatgaagcagggatgactctgggagaaaaattccgggttggcaattgcaagcatctcaaaatgaccagaccctgaagaaaggctgacttgcctcattcaaaatgagggctctagagggctctagtggatagtctggagaaacctggcgtctgaggcttaggagcttaggtttttgctcctcaacacagactttgacgttggggttgggggctactctcttgattgctgactccctccagcgggaccaatagtgttttcctacctcacagggatgttgtgaggacgggctgtagaagtaatagtggttaccattcatgtagttgtgagtatcatgattattgtttcctgtaatgtggcttggcattggcaaagtgctttttgattgttcttgatcacatatgatgggggccaggcactgactcaggcggatgcagtgaagctctggctcagtcgcttgcttttcgtggtgtgctgccaggaagaaactttgctgatgggactcaaggtgtcaccttggacaagaagcaactgtgtctgtctgaggttcctgtggccatctttatttgtgtattaggcaattcgtatttcccccttaggttctagccttctggatcccagccagtgacctagatcttagcctcaggccctgtcactgagctgaaggtagtagctgatccacagaagttcagtaaacaaggaccagatttctgcttctccaggagaagaagccagccaacccctctcttcaaacacactgagagactacagtccgactttccctcttacatctagccttactgtagccacactccttgattgctctctcacatcacatgcttctcttcatcagttgtaagcctctcattcttctcccaagccagactcaaatattgtattgatgtcaaagaagaatcacttagagtttggaatatcttgttctctctctgctccatagcttccatattgacaccagtttctttctagtggagaagtggagtctgtgaagccagggaaacacacatgtgagagtcagaaggactctccctgacttgcctggggcctgtctttcccaccttctccagtctgtctaaacacacacacacacacacacacacacacacacacgctctctctctctctccccccccaacacacacacactctctctctctctcacacacacacacatacacacacacttctttctctttcccctgactcagcaacattctggagaaaagccaaggaaggacttcaggaggggagtttcccccttctcagggcagaattttaatctccagaccaacaagaagttccctaatgtggattgaaaggctaatgaggtttatttttaactactttctatttgtttgaatgttgcatatttctactagtgaaattttcccttaataaagccattaatacacc

SEQ ID NO: 348 - DNA, 1935 bp, Artificial Sequence
  derived and/or modified sequence
atggaggtgcagctgggcctgggcagagtgtaccccagaccccccagcaagacctacagaggcgccttccagaacctgttccagagcgtgagagaggtgatccagaaccccggccccagacaccccgaggccgccagcgccgccccccccggcgccagcctgctgctgctgcagcagcagcagcagcagcagcagcagcagcagcagcagcagcagcagcagcagcagcagcagcagcaggagaccagccccagacagcagcagcagcagcagggcgaggacggcagcccccaggcccacagaagaggccccaccggctacctggtgctggacgaggagcagcagcccagccagccccagagcgccctggagtgccaccccgagagaggctgcgtgcccgagcccggcgccgccgtggccgccagcaagggcctgccccagcagctgcccgccccccccgacgaggacgacagcgccgcccccagcaccctgagcctgctgggccccaccttccccggcctgagcagctgcagcgccgacctgaaggacatcctgagcgaggccagcaccatgcagctgctgcagcagcagcagcaggaggccgtgagcgagggcagcagcagcggcagagccagagaggccagcggcgcccccaccagcagcaaggacaactacctgggcggcaccagcaccatcagcgacaacgccaaggagctgtgcaaggccgtgagcgtgagcatgggcctgggcgtggaggccctggagcacctgagccccggcgagcagctgagaggcgactgcatgtacgcccccctgctgggcgtgccccccgccgtgagacccaccccctgcgcccccctggccgagtgcaagggcagcctgctggacgacagcgccggcaagagcaccgaggacaccgccgagtacagccccttcaagggcggctacaccaagggcctggagggcgagagcctgggctgcagcggcagcgccgccgccggcagcagcggcaccctggagctgcccagcaccctgagcctgtacaagagcggcgccctggacgaggccgccgcctaccagagcagagactactacaacttccccctggccctggccggccccccccccccccccccccccccccacccccacgccagaatcaagctggagaaccccctggactacggcagcgcctgggccgccgccgccgcccagtgcagatacggcgacctggccagcctgcacggcgccggcgccgccggccccggcagcggcagccccagcgccgccgccagcagcagctggcacaccctgttcaccgccgaggagggccagctgtacggcccctgcggcggcggcggcggcggcggcggcggcggcggcggcggcggcggcggcggcggcggcggcggcggcggcgaggccggcgccgtggccccctacggctacaccagacccccccagggcctggccggccaggagagcgacttcaccgcccccgacgtgtggtaccccggcggcatggtgagcagagtgccctaccccagccccacctgcgtgaagagcgagatgggcccctggatggacagctacagcggcccctacggcgacatgagactggagaccgccagagaccacgtgctgcccatcgactactacttccccccccagaagacctgcctgatctgcggcgacgaggccagcggctgccactacggcgccctgacctgcggcagctgcaaggtgttcttcaagagagccgccgagggcaagcagaagtacctgtgcgccagcagaaacgactgcaccatcgacaagttcagaagaaagaactgccccagctgcagactgagaaagtgctacgaggccggcatgaccctgggcgagaagttcagagtgggcaactgcaagcacctgaagatgaccagaccctag

SEQ ID NO: 349 - DNA, 1803 bp, Artificial Sequence
  derived and/or modified sequence
atggaggtgcagctgggcctgggcagagtgtaccccagaccccccagcaagacctacagaggcgccttccagaacctgttccagagcgtgagagaggtgatccagaaccccggccccagacaccccgaggccgccagcgccgccccccccggcgccagcctgctgctgctgcagcagcagcagcagcagcagcagcagcagcagcagcagcagcagcagcagcagcagcagcagcagcaggagaccagccccagacagcagcagcagcagcagggcgaggacggcagcccccaggcccacagaagaggccccaccggctacctggtgctggacgaggagcagcagcccagccagccccagagcgccctggagtgccaccccgagagaggctgcgtgcccgagcccggcgccgccgtggccgccagcaagggcctgccccagcagctgcccgccccccccgacgaggacgacagcgccgcccccagcaccctgagcctgctgggccccaccttccccggcctgagcagctgcagcgccgacctgaaggacatcctgagcgaggccagcaccatgcagctgctgcagcagcagcagcaggaggccgtgagcgagggcagcagcagcggcagagccagagaggccagcggcgcccccaccagcagcaaggacaactacctgggcggcaccagcaccatcagcgacaacgccaaggagctgtgcaaggccgtgagcgtgagcatgggcctgggcgtggaggccctggagcacctgagccccggcgagcagctgagaggcgactgcatgtacgcccccctgctgggcgtgccccccgccgtgagacccaccccctgcgcccccctggccgagtgcaagggcagcctgctggacgacagcgccggcaagagcaccgaggacaccgccgagtacagccccttcaagggcggctacaccaagggcctggagggcgagagcctgggctgcagcggcagcgccgccgccggcagcagcggcaccctggagctgcccagcaccctgagcctgtacaagagcggcgccctggacgaggccgccgcctaccagagcagagactactacaacttccccctggccctggccggccccccccccccccccccccccccccacccccacgccagaatcaagctggagaaccccctggactacggcagcgcctgggccgccgccgccgcccagtgcagatacggcgacctggccagcctgcacggcgccggcgccgccggccccggcagcggcagccccagcgccgccgccagcagcagctggcacaccctgttcaccgccgaggagggccagctgtacggcccctgcggcggcggcggcggcggcggcggcggcggcggcggcggcggcggcggcggcggcggcggcggcggcggcgaggccggcgccgtggccccctacggctacaccagacccccccagggcctggccggccaggagagcgacttcaccgcccccgacgtgtggtaccccggcggcatggtgagcagagtgccctaccccagccccacctgcgtgaagagcgagatgggcccctggatggacagctacagcggcccctacggcgacatgagactggagaccgccagagaccacgtgctgcccatcgactactacttccccccccagaagacctgcctgatctgcggcgacgaggccagcggctgccactacggcgccctgacctgcggcagctgcaaggtgttcttcaagagagccgccgagggcttcttcagaatgaacaagctgaaggagagctag

SEQ ID NO: 350 - DNA, 2763 bp, Artificial Sequence
  derived and/or modified sequence
atggaggtgcagctgggcctgggcagagtgtaccccagaccccccagcaagacctacagaggcgccttccagaacctgttccagagcgtgagagaggtgatccagaaccccggccccagacaccccgaggccgccagcgccgccccccccggcgccagcctgctgctgctgcagcagcagcagcagcagcagcagcagcagcagcagcagcagcagcagcagcagcagcagcagcagcaggagaccagccccagacagcagcagcagcagcagggcgaggacggcagcccccaggcccacagaagaggccccaccggctacctggtgctggacgaggagcagcagcccagccagccccagagcgccctggagtgccaccccgagagaggctgcgtgcccgagcccggcgccgccgtggccgccagcaagggcctgccccagcagctgcccgccccccccgacgaggacgacagcgccgcccccagcaccctgagcctgctgggccccaccttccccggcctgagcagctgcagcgccgacctgaaggacatcctgagcgaggccagcaccatgcagctgctgcagcagcagcagcaggaggccgtgagcgagggcagcagcagcggcagagccagagaggccagcggcgcccccaccagcagcaaggacaactacctgggcggcaccagcaccatcagcgacaacgccaaggagctgtgcaaggccgtgagcgtgagcatgggcctgggcgtggaggccctggagcacctgagccccggcgagcagctgagaggcgactgcatgtacgcccccctgctgggcgtgccccccgccgtgagacccaccccctgcgcccccctggccgagtgcaagggcagcctgctggacgacagcgccggcaagagcaccgaggacaccgccgagtacagccccttcaagggcggctacaccaagggcctggagggcgagagcctgggctgcagcggcagcgccgccgccggcagcagcggcaccctggagctgcccagcaccctgagcctgtacaagagcggcgccctggacgaggccgccgcctaccagagcagagactactacaacttccccctggccctggccggccccccccccccccccccccccccccacccccacgccagaatcaagctggagaaccccctggactacggcagcgcctgggccgccgccgccgcccagtgcagatacggcgacctggccagcctgcacggcgccggcgccgccggccccggcagcggcagccccagcgccgccgccagcagcagctggcacaccctgttcaccgccgaggagggccagctgtacggcccctgcggcggcggcggcggcggcggcggcggcggcggcggcggcggcggcggcggcggcggcggcggcggcggcgaggccggcgccgtggccccctacggctacaccagacccccccagggcctggccggccaggagagcgacttcaccgcccccgacgtgtggtaccccggcggcatggtgagcagagtgccctaccccagccccacctgcgtgaagagcgagatgggcccctggatggacagctacagcggcccctacggcgacatgagactggagaccgccagagaccacgtgctgcccatcgactactacttccccccccagaagacctgcctgatctgcggcgacgaggccagcggctgccactacggcgccctgacctgcggcagctgcaaggtgttcttcaagagagccgccgagggcaagcagaagtacctgtgcgccagcagaaacgactgcaccatcgacaagttcagaagaaagaactgccccagctgcagactgagaaagtgctacgaggccggcatgaccctgggcgccagaaagctgaagaagctgggcaacctgaagctgcaggaggagggcgaggccagcagcaccaccagccccaccgaggagaccacccagaagctgaccgtgagccacatcgagggctacgagtgccagcccatcttcctgaacgtgctggaggccatcgagcccggcgtggtgtgcgccggccacgacaacaaccagcccgacagcttcgccgccctgctgagcagcctgaacgagctgggcgagagacagctggtgcacgtggtgaagtgggccaaggccctgcccggcttcagaaacctgcacgtggacgaccagatggccgtgatccagtacagctggatgggcctgatggtgttcgccatgggctggagaagcttcaccaacgtgaacagcagaatgctgtacttcgcccccgacctggtgttcaacgagtacagaatgcacaagagcagaatgtacagccagtgcgtgagaatgagacacctgagccaggagttcggctggctgcagatcaccccccaggagttcctgtgcatgaaggccctgctgctgttcagcatcatccccgtggacggcctgaagaaccagaagttcttcgacgagctgagaatgaactacatcaaggagctggacagaatcatcgcctgcaagagaaagaaccccaccagctgcagcagaagattctaccagctgaccaagctgctggacagcgtgcagcccatcgccagagagctgcaccagttcaccttcgacctgctgatcaagagccacatggtgagcgtggacttccccgagatgatggccgagatcatcagcgtgcaggtgcccaagatcctgagcggcaaggtgaagcccatctacttccacacccagtag

SEQ ID NO: 351 - DNA, 2205 bp, Artificial Sequence
  derived and/or modified sequence
atggaggtgcagctgggcctgggcagagtgtaccccagaccccccagcaagacctacagaggcgccttccagaacctgttccagagcgtgagagaggtgatccagaaccccggccccagacaccccgaggccgccagcgccgccccccccggcgccagcctgctgctgctgcagcagcagcagcagcagcagcagcagcagcagcagcagcagcagcagcagcagcagcagcagcagcaggagaccagccccagacagcagcagcagcagcagggcgaggacggcagcccccaggcccacagaagaggccccaccggctacctggtgctggacgaggagcagcagcccagccagccccagagcgccctggagtgccaccccgagagaggctgcgtgcccgagcccggcgccgccgtggccgccagcaagggcctgccccagcagctgcccgccccccccgacgaggacgacagcgccgcccccagcaccctgagcctgctgggccccaccttccccggcctgagcagctgcagcgccgacctgaaggacatcctgagcgaggccagcaccatgcagctgctgcagcagcagcagcaggaggccgtgagcgagggcagcagcagcggcagagccagagaggccagcggcgcccccaccagcagcaaggacaactacctgggcggcaccagcaccatcagcgacaacgccaaggagctgtgcaaggccgtgagcgtgagcatgggcctgggcgtggaggccctggagcacctgagccccggcgagcagctgagaggcgactgcatgtacgcccccctgctgggcgtgccccccgccgtgagacccaccccctgcgcccccctggccgagtgcaagggcagcctgctggacgacagcgccggcaagagcaccgaggacaccgccgagtacagccccttcaagggcggctacaccaagggcctggagggcgagagcctgggctgcagcggcagcgccgccgccggcagcagcggcaccctggagctgcccagcaccctgagcctgtacaagagcggcgccctggacgaggccgccgcctaccagagcagagactactacaacttccccctggccctggccggccccccccccccccccccccccccccacccccacgccagaatcaagctggagaaccccctggactacggcagcgcctgggccgccgccgccgcccagtgcagatacggcgacctggccagcctgcacggcgccggcgccgccggccccggcagcggcagccccagcgccgccgccagcagcagctggcacaccctgttcaccgccgaggagggccagctgtacggcccctgcggcggcggcggcggcggcggcggcggcggcggcggcggcggcggcggcggcggcggcggcggcggcggcgaggccggcgccgtggccccctacggctacaccagacccccccagggcctggccggccaggagagcgacttcaccgcccccgacgtgtggtaccccggcggcatggtgagcagagtgccctaccccagccccacctgcgtgaagagcgagatgggcccctggatggacagctacagcggcccctacggcgacatgagactggagaccgccagagaccacgtgctgcccatcgactactacttccccccccagaagacctgcctgatctgcggcgacgaggccagcggctgccactacggcgccctgacctgcggcagctgcaaggtgttcttcaagagagccgccgagggcaagcagaagtacctgtgcgccagcagaaacgactgcaccatcgacaagttcagaagaaagaactgccccagctgcagactgagaaagtgctacgaggccggcatgaccctgggcgccagaaagctgaagaagctgggcaacctgaagctgcaggaggagggcgaggccagcagcaccaccagccccaccgaggagaccacccagaagctgaccgtgagccacatcgagggctacgagtgccagcccatcttcctgaacgtgctggaggccatcgagcccggcgtggtgtgcgccggccacgacaacaaccagcccgacagcttcgccgccctgctgagcagcctgaacgagctgggcgagagacagctggtgcacgtggtgaagtgggccaaggccctgcccgactgcgagagagccgccagcgtgcacttctag

SEQ ID NO: 352 - DNA, 1596 bp, Artificial Sequence
  derived and/or modified sequence
atggaggtgcagctgggcctgggcagagtgtaccccagaccccccagcaagacctacagaggcgccttccagaacctgttccagagcgtgagagaggtgatccagaaccccggccccagacaccccgaggccgccagcgccgccccccccggcgccagcctgctgctgctgcagcagcagcagcagcagcagcagcagcagcagcagcagcagcaggagaccagccccagacagcagcagcagcagcagggcgaggacggcagcccccaggcccacagaagaggccccaccggctacctggtgctggacgaggagcagcagcccagccagccccagagcgccctggagtgccaccccgagagaggctgcgtgcccgagcccggcgccgccgtggccgccagcaagggcctgccccagcagctgcccgccccccccgacgaggacgacagcgccgcccccagcaccctgagcctgctgggccccaccttccccggcctgagcagctgcagcgccgacctgaaggacatcctgagcgaggccagcaccatgcagctgctgcagcagcagcagcaggaggccgtgagcgagggcagcagcagcggcagagccagagaggccagcggcgcccccaccagcagcaaggacaactacctgggcggcaccagcaccatcagcgacaacgccaaggagctgtgcaaggccgtgagcgtgagcatgggcctgggcgtggaggccctggagcacctgagccccggcgagcagctgagaggcgactgcatgtacgcccccctgctgggcgtgccccccgccgtgagacccaccccctgcgcccccctggccgagtgcaagggcagcctgctggacgacagcgccggcaagagcaccgaggacaccgccgagtacagccccttcaagggcggctacaccaagggcctggagggcgagagcctgggctgcagcggcagcgccgccgccggcagcagcggcaccctggagctgcccagcaccctgagcctgtacaagagcggcgccctggacgaggccgccgcctaccagagcagagactactacaacttccccctggccctggccggccccccccccccccccccccccccccacccccacgccagaatcaagctggagaaccccctggactacggcagcgcctgggccgccgccgccgcccagtgcagatacggcgacctggccagcctgcacggcgccggcgccgccggccccggcagcggcagccccagcgccgccgccagcagcagctggcacaccctgttcaccgccgaggagggccagctgtacggcccctgcggcggcggcggcggcggcggcggcggcggcggcggcggcggcggcggcggcggcggcggcggcggcggcgaggccggcgccgtggccccctacggctacaccagacccccccagggcctggccggccaggagagcgacttcaccgcccccgacgtgtggtaccccggcggcatggtgagcagagtgccctaccccagccccacctgcgtgaagagcgagatgggcccctggatggacagctacagcggcccctacggcgacatgagatag

SEQ ID NO: 353 - DNA, 2217 bp, Artificial Sequence
  derived and/or modified sequence
atgcagctgctgcagcagcagcagcaggaggccgtgagcgagggcagcagcagcggcagagccagagaggccagcggcgcccccaccagcagcaaggacaactacctgggcggcaccagcaccatcagcgacaacgccaaggagctgtgcaaggccgtgagcgtgagcatgggcctgggcgtggaggccctggagcacctgagccccggcgagcagctgagaggcgactgcatgtacgcccccctgctgggcgtgccccccgccgtgagacccaccccctgcgcccccctggccgagtgcaagggcagcctgctggacgacagcgccggcaagagcaccgaggacaccgccgagtacagccccttcaagggcggctacaccaagggcctggagggcgagagcctgggctgcagcggcagcgccgccgccggcagcagcggcaccctggagctgcccagcaccctgagcctgtacaagagcggcgccctggacgaggccgccgcctaccagagcagagactactacaacttccccctggccctggccggccccccccccccccccccccccccccacccccacgccagaatcaagctggagaaccccctggactacggcagcgcctgggccgccgccgccgcccagtgcagatacggcgacctggccagcctgcacggcgccggcgccgccggccccggcagcggcagccccagcgccgccgccagcagcagctggcacaccctgttcaccgccgaggagggccagctgtacggcccctgcggcggcggcggcggcggcggcggcggcggcggcggcggcggcggcggcggcggcggcggcggcggcggcgaggccggcgccgtggccccctacggctacaccagacccccccagggcctggccggccaggagagcgacttcaccgcccccgacgtgtggtaccccggcggcatggtgagcagagtgccctaccccagccccacctgcgtgaagagcgagatgggcccctggatggacagctacagcggcccctacggcgacatgagactggagaccgccagagaccacgtgctgcccatcgactactacttccccccccagaagacctgcctgatctgcggcgacgaggccagcggctgccactacggcgccctgacctgcggcagctgcaaggtgttcttcaagagagccgccgagggcaagcagaagtacctgtgcgccagcagaaacgactgcaccatcgacaagttcagaagaaagaactgccccagctgcagactgagaaagtgctacgaggccggcatgaccctgggcgccagaaagctgaagaagctgggcaacctgaagctgcaggaggagggcgaggccagcagcaccaccagccccaccgaggagaccacccagaagctgaccgtgagccacatcgagggctacgagtgccagcccatcttcctgaacgtgctggaggccatcgagcccggcgtggtgtgcgccggccacgacaacaaccagcccgacagcttcgccgccctgctgagcagcctgaacgagctgggcgagagacagctggtgcacgtggtgaagtgggccaaggccctgcccggcttcagaaacctgcacgtggacgaccagatggccgtgatccagtacagctggatgggcctgatggtgttcgccatgggctggagaagcttcaccaacgtgaacagcagaatgctgtacttcgcccccgacctggtgttcaacgagtacagaatgcacaagagcagaatgtacagccagtgcgtgagaatgagacacctgagccaggagttcggctggctgcagatcaccccccaggagttcctgtgcatgaaggccctgctgctgttcagcatcaccttctgcctgcaccccaccagcgtgcccgtggacggcctgaagaaccagaagttcttcgacgagctgagaatgaactacatcaaggagctggacagaatcatcgcctgcaagagaaagaaccccaccagctgcagcagaagattctaccagctgaccaagctgctggacagcgtgcagcccatcgccagagagctgcaccagttcaccttcgacctgctgatcaagagccacatggtgagcgtggacttccccgagatgatggccgagatcatcagcgtgcaggtgcccaagatcctgagcggcaaggtgaagcccatctacttccacacccagtag

SEQ ID NO: 354 - DNA, 10065 bp, Artificial Sequence
  derived and/or modified sequence
gcggagagaaccctctgttttcccccactctctctccacctcctcctgccttccccaccccgagtgcggagccagagatcaaaagatgaaaaggcagtcaggtcttcagtagccaaaaaacaaaacaaacaaaaacaaaaaagccgaaataaaagaaaaagataataactcagttcttatttgcacctacttcagtggacactgaatttggaaggtggaggattttgtttttttcttttaagatctgggcatcttttgaatctacccttcaagtattaagagacagactgtgagcctagcagggcagatcttgtccaccgtgtgtcttcttctgcacgagactttgaggctgtcagagcgctttttgcgtggttgctcccgcaagtttccttctctggagcttcccgcaggtgggcagctagctgcagcgactaccgcatcatcacagcctgttgaactcttctgagcaagagaaggggaggcggggtaagggaagtaggtggaagattcagccaagctcaaggatggaagtgcagttagggctgggaagggtctaccctcggccgccgtccaagacctaccgaggagctttccagaatctgttccagagcgtgcgcgaagtgatccagaacccgggccccaggcacccagaggccgcgagcgcagcacctcccggcgccagtttgctgctgctgcagcagcagcagcagcagcagcagcagcagcagcagcagcagcagcagcagcagcagcagcagcagcaagagactagccccaggcagcagcagcagcagcagggtgaggatggttctccccaagcccatcgtagaggccccacaggctacctggtcctggatgaggaacagcaaccttcacagccgcagtcggccctggagtgccaccccgagagaggttgcgtcccagagcctggagccgccgtggccgccagcaaggggctgccgcagcagctgccagcacctccggacgaggatgactcagctgccccatccacgttgtccctgctgggccccactttccccggcttaagcagctgctccgctgaccttaaagacatcctgagcgaggccagcaccatgcaactccttcagcaacagcagcaggaagcagtatccgaaggcagcagcagcgggagagcgagggaggcctcgggggctcccacttcctccaaggacaattacttagggggcacttcgaccatttctgacaacgccaaggagttgtgtaaggcagtgtcggtgtccatgggcctgggtgtggaggcgttggagcatctgagtccaggggaacagcttcggggggattgcatgtacgccccacttttgggagttccacccgctgtgcgtcccactccttgtgccccattggccgaatgcaaaggttctctgctagacgacagcgcaggcaagagcactgaagatactgctgagtattcccctttcaagggaggttacaccaaagggctagaaggcgagagcctaggctgctctggcagcgctgcagcagggagctccgggacacttgaactgccgtctaccctgtctctctacaagtccggagcactggacgaggcagctgcgtaccagagtcgcgactactacaactttccactggctctggccggaccgccgccccctccgccgcctccccatccccacgctcgcatcaagctggagaacccgctggactacggcagcgcctgggcggctgcggcggcgcagtgccgctatggggacctggcgagcctgcatggcgcgggtgcagcgggacccggttctgggtcaccctcagccgccgcttcctcatcctggcacactctcttcacagccgaagaaggccagttgtatggaccgtgtggtggtggtgggggtggtggcggcggcggcggcggcggcggcggcggcggcggcggcggcggcggcggcgaggcgggagctgtagccccctacggctacactcggccccctcaggggctggcgggccaggaaagcgacttcaccgcacctgatgtgtggtaccctggcggcatggtgagcagagtgccctatcccagtcccacttgtgtcaaaagcgaaatgggcccctggatggatagctactccggaccttacggggacatgcgtttggagactgccagggaccatgttttgcccattgactattactttccaccccagaagacctgcctgatctgtggagatgaagcttctgggtgtcactatggagctctcacatgtggaagctgcaaggtcttcttcaaaagagccgctgaagggaaacagaagtacctgtgcgccagcagaaatgattgcactattgataaattccgaaggaaaaattgtccatcttgtcgtcttcggaaatgttatgaagcagggatgactctgggagcccggaagctgaagaaacttggtaatctgaaactacaggaggaaggagaggcttccagcaccaccagccccactgaggagacaacccagaagctgacagtgtcacacattgaaggctatgaatgtcagcccatctttctgaatgtcctggaagccattgagccaggtgtagtgtgtgctggacacgacaacaaccagcccgactcctttgcagccttgctctctagcctcaatgaactgggagagagacagcttgtacacgtggtcaagtgggccaaggccttgcctggcttccgcaacttacacgtggacgaccagatggctgtcattcagtactcctggatggggctcatggtgtttgccatgggctggcgatccttcaccaatgtcaactccaggatgctctacttcgcccctgatctggttttcaatgagtaccgcatgcacaagtcccggatgtacagccagtgtgtccgaatgaggcacctctctcaagagtttggatggctccaaatcaccccccaggaattcctgtgcatgaaagcactgctactcttcagcattattccagtggatgggctgaaaaatcaaaaattctttgatgaacttcgaatgaactacatcaaggaactcgatcgtatcattgcatgcaaaagaaaaaatcccacatcctgctcaagacgcttctaccagctcaccaagctcctggactccgtgcagcctattgcgagagagctgcatcagttcacttttgacctgctaatcaagtcacacatggtgagcgtggactttccggaaatgatggcagagatcatctctgtgcaagtgcccaagatcctttctgggaaagtcaagcccatctatttccacacccagtgaagcattggaaaccctatttccccaccccagctcatgccccctttcagatgtcttctgcctgttataactctgcactactcctctgcagtgccttggggaatttcctctattgatgtacagtctgtcatgaacatgttcctgaattctatttgctgggctttttttttctctttctctcctttctttttcttcttccctccctatctaaccctcccatggcaccttcagactttgcttcccattgtggctcctatctgtgttttgaatggtgttgtatgcctttaaatctgtgatgatcctcatatggcccagtgtcaagttgtgcttgtttacagcactactctgtgccagccacacaaacgtttacttatcttatgccacgggaagtttagagagctaagattatctggggaaatcaaaacaaaaacaagcaaacaaaaaaaaaaagcaaaaacaaaacaaaaaataagccaaaaaaccttgctagtgttttttcctcaaaaataaataaataaataaataaatacgtacatacatacacacatacatacaaacatatagaaatccccaaagaggccaatagtgacgagaaggtgaaaattgcaggcccatggggagttactgattttttcatctcctccctccacgggagactttattttctgccaatggctattgccattagagggcagagtgaccccagagctgagttgggcaggggggtggacagagaggagaggacaaggagggcaatggagcatcagtacctgcccacagccttggtccctgggggctagactgctcaactgtggagcaattcattatactgaaaatgtgcttgttgttgaaaatttgtctgcatgttaatgcctcacccccaaacccttttctctctcactctctgcctccaacttcagattgactttcaatagtttttctaagacctttgaactgaatgttctcttcagccaaaacttggcgacttccacagaaaagtctgaccactgagaagaaggagagcagagatttaaccctttgtaaggccccatttggatccaggtctgctttctcatgtgtgagtcagggaggagctggagccagaggagaagaaaatgatagcttggctgttctcctgcttaggacactgactgaatagttaaactctcactgccactaccttttccccacctttaaaagacctgaatgaagttttctgccaaactccgtgaagccacaagcaccttatgtcctcccttcagtgttttgtgggcctgaatttcatcacactgcatttcagccatggtcatcaagcctgtttgcttcttttgggcatgttcacagattctctgttaagagcccccaccaccaagaaggttagcaggccaacagctctgacatctatctgtagatgccagtagtcacaaagatttcttaccaactctcagatcgctggagcccttagacaaactggaaagaaggcatcaaagggatcaggcaagctgggcgtcttgcccttgtcccccagagatgataccctcccagcaagtggagaagttctcacttccttctttagagcagctaaaggggctacccagatcagggttgaagagaaaactcaattaccagggtgggaagaatgaaggcactagaaccagaaaccctgcaaatgctcttcttgtcacccagcatatccacctgcagaagtcatgagaagagagaaggaacaaagaggagactctgactactgaattaaaatcttcagcggcaaagcctaaagccagatggacaccatctggtgagtttactcatcatcctcctctgctgctgattctgggctctgacattgcccatactcactcagattccccacctttgttgctgcctcttagtcagagggaggccaaaccattgagactttctacagaaccatggcttctttcggaaaggtctggttggtgtggctccaatactttgccacccatgaactcagggtgtgccctgggacactggttttatatagtcttttggcacacctgtgttctgttgacttcgttcttcaagcccaagtgcaagggaaaatgtccacctactttctcatcttggcctctgcctccttacttagctcttaatctcatctgttgaactcaagaaatcaagggccagtcatcaagctgcccattttaattgattcactctgtttgttgagaggatagtttctgagtgacatgatatgatccacaagggtttccttccctgatttctgcattgatattaatagccaaacgaacttcaaaacagctttaaataacaagggagaggggaacctaagatgagtaatatgccaatccaagactgctggagaaaactaaagctgacaggttccctttttggggtgggatagacatgttctggttttctttattattacacaatctggctcatgtacaggatcacttttagctgttttaaacagaaaaaaatatccaccactcttttcagttacactaggttacattttaataggtcctttacatctgttttggaatgattttcatcttttgtgatacacagattgaattatatcattttcatatctctccttgtaaatactagaagctctcctttacatttctctatcaaatttttcatctttatgggtttcccaattgtgactcttgtcttcatgaatatatgtttttcatttgcaaaagccaaaaatcagtgaaacagcagtgtaattaaaagcaacaactggattactccaaatttccaaatgacaaaactagggaaaaatagcctacacaagcctttaggcctactctttctgtgcttgggtttgagtgaacaaaggagattttagcttggctctgttctcccatggatgaaaggaggaggattttttttttcttttggccattgatgttctagccaatgtaattgacagaagtctcattttgcatgcgctctgctctacaaacagagttggtatggttggtatactgtactcacctgtgagggactggccactcagacccacttagctggtgagctagaagatgaggatcactcactggaaaagtcacaaggaccatctccaaacaagttggcagtgctcgatgtggacgaagagtgaggaagagaaaaagaaggagcaccagggagaaggctccgtctgtgctgggcagcagacagctgccaggatcacgaactctgtagtcaaagaaaagagtcgtgtggcagtttcagctctcgttcattgggcagctcgcctaggcccagcctctgagctgacatgggagttgttggattctttgtttcatagctttttctatgccataggcaatattgttgttcttggaaagtttattatttttttaactcccttactctgagaaagggatattttgaaggactgtcatatatctttgaaaaaagaaaatctgtaatacatatatttttatgtatgttcactggcactaaaaaatatagagagcttcattctgtcctttgggtagttgctgaggtaattgtccaggttgaaaaataatgtgctgatgctagagtccctctctgtccatactctacttctaaatacatataggcatacatagcaagttttatttgacttgtactttaagagaaaatatgtccaccatccacatgatgcacaaatgagctaacattgagcttcaagtagcttctaagtgtttgtttcattaggcacagcacagatgtggcctttccccccttctctcccttgatatctggcagggcataaaggcccaggccacttcctctgccccttcccagccctgcaccaaagctgcatttcaggagactctctccagacagcccagtaactacccgagcatggcccctgcatagccctggaaaaataagaggctgactgtctacgaattatcttgtgccagttgcccaggtgagagggcactgggccaagggagtggttttcatgtttgacccactacaaggggtcatgggaatcaggaatgccaaagcaccagatcaaatccaaaacttaaagtcaaaataagccattcagcatgttcagtttcttggaaaaggaagtttctacccctgatgcctttgtaggcagatctgttctcaccattaatctttttgaaaatcttttaaagcagtttttaaaaagagagatgaaagcatcacattatataaccaaagattacattgtacctgctaagataccaaaattcataagggcagggggggagcaagcattagtgcctctttgataagctgtccaaagacagactaaaggactctgctggtgactgacttataagagctttgtgggtttttttttccctaataatatacatgtttagaagaattgaaaataatttcgggaaaatgggattatgggtccttcactaagtgattttataagcagaactggctttccttttctctagtagttgctgagcaaattgttgaagctccatcattgcatggttggaaatggagctgttcttagccactgtgtttgctagtgcccatgttagcttatctgaagatgtgaaacccttgctgataagggagcatttaaagtactagattttgcactagagggacagcaggcagaaatccttatttctgcccactttggatggcacaaaaagttatctgcagttgaaggcagaaagttgaaatacattgtaaatgaatatttgtatccatgtttcaaaattgaaatatatatatatatatatatatatatatatatatatatatagtgtgtgtgtgtgttctgatagctttaactttctctgcatctttatatttggttccagatcacacctgatgccatgtacttgtgagagaggatgcagttttgttttggaagctctctcagaacaaacaagacacctggattgatcagttaactaaaagttttctcccctattgggtttgacccacaggtcctgtgaaggagcagagggataaaaagagtagaggacatgatacattgtactttactagttcaagacagatgaatgtggaaagcataaaaactcaatggaactgactgagatttaccacagggaaggcccaaacttggggccaaaagcctacccaagtgattgaccagtggccccctaatgggacctgagctgttggaagaagagaactgttccttggtcttcaccatccttgtgagagaagggcagtttcctgcattggaacctggagcaagcgctctatctttcacacaaattccctcacctgagattgaggtgctcttgttactgggtgtctgtgtgctgtaattctggttttggatatgttctgtaaagattttgacaaatgaaaatgtgtttttctctgttaaaacttgtcagagtactagaagttgtatctctgtaggtgcaggtccatttctgcccacaggtagggtgtttttctttgattaagagattgacacttctgttgcctaggacctcccaactcaaccatttctaggtgaaggcagaaaaatccacattagttactcctcttcagacatttcagctgagataacaaatcttttggaattttttcacccatagaaagagtggtagatatttgaatttagcaggtggagtttcatagtaaaaacagcttttgactcagctttgatttatcctcatttgatttggccagaaagtaggtaatatgcattgattggcttctgattccaattcagtatagcaaggtgctaggttttttcctttccccacctgtctcttagcctggggaattaaatgagaagccttagaatgggtggcccttgtgacctgaaacacttcccacataagctacttaacaagattgtcatggagctgcagattccattgcccaccaaagactagaacacacacatatccatacaccaaaggaaagacaattctgaaatgctgtttctctggtggttccctctctggctgctgcctcacagtatgggaacctgtactctgcagaggtgacaggccagatttgcattatctcacaaccttagcccttggtgctaactgtcctacagtgaagtgcctggggggttgtcctatcccataagccacttggatgctgacagcagccaccatcagaatgacccacgcaaaaaaaagaaaaaaaaaattaaaaagtcccctcacaacccagtgacacctttctgctttcctctagactggaacattgattagggagtgcctcagacatgacattcttgtgctgtccttggaattaatctggcagcaggagggagcagactatgtaaacagagataaaaattaattttcaatattgaaggaaaaaagaaataagaagagagagagaaagaaagcatcacacaaagattttcttaaaagaaacaattttgcttgaaatctctttagatggggctcatttctcacggtggcacttggcctccactgggcagcaggaccagctccaagcgctagtgttctgttctctttttgtaatcttggaatcttttgttgctctaaatacaattaaaaatggcagaaacttgtttgttggactacatgtgtgactttgggtctgtctctgcctctgctttcagaaatgtcatccattgtgtaaaatattggcttactggtctgccagctaaaacttggccacatcccctgttatggctgcaggatcgagttattgttaacaaagagacccaagaaaagctgctaatgtcctcttatcattgttgttaatttgttaaaacataaagaaatctaaaatttca

SEQ ID NO: 355 - DNA, 2427 bp, Artificial Sequence
  derived and/or modified sequence
aggatggaagtgcagttagggctgggaagggtctaccctcggccgccgtccaagacctaccgaggagctttccagaatctgttccagagcgtgcgcgaagtgatccagaacccgggccccaggcacccagaggccgcgagcgcagcacctcccggcgccagtttgctgctgctgcagcagcagcagcagcagcagcagcagcagcagcagcagcagcagcagcagcagcagcagcagcagcaagagactagccccaggcagcagcagcagcagcagggtgaggatggttctccccaagcccatcgtagaggccccacaggctacctggtcctggatgaggaacagcaaccttcacagccgcagtcggccctggagtgccaccccgagagaggttgcgtcccagagcctggagccgccgtggccgccagcaaggggctgccgcagcagctgccagcacctccggacgaggatgactcagctgccccatccacgttgtccctgctgggccccactttccccggcttaagcagctgctccgctgaccttaaagacatcctgagcgaggccagcaccatgcaactccttcagcaacagcagcaggaagcagtatccgaaggcagcagcagcgggagagcgagggaggcctcgggggctcccacttcctccaaggacaattacttagggggcacttcgaccatttctgacaacgccaaggagttgtgtaaggcagtgtcggtgtccatgggcctgggtgtggaggcgttggagcatctgagtccaggggaacagcttcggggggattgcatgtacgccccacttttgggagttccacccgctgtgcgtcccactccttgtgccccattggccgaatgcaaaggttctctgctagacgacagcgcaggcaagagcactgaagatactgctgagtattcccctttcaagggaggttacaccaaagggctagaaggcgagagcctaggctgctctggcagcgctgcagcagggagctccgggacacttgaactgccgtctaccctgtctctctacaagtccggagcactggacgaggcagctgcgtaccagagtcgcgactactacaactttccactggctctggccggaccgccgccccctccgccgcctccccatccccacgctcgcatcaagctggagaacccgctggactacggcagcgcctgggcggctgcggcggcgcagtgccgctatggggacctggcgagcctgcatggcgcgggtgcagcgggacccggttctgggtcaccctcagccgccgcttcctcatcctggcacactctcttcacagccgaagaaggccagttgtatggaccgtgtggtggtggtgggggtggtggcggcggcggcggcggcggcggcggcggcggcggcggcggcggcggcggcgaggcgggagctgtagccccctacggctacactcggccccctcaggggctggcgggccaggaaagcgacttcaccgcacctgatgtgtggtaccctggcggcatggtgagcagagtgccctatcccagtcccacttgtgtcaaaagcgaaatgggcccctggatggatagctactccggaccttacggggacatgcgtttggagactgccagggaccatgttttgcccattgactattactttccaccccagaagacctgcctgatctgtggagatgaagcttctgggtgtcactatggagctctcacatgtggaagctgcaaggtcttcttcaaaagagccgctgaagggaaacagaagtacctgtgcgccagcagaaatgattgcactattgataaattccgaaggaaaaattgtccatcttgtcgtcttcggaaatgttatgaagcagggatgactctgggagcccggaagctgaagaaacttggtaatctgaaactacaggaggaaggagaggcttccagcaccaccagccccactgaggagacaacccagaagctgacagtgtcacacattgaaggctatgaatgtcagcccatctttctgaatgtcctggaagccattgagccaggtgtagtgtgtgctggacacgacaacaaccagcccgactcctttgcagccttgctctctagcctcaatgaactgggagagagacagcttgtacacgtggtcaagtgggccaaggccttgcctgattgcgagagagctgcatcagttcacttttgacctgctaatcaagtcacacatggtgagcgtggactttccggaaatgatggcagagatcatctctgtgcaagtgcccaagatcctttctgggaaagtcaagcccatctatttccacacccagtgaagcattggaaaccctatttccccaccccagctcatgccccctttcagatgtcttctgcctgttataactctgcactactcctctgcagtgccttg

SEQ ID NO: 356 - DNA, 1596 bp, Artificial Sequence
  derived and/or modified sequence
atggaagtgcagttagggctgggaagggtctaccctcggccgccgtccaagacctaccgaggagctttccagaatctgttccagagcgtgcgcgaagtgatccagaacccgggccccaggcacccagaggccgcgagcgcagcacctcccggcgccagtttgctgctgctgcagcagcagcagcagcagcagcagcagcagcagcagcagcagcaagagactagccccaggcagcagcagcagcagcagggtgaggatggttctccccaagcccatcgtagaggccccacaggctacctggtcctggatgaggaacagcaaccttcacagccgcagtcggccctggagtgccaccccgagagaggttgcgtcccagagcctggagccgccgtggccgccagcaaggggctgccgcagcagctgccagcacctccggacgaggatgactcagctgccccatccacgttgtccctgctgggccccactttccccggcttaagcagctgctccgctgaccttaaagacatcctgagcgaggccagcaccatgcaactccttcagcaacagcagcaggaagcagtatccgaaggcagcagcagcgggagagcgagggaggcctcgggggctcccacttcctccaaggacaattacttagggggcacttcgaccatttctgacaacgccaaggagttgtgtaaggcagtgtcggtgtccatgggcctgggtgtggaggcgttggagcatctgagtccaggggaacagcttcggggggattgcatgtacgccccacttttgggagttccacccgctgtgcgtcccactccttgtgccccattggccgaatgcaaaggttctctgctagacgacagcgcaggcaagagcactgaagatactgctgagtattcccctttcaagggaggttacaccaaagggctagaaggcgagagcctaggctgctctggcagcgctgcagcagggagctccgggacacttgaactgccgtctaccctgtctctctacaagtccggagcactggacgaggcagctgcgtaccagagtcgcgactactacaactttccactggctctggccggaccgccgccccctccgccgcctccccatccccacgctcgcatcaagctggagaacccgctggactacggcagcgcctgggcggctgcggcggcgcagtgccgctatggggacctggcgagcctgcatggcgcgggtgcagcgggacccggttctgggtcaccctcagccgccgcttcctcatcctggcacactctcttcacagccgaagaaggccagttgtatggaccgtgtggtggtggtgggggtggtggcggcggcggcggcggcggcggcggcggcggcggcggcggcggcggcggcgaggcgggagctgtagccccctacggctacactcggccccctcaggggctggcgggccaggaaagcgacttcaccgcacctgatgtgtggtaccctggcggcatggtgagcagagtgccctatcccagtcccacttgtgtcaaaagcgaaatgggcccctggatggatagctactccggaccttacggggacatgcggtaa

SEQ ID NO: 357 - DNA, 4338 bp, Artificial Sequence
  derived and/or modified sequence
cgagatcccggggagccagcttgctgggagagcgggacggtccggagcaagcccagaggcagaggaggcgacagagggaaaaagggccgagctagccgctccagtgctgtacaggagccgaagggacgcaccacgccagccccagcccggctccagcgacagccaacgcctcttgcagcgcggcggcttcgaagccgccgcccggagctgccctttcctcttcggtgaagtttttaaaagctgctaaagactcggaggaagcaaggaaagtgcctggtaggactgacggctgcctttgtcctcctcctctccaccccgcctccccccaccctgccttccccccctcccccgtcttctctcccgcagctgcctcagtcggctactctcagccaacccccctcaccacccttctccccacccgcccccccgcccccgtcggcccagcgctgccagcccgagtttgcagagaggtaactccctttggctgcgagcgggcgagctagctgcacattgcaaagaaggctcttaggagccaggcgactggggagcggcttcagcactgcagccacgacccgcctggttaggctgcacgcggagagaaccctctgttttcccccactctctctccacctcctcctgccttccccaccccgagtgcggagccagagatcaaaagatgaaaaggcagtcaggtcttcagtagccaaaaaacaaaacaaacaaaaacaaaaaagccgaaataaaagaaaaagataataactcagttcttatttgcacctacttcagtggacactgaatttggaaggtggaggattttgtttttttcttttaagatctgggcatcttttgaatctacccttcaagtattaagagacagactgtgagcctagcagggcagatcttgtccaccgtgtgtcttcttctgcacgagactttgaggctgtcagagcgctttttgcgtggttgctcccgcaagtttccttctctggagcttcccgcaggtgggcagctagctgcagcgactaccgcatcatcacagcctgttgaactcttctgagcaagagaaggggaggcggggtaagggaagtaggtggaagattcagccaagctcaaggatggaagtgcagttagggctgggaagggtctaccctcggccgccgtccaagacctaccgaggagctttccagaatctgttccagagcgtgcgcgaagtgatccagaacccgggccccaggcacccagaggccgcgagcgcagcacctcccggcgccagtttgctgctgctgcagcagcagcagcagcagcagcagcagcagcagcagcagcagcagcagcagcagcagcagcagcagcaagagactagccccaggcagcagcagcagcagcagggtgaggatggttctccccaagcccatcgtagaggccccacaggctacctggtcctggatgaggaacagcaaccttcacagccgcagtcggccctggagtgccaccccgagagaggttgcgtcccagagcctggagccgccgtggccgccagcaaggggctgccgcagcagctgccagcacctccggacgaggatgactcagctgccccatccacgttgtccctgctgggccccactttccccggcttaagcagctgctccgctgaccttaaagacatcctgagcgaggccagcaccatgcaactccttcagcaacagcagcaggaagcagtatccgaaggcagcagcagcgggagagcgagggaggcctcgggggctcccacttcctccaaggacaattacttagggggcacttcgaccatttctgacaacgccaaggagttgtgtaaggcagtgtcggtgtccatgggcctgggtgtggaggcgttggagcatctgagtccaggggaacagcttcggggggattgcatgtacgccccacttttgggagttccacccgctgtgcgtcccactccttgtgccccattggccgaatgcaaaggttctctgctagacgacagcgcaggcaagagcactgaagatactgctgagtattcccctttcaagggaggttacaccaaagggctagaaggcgagagcctaggctgctctggcagcgctgcagcagggagctccgggacacttgaactgccgtctaccctgtctctctacaagtccggagcactggacgaggcagctgcgtaccagagtcgcgactactacaactttccactggctctggccggaccgccgccccctccgccgcctccccatccccacgctcgcatcaagctggagaacccgctggactacggcagcgcctgggcggctgcggcggcgcagtgccgctatggggacctggcgagcctgcatggcgcgggtgcagcgggacccggttctgggtcaccctcagccgccgcttcctcatcctggcacactctcttcacagccgaagaaggccagttgtatggaccgtgtggtggtggtgggggtggtggcggcggcggcggcggcggcggcggcggcggcggcggcggcggcggcggcgaggcgggagctgtagccccctacggctacactcggccccctcaggggctggcgggccaggaaagcgacttcaccgcacctgatgtgtggtaccctggcggcatggtgagcagagtgccctatcccagtcccacttgtgtcaaaagcgaaatgggcccctggatggatagctactccggaccttacggggacatgcgtttggagactgccagggaccatgttttgcccattgactattactttccaccccagaagacctgcctgatctgtggagatgaagcttctgggtgtcactatggagctctcacatgtggaagctgcaaggtcttcttcaaaagagccgctgaagggaaacagaagtacctgtgcgccagcagaaatgattgcactattgataaattccgaaggaaaaattgtccatcttgtcgtcttcggaaatgttatgaagcagggatgactctgggagcccggaagctgaagaaacttggtaatctgaaactacaggaggaaggagaggcttccagcaccaccagccccactgaggagacaacccagaagctgacagtgtcacacattgaaggctatgaatgtcagcccatctttctgaatgtcctggaagccattgagccaggtgtagtgtgtgctggacacgacaacaaccagcccgactcctttgcagccttgctctctagcctcaatgaactgggagagagacagcttgtacacgtggtcaagtgggccaaggccttgcctggcttccgcaacttacacgtggacgaccagatggctgtcattcagtactcctggatggggctcatggtgtttgccatgggctggcgatccttcaccaatgtcaactccaggatgctctacttcgcccctgatctggttttcaatgagtaccgcatgcacaagtcccggatgtacagccagtgtgtccgaatgaggcacctctctcaagagtttggatggctccaaatcaccccccaggaattcctgtgcatgaaagcactgctactcttcagcattacattctgtcttcatcccacatcagttccagtggatgggctgaaaaatcaaaaattctttgatgaacttcgaatgaactacatcaaggaactcgatcgtatcattgcatgcaaaagaaaaaatcccacatcctgctcaagacgcttctaccagctcaccaagctcctggactccgtgcagcctattgcgagagagctgcatcagttcacttttgacctgctaatcaagtcacacatggtgagcgtggactttccggaaatgatggcagagatcatctctgtgcaagtgcccaagatcctttctgggaaagtcaagcccatctatttccacacccagtgaagcattggaaaccctatttccccaccccagctcatgccccctttcagatgtcttctgcctgttataactctgcactactcctctgcagtgccttggggaatttcctctattgatgtacagtctgtcatgaacatgttcctgaattctatttgctgggctttttttttctctttctctcctttctttttcttcttccctccctatctaaccctcccatggcaccttcagactttgcttcccattgtggctcctatctgtgttttgaatggtgttgtatgcctttaaatctgtgatgatcctcatatggcccagtgtcaagttgtgcttgtttacagcactactctgtgccagccacacaaacgtttacttatcttatgccacgggaagtttagagagctaagattatctggggaaatcaaaacaaaaacaagcaaac

SEQ ID NO: 358 - DNA, 2763 bp, Artificial Sequence
  derived and/or modified sequence
atggaggttcagctcggactgggccgggtctacccacggcccccgagtaaaacctatcgcggcgcttttcagaatttattccaatccgtgagagaggttatccagaacccgggcccaaggcatcctgaagcagcgtccgctgcaccacctggcgctagtctattattactgcagcagcagcagcagcagcaacagcagcagcagcaacagcaacagcagcaacagcagcagcaacagcaggagacttctccccgacaacagcagcagcaacagggcgaggatggatcacctcaggctcatcggagagggccaaccggttacctggttctcgacgaagagcagcaaccctctcagcctcagtcggcacttgaatgccaccccgaacggggatgtgtgcctgaacccggcgccgccgtcgctgcatcaaaggggttaccccagcagctccccgcaccccctgatgaagatgatagtgccgcgcccagcaccctgagtttgctaggacccacttttccaggcctgtcctcgtgtagcgcagacctgaaggatatcctcagcgaagctagcacaatgcagctgctacagcagcagcagcaggaggcagtgtccgaaggcagtagctctggaagagctagagaggcgagcggagcccccacctcttcaaaagacaactacctcggcggtacctctaccattagcgacaatgccaaggagttgtgtaaagcagtgtctgtgtctatgggccttggcgtggaagcactggaacatttgtcaccaggtgaacagcttcgcggggattgcatgtacgcaccattgcttggcgtgccccctgccgtccggcccacaccatgcgctccattggcagagtgcaaggggagtctcctcgatgactccgctggcaagtctaccgaggatactgctgagtactcaccgttcaagggtggttatactaagggactcgaaggtgaatccctcgggtgcagcggatccgcagccgcaggatccagtggcacactggaactgccctcaacgctgtctttgtataagagcggggcgttggatgaggcagctgcataccagagccgcgattactataactttccactcgccctggcaggccccccaccgcccccgcctccgccccacccgcacgcccgcattaagctcgagaacccactggactacggctcggcctgggccgcggcagccgcgcagtgccgctatggcgacctggcatctcttcatggcgccggagccgccggtcctggctccggctctcctagtgccgccgcttccagctcctggcataccctgttcactgctgaagagggccagctgtatggaccatgcggcggcggcggagggggtgggggcggaggaggcggcggggggggaggcggaggtgggggagggggcggtgaggccggtgctgtcgccccctacggatataccagacctccccaaggacttgccggacaagaatccgatttcaccgcccccgacgtttggtacccaggaggcatggtgtcacgagtcccgtatccatctcccacctgtgtgaagtcagaaatgggcccatggatggactcctactcgggcccctatggagacatgaggctggaaacggcccgtgaccacgtgctgccgatagattactatttccccccacagaaaacttgcttaatctgtggagatgaagcctcaggctgccactacggagccctcacttgtggctcctgtaaggtcttctttaaaagagctgcagagggcaaacaaaaatatctgtgtgcaagccgaaacgactgcactatagataagttccgccgcaagaactgcccctcttgtagattgcgtaagtgttacgaggccggcatgacattgggtgcccgcaaattgaagaaattaggcaaccttaaattgcaagaggagggcgaagcctcctcgacgacatcccccaccgaggagaccacacagaagctgacagtcagccacatagaggggtatgagtgccaaccgattttcctgaacgtcttggaggctattgagcccggggtggtgtgtgctgggcatgataataatcagcctgacagctttgccgccctgctctcctctctgaatgagctaggggagcgccagctggtgcatgttgtcaaatgggccaaagctcttccaggctttcggaatttgcacgtcgatgaccagatggccgtgatacaatactcctggatgggactcatggttttcgctatggggtggcggtcattcaccaatgtgaatagtcgtatgctttatttcgcgccagacctcgtttttaatgagtaccgcatgcacaagtctcggatgtattctcagtgcgtacggatgcggcacttgagccaggaattcggctggcttcagataacccctcaggagtttctgtgtatgaaagcgctgctgttgttcagtataatcccagttgacggcctgaaaaaccagaaattcttcgacgaactgagaatgaattacatcaaggaactggatcgcatcatagcttgtaagcgcaagaatccaacatcatgctcccgccgtttctaccagctgaccaagctactagatagtgtgcagccgattgcacgcgagctccaccaattcacattcgaccttctgatcaagtctcacatggtgtctgtggattttccagaaatgatggccgaaataatctcagttcaagtgccaaaaattctgagtggcaaagtgaaaccgatctatttccacacgcagtag

SEQ ID NO: 359 - DNA, 2205 bp, Artificial Sequence
  derived and/or modified sequence
atggaggtgcagttggggttgggccgcgtgtaccccagacctccctctaagacttaccggggggccttccagaacctgtttcagtctgtgcgggaggtgatacaaaaccctggcccgagacatccagaggccgcctccgcggccccacccggggcaagcctgctgctgctgcagcagcagcagcagcagcagcagcagcagcaacaacagcagcagcagcagcagcagcagcagcaacaggagaccagccctagacaacagcagcaacagcaaggggaggacgggtcaccccaagctcaccgtcgcgggcctacgggatacctggttctcgatgaggagcaacaaccatcgcagccacaatctgcccttgaatgtcatccagaacgaggttgcgtgcccgaacctggggccgcagtcgccgcctccaaaggcttgccacagcaattaccagctccaccagacgaagacgacagcgcagccccttccaccctgagcctgctgggtcccactttccctggcttgagctcctgcagtgccgatttgaaggatattctgtctgaagctagcactatgcagctgctgcagcagcagcagcaggaagccgtctcggaaggctcgtcaagtgggagagccagggaggcatccggcgcccccaccagctccaaggacaactatttgggcggaacctcaactatttccgataacgcaaaagaactgtgcaaagcagtatcagttagcatgggcctgggcgttgaagccctcgagcacctttctcctggggaacagttgcgtggagattgcatgtacgctcctttgctaggagtacctcctgccgtgcgtccaaccccttgcgccccactagccgagtgtaagggctcactactggatgacagtgccgggaagagcaccgaggatactgcggagtactctcccttcaagggaggttacaccaaggggcttgaaggtgaaagccttggctgtagcggctctgccgcggccggcagctccggtacacttgagctgcccagcactctcagcctgtacaagagtggcgctctggatgaggccgccgcctaccagtcacgggattattataattttcccttggccctagctggcccgccaccacctccaccaccaccccacccacacgccaggatcaaactggagaacccattggactatggtagcgcatgggctgcagccgccgcacagtgcaggtacggggacctcgcaagcctgcacggcgcaggcgccgctgggccaggatcaggtagcccttcagcagccgcctcttcaagctggcacaccctgtttacggcggaagaaggtcagctctacggcccttgcggcgggggtggaggtgggggaggaggcggtggcggtggaggcgggggtggcggtggaggcggcgggggagaggccggggccgtggctccatatggatataccagacccccacagggcttggcgggccaggaatcagatttcacagcaccagatgtgtggtacccaggagggatggtgtcaagggtcccatacccatcaccaacctgcgtgaagtctgaaatggggccatggatggattcctattctgggccctacggcgatatgagattggagacagcgagggatcacgtgctgccaattgattattacttcccgccacagaagacatgcctgatttgtggggatgaagccagcgggtgccattatggagctctcacctgcgggtcatgtaaagtttttttcaagagagcagctgagggaaagcaaaagtacttatgcgcaagtcggaacgactgtaccatcgataaatttagacggaagaattgcccctcctgtcggctgcgaaagtgctacgaggcggggatgacactcggagcaaggaagcttaaaaagctggggaatttgaaacttcaagaagagggtgaggcttcctctacaactagccctactgaagaaactactcaaaagctgaccgtgagccacatcgaggggtacgaatgccaacctatatttttaaatgtgctggaagccatagagcccggagtggtttgtgcgggccacgataacaaccagccagactcttttgccgccctgctgtcaagccttaatgagctgggagagagacagctggtgcatgtggtcaaatgggcaaaagctctccctgattgtgaacgtgctgcctcagtgcacttttag

SEQ ID NO: 360 - DNA, 1596 bp, Artificial Sequence
  derived and/or modified sequence
atggaagtccagctcggattggggagggtgtaccccagacctccttccaagacatatcgaggcgcctttcagaatttattccagagcgtgagagaggtgatacagaatccgggcccaaggcatcccgaagccgcttcagccgcacctcccggtgcgtcactactgcttctccaacaacagcagcaacagcagcagcagcaacaacagcaacagcaggagacttcaccccgccagcagcagcagcagcagggcgaggatggatctccacaggcacatcgacgcggacccactggatatcttgtcctcgatgaagaacagcaaccgagccagccacaatcagctcttgagtgtcacccagagcgcggctgcgtgcccgagcctggggctgccgtggcggctagcaagggattaccacagcagctgccagctccacctgatgaggacgatagtgcagccccaagcactctgtctctgctcggacccacttttcctggcctgagctcgtgctctgctgatctgaaggacatactaagtgaagcctctaccatgcaacttctgcagcagcaacaacaggaggcggtctcggaaggatcctcttccgggcgggctcgcgaagcctctggtgcacctacgagttcgaaggataactatctaggcgggacctctaccatctcagataatgccaaagaactttgcaaagccgtgtccgtgagtatgggcttaggcgtggaggctcttgaacacctatctcccggcgaacagctgagaggggactgcatgtacgcccccttgctgggagtacctcctgcggttcgccctacgccatgtgcccccctcgccgagtgtaaaggttccctgctggatgatagcgcaggtaagtcaacggaagatactgccgaatacagcccattcaagggcggctacaccaaaggcctcgagggggagagtttggggtgcagtggctccgcagcagccggatcatctggaaccctggaactgccgagtaccctgagcctgtataaaagcggcgcccttgacgaggccgcagcctaccagagtcgggattactacaacttcccactcgcactcgcagggcccccaccaccaccacctccaccccatccgcacgctcgtataaaacttgagaacccactggactatggcagcgcctgggcagccgccgcggctcagtgtagatacggcgatctagcttctctccatggggccggtgctgccggccctggatcagggagcccctcagccgccgcaagctctagttggcacaccctgtttacagcagaagaaggacagctgtatggcccgtgtgggggcggcggaggagggggaggcggcggaggcggaggcggaggaggaggcggcggaggtggtgggggagaggccggcgcagttgccccctatggatatacgaggccaccccagggcctagccggacaggaaagcgacttcacggctcccgatgtgtggtatcccgggggcatggtctcacgggtaccttacccttctccgacctgcgttaagagcgagatgggtccatggatggattcttactctggaccatatggggacatgcgttag

SEQ ID NO: 361 - DNA, 2217 bp, Artificial Sequence
  derived and/or modified sequence
atgcaattactgcagcagcagcagcaggaggccgtctccgaaggaagttcaagtggcagagccagggaggcaagcggcgcacctacctcaagcaaagacaactatctcggggggacatccaccatttcagataacgccaaggagctgtgtaaggccgtttctgtcagcatgggccttggagtggaagccttggagcacctgtcccccggcgagcagctccgaggtgattgcatgtacgcccctctgctgggtgtgcccccagccgtgcgccctacaccttgtgcaccgctggctgagtgtaagggaagtcttcttgatgattccgccggcaaatcaaccgaagatacggctgaatattcacccttcaaaggagggtacactaagggactggaaggtgagtcactggggtgctcgggatcagccgcagctggatcttcagggactctggaacttccttcaaccctctcattgtataaatccggcgcactcgatgaggcggcagcttatcagtcacgcgactattacaacttccccctggcacttgccggccctccgcctcctccgccacccccccaccctcatgctcgcataaaactagaaaatccactcgattatggcagtgcatgggctgccgccgcagcacagtgtcgctacggggacttggcgtcgcttcatggggcaggagctgccggaccgggtagtggttccccttctgccgcagcctcctccagctggcacaccctgttcacagccgaagaagggcagttgtacggcccttgcggcggaggtggaggcggaggcggaggaggtggtgggggtggaggcggtggagggggcggaggcggaggcgaagccggtgcagtcgccccctacgggtataccagaccgccccagggtctggcggggcaagagtctgattttacggcacccgacgtctggtaccccggcgggatggtgagtcgcgtaccctacccaagtcctacctgtgtcaaatcagagatgggcccctggatggactcatactctggcccatatggagatatgaggttggagacagccagggatcatgttcttccaatcgattattattttccaccacagaagacttgcctaatctgtggagacgaagccagcggatgccactacggcgcattgacttgtggctcttgcaaagtgttcttcaaacgggccgccgagggtaaacagaaatatctttgcgcttctaggaacgattgtactatcgacaagttcagacgcaaaaattgcccaagctgtagattacgcaagtgttacgaagccgggatgactctgggggcgcgaaaattgaagaagttgggtaacctgaaactgcaagaagagggcgaggcatccagtactactagccctacagaggagaccactcagaagttgaccgtgagccacatagaagggtatgagtgtcagccaattttcttaaatgttttggaagctatcgagccaggtgttgtctgtgccggtcatgataacaatcaaccagattcattcgccgcccttctgagctccctaaatgaactcggcgaacgacagctggtccacgtagttaaatgggcaaaggctctgcctggatttcggaacctgcatgtcgacgaccagatggcagtgattcagtatagctggatggggttgatggtgtttgcaatggggtggaggtctttcaccaacgtaaatagtaggatgctgtatttcgcaccagatctagtgtttaatgagtatcggatgcacaagagcaggatgtacagtcagtgtgtaagaatgcgacacctgtcacaggaatttggctggctgcagatcaccccacaggagttcctctgcatgaaggcgcttcttctgttttccatcactttttgcctgcacccaacttccgtgccggtagatggcctgaagaatcagaagttcttcgatgagctgaggatgaactatattaaggaacttgaccggatcatagcatgtaagcggaaaaatcctacaagctgcagcaggcgcttttaccagttgacaaaattgctggacagcgtgcagcccatcgctagggagttgcatcagtttactttcgatttgctcatcaaatctcatatggtgtccgtggatttcccggagatgatggcagagatcatctccgtgcaggtgcccaaaatcctcagcgggaaagtgaagcccatctactttcacactcagtag

SEQ ID NO: 362 - DNA, 2763 bp, Artificial Sequence
  derived and/or modified sequence
atggaggtgcagctgggcctgggccgggtgtacccccggccccccagcaagacctacagaggagccttccagaacctcttccagagcgtgcgggaggtgatccagaaccctggccccaggcaccctgaggccgccagcgctgcccctcctggggccagcctgctgctgctgcagcagcagcagcagcagcagcagcagcagcagcagcagcagcagcagcagcagcagcagcagcagcaggagaccagcccccggcagcagcagcagcagcagggagaagatggcagcccccaggcccacagaagaggccccaccggctacctggtgctggatgaggagcagcagcccagccagccccagagcgccctggagtgccaccctgagcggggctgtgtgcctgagcctggagctgctgtggccgccagcaagggcctgccccagcagctgcctgcccccccagatgaagatgacagcgctgcccccagcaccctgagcctgctgggccccaccttccctggcctgagcagctgcagcgctgacctgaaggacatcctgtctgaggccagcaccatgcagctgctgcagcagcagcagcaggaggccgtgtctgagggcagcagcagcggccgggcccgggaggccagcggggcccccaccagcagcaaggacaactacctgggcggcaccagcaccatcagtgacaatgccaaggagctgtgcaaggctgtgtctgtgtccatgggcctgggcgtggaggccctggagcacctgagccctggagagcagctgcggggggactgcatgtatgcccccctgctgggcgtgcccccagctgtgcggcccaccccctgtgcccccctggctgaatgtaaaggcagcctgctggatgacagcgctgggaagagcacagaggacacagctgagtacagccccttcaagggcggctacaccaagggcctggagggggagagcctgggctgcagcggcagcgctgctgctggcagcagcggcaccctggagctgcccagcaccctgagcctgtacaagagcggggccctggatgaggccgccgcctaccagagccgggactactacaacttccccctggccctggccggccccccacctcctcctcctccaccccacccccacgcccgcatcaagctggagaaccccctggactatggcagcgcctgggccgctgctgctgcccagtgccgctacggggacctggccagcctgcatggagctggagctgctggccctggcagcggcagccccagcgctgctgccagcagctcctggcacaccctcttcaccgctgaggagggccagctgtatggcccctgtggcggcggcggcggcggcggcggcggcggcggcggcggcggcggcggcggcggcggcggcggcggcggggaggccggggctgtggccccctacggctacacccggcccccccagggcctggccggccaggagagtgacttcaccgccccagatgtgtggtacccaggcggcatggtgtcccgggtgccctaccccagccccacctgtgtgaagtctgagatgggcccctggatggacagctacagcggcccctatggagacatgaggctggagacagcccgggaccacgtgctgcccatcgactactacttccccccccagaagacctgcctgatctgtggagatgaggccagcggctgccactacggggccctgacctgtggcagctgcaaggtgttcttcaagagagctgctgagggcaagcagaagtacctgtgtgccagcagaaatgactgcaccatcgacaagttccggaggaagaactgccccagctgccgcctgaggaaatgttatgaagctggcatgaccctgggcgccaggaagctgaagaagctgggcaacctgaagctgcaggaggagggggaggccagcagcaccaccagccccacagaggagaccacccagaagctgactgtgagccacatcgagggctatgagtgccagcccatcttcctgaatgtgctggaggccatcgagcccggggtggtgtgtgccggccatgacaacaaccagcctgacagctttgctgccctgctgagcagcctgaatgagctgggggagcggcagctggtgcacgtggtgaagtgggccaaggccctgcccggcttcaggaacctgcacgtggatgaccagatggccgtcatccagtacagctggatgggcctgatggtgtttgccatgggctggaggagcttcaccaacgtgaacagcaggatgctgtactttgccccagacctggtgttcaatgagtacaggatgcacaagagcaggatgtacagccagtgtgtgaggatgaggcacctgagccaggagtttggctggctgcagatcaccccccaggagttcctgtgcatgaaggccctgctgctcttcagcatcatccctgtggatggcctgaagaaccagaagttctttgatgagctgaggatgaactacatcaaggagctggaccgcatcatcgcctgcaagaggaagaaccccaccagctgcagccgccgcttctaccagctgaccaagctgctggacagcgtgcagcccatcgcccgggagctgcaccagttcacctttgacctgctgatcaagagccacatggtgtctgtggacttccctgagatgatggccgagatcatctctgtgcaggtgcccaagatcctgagcggcaaggtgaagcccatctacttccacacccagtag

SEQ ID NO: 363 - DNA, 2205 bp, Artificial Sequence
  derived and/or modified sequence
atggaggtgcagctgggcctgggccgggtgtacccccggccccccagcaagacctacagaggagccttccagaacctcttccagagcgtgcgggaggtgatccagaaccctggccccaggcaccctgaggccgccagcgctgcccctcctggggccagcctgctgctgctgcagcagcagcagcagcagcagcagcagcagcagcagcagcagcagcagcagcagcagcagcagcagcaggagaccagcccccggcagcagcagcagcagcagggagaagatggcagcccccaggcccacagaagaggccccaccggctacctggtgctggatgaggagcagcagcccagccagccccagagcgccctggagtgccaccctgagcggggctgtgtgcctgagcctggagctgctgtggccgccagcaagggcctgccccagcagctgcctgcccccccagatgaagatgacagcgctgcccccagcaccctgagcctgctgggccccaccttccctggcctgagcagctgcagcgctgacctgaaggacatcctgtctgaggccagcaccatgcagctgctgcagcagcagcagcaggaggccgtgtctgagggcagcagcagcggccgggcccgggaggccagcggggcccccaccagcagcaaggacaactacctgggcggcaccagcaccatcagtgacaatgccaaggagctgtgcaaggctgtgtctgtgtccatgggcctgggcgtggaggccctggagcacctgagccctggagagcagctgcggggggactgcatgtatgcccccctgctgggcgtgcccccagctgtgcggcccaccccctgtgcccccctggctgaatgtaaaggcagcctgctggatgacagcgctgggaagagcacagaggacacagctgagtacagccccttcaagggcggctacaccaagggcctggagggggagagcctgggctgcagcggcagcgctgctgctggcagcagcggcaccctggagctgcccagcaccctgagcctgtacaagagcggggccctggatgaggccgccgcctaccagagccgggactactacaacttccccctggccctggccggccccccacctcctcctcctccaccccacccccacgcccgcatcaagctggagaaccccctggactatggcagcgcctgggccgctgctgctgcccagtgccgctacggggacctggccagcctgcatggagctggagctgctggccctggcagcggcagccccagcgctgctgccagcagctcctggcacaccctcttcaccgctgaggagggccagctgtatggcccctgtggcggcggcggcggcggcggcggcggcggcggcggcggcggcggcggcggcggcggcggcggcggcggggaggccggggctgtggccccctacggctacacccggcccccccagggcctggccggccaggagagtgacttcaccgccccagatgtgtggtacccaggcggcatggtgtcccgggtgccctaccccagccccacctgtgtgaagtctgagatgggcccctggatggacagctacagcggcccctatggagacatgaggctggagacagcccgggaccacgtgctgcccatcgactactacttccccccccagaagacctgcctgatctgtggagatgaggccagcggctgccactacggggccctgacctgtggcagctgcaaggtgttcttcaagagagctgctgagggcaagcagaagtacctgtgtgccagcagaaatgactgcaccatcgacaagttccggaggaagaactgccccagctgccgcctgaggaaatgttatgaagctggcatgaccctgggcgccaggaagctgaagaagctgggcaacctgaagctgcaggaggagggggaggccagcagcaccaccagccccacagaggagaccacccagaagctgactgtgagccacatcgagggctatgagtgccagcccatcttcctgaatgtgctggaggccatcgagcccggggtggtgtgtgccggccatgacaacaaccagcctgacagctttgctgccctgctgagcagcctgaatgagctgggggagcggcagctggtgcacgtggtgaagtgggccaaggccctgcctgactgtgaaagagctgcctctgtgcacttctag

SEQ ID NO: 364 - DNA, 1596 bp, Artificial Sequence
  derived and/or modified sequence
atggaggtgcagctgggcctgggccgggtgtacccccggccccccagcaagacctacagaggagccttccagaacctcttccagagcgtgcgggaggtgatccagaaccctggccccaggcaccctgaggccgccagcgctgcccctcctggggccagcctgctgctgctgcagcagcagcagcagcagcagcagcagcagcagcagcagcagcaggagaccagcccccggcagcagcagcagcagcagggagaagatggcagcccccaggcccacagaagaggccccaccggctacctggtgctggatgaggagcagcagcccagccagccccagagcgccctggagtgccaccctgagcggggctgtgtgcctgagcctggagctgctgtggccgccagcaagggcctgccccagcagctgcctgcccccccagatgaagatgacagcgctgcccccagcaccctgagcctgctgggccccaccttccctggcctgagcagctgcagcgctgacctgaaggacatcctgtctgaggccagcaccatgcagctgctgcagcagcagcagcaggaggccgtgtctgagggcagcagcagcggccgggcccgggaggccagcggggcccccaccagcagcaaggacaactacctgggcggcaccagcaccatcagtgacaatgccaaggagctgtgcaaggctgtgtctgtgtccatgggcctgggcgtggaggccctggagcacctgagccctggagagcagctgcggggggactgcatgtatgcccccctgctgggcgtgcccccagctgtgcggcccaccccctgtgcccccctggctgaatgtaaaggcagcctgctggatgacagcgctgggaagagcacagaggacacagctgagtacagccccttcaagggcggctacaccaagggcctggagggggagagcctgggctgcagcggcagcgctgctgctggcagcagcggcaccctggagctgcccagcaccctgagcctgtacaagagcggggccctggatgaggccgccgcctaccagagccgggactactacaacttccccctggccctggccggccccccacctcctcctcctccaccccacccccacgcccgcatcaagctggagaaccccctggactatggcagcgcctgggccgctgctgctgcccagtgccgctacggggacctggccagcctgcatggagctggagctgctggccctggcagcggcagccccagcgctgctgccagcagctcctggcacaccctcttcaccgctgaggagggccagctgtatggcccctgtggcggcggcggcggcggcggcggcggcggcggcggcggcggcggcggcggcggcggcggcggcggcggggaggccggggctgtggccccctacggctacacccggcccccccagggcctggccggccaggagagtgacttcaccgccccagatgtgtggtacccaggcggcatggtgtcccgggtgccctaccccagccccacctgtgtgaagtctgagatgggcccctggatggacagctacagcggcccctatggagacatgaggtag

SEQ ID NO: 365 - DNA, 2217 bp, Artificial Sequence
  derived and/or modified sequence
atgcagctgctgcagcagcagcagcaggaggccgtgtctgagggcagcagcagcggccgggcccgggaggccagcggggcccccaccagcagcaaggacaactacctgggcggcaccagcaccatcagtgacaatgccaaggagctgtgcaaggctgtgtctgtgtccatgggcctgggcgtggaggccctggagcacctgagccctggagagcagctgcggggggactgcatgtatgcccccctgctgggcgtgcccccagctgtgcggcccaccccctgtgcccccctggctgaatgtaaaggcagcctgctggatgacagcgctgggaagagcacagaggacacagctgagtacagccccttcaagggcggctacaccaagggcctggagggggagagcctgggctgcagcggcagcgctgctgctggcagcagcggcaccctggagctgcccagcaccctgagcctgtacaagagcggggccctggatgaggccgccgcctaccagagccgggactactacaacttccccctggccctggccggccccccacctcctcctcctccaccccacccccacgcccgcatcaagctggagaaccccctggactatggcagcgcctgggccgctgctgctgcccagtgccgctacggggacctggccagcctgcatggagctggagctgctggccctggcagcggcagccccagcgctgctgccagcagctcctggcacaccctcttcaccgctgaggagggccagctgtatggcccctgtggcggcggcggcggcggcggcggcggcggcggcggcggcggcggcggcggcggcggcggcggcggcggggaggccggggctgtggccccctacggctacacccggcccccccagggcctggccggccaggagagtgacttcaccgccccagatgtgtggtacccaggcggcatggtgtcccgggtgccctaccccagccccacctgtgtgaagtctgagatgggcccctggatggacagctacagcggcccctatggagacatgaggctggagacagcccgggaccacgtgctgcccatcgactactacttccccccccagaagacctgcctgatctgtggagatgaggccagcggctgccactacggggccctgacctgtggcagctgcaaggtgttcttcaagagagctgctgagggcaagcagaagtacctgtgtgccagcagaaatgactgcaccatcgacaagttccggaggaagaactgccccagctgccgcctgaggaaatgttatgaagctggcatgaccctgggcgccaggaagctgaagaagctgggcaacctgaagctgcaggaggagggggaggccagcagcaccaccagccccacagaggagaccacccagaagctgactgtgagccacatcgagggctatgagtgccagcccatcttcctgaatgtgctggaggccatcgagcccggggtggtgtgtgccggccatgacaacaaccagcctgacagctttgctgccctgctgagcagcctgaatgagctgggggagcggcagctggtgcacgtggtgaagtgggccaaggccctgcccggcttcaggaacctgcacgtggatgaccagatggccgtcatccagtacagctggatgggcctgatggtgtttgccatgggctggaggagcttcaccaacgtgaacagcaggatgctgtactttgccccagacctggtgttcaatgagtacaggatgcacaagagcaggatgtacagccagtgtgtgaggatgaggcacctgagccaggagtttggctggctgcagatcaccccccaggagttcctgtgcatgaaggccctgctgctcttcagcatcaccttctgcctgcaccccacctctgtgcctgtggatggcctgaagaaccagaagttctttgatgagctgaggatgaactacatcaaggagctggaccgcatcatcgcctgcaagaggaagaaccccaccagctgcagccgccgcttctaccagctgaccaagctgctggacagcgtgcagcccatcgcccgggagctgcaccagttcacctttgacctgctgatcaagagccacatggtgtctgtggacttccctgagatgatggccgagatcatctctgtgcaggtgcccaagatcctgagcggcaaggtgaagcccatctacttccacacccagtag

SEQ ID NO: 366 - DNA, 2763 bp, Artificial Sequence
  derived and/or modified sequence
atggaggtgcagctgggcctgggccgggtgtacccccggccccccagtaagacttataggggggcatttcagaacctgtttcagagcgtccgggaggtcatccagaacccagggccccgacaccccgaggcagcttccgcagccccaccgggagcctccttgttactgctgcaacagcagcagcaacagcaacaacaacagcagcagcagcagcagcagcagcagcagcagcagcagcaggagactagccccaggcagcagcagcagcaacagggcgaggacggctctcctcaggctcatcgtaggggaccgaccggttatctggtcctggatgaggaacagcagccaagccagcctcagagcgcactggagtgccatcccgagaggggttgcgttcctgagcctggagccgccgtggccgcctctaagggactaccccagcaactacctgctcccccagatgaagatgatagcgctgctcccagcacacttagcctgttgggacccaccttccctggactctcaagctgcagcgccgatctgaaggatatactttccgaggccagcacaatgcagttattgcagcagcagcaacaggaggccgtcagcgaaggcagctcctcaggccgggctcgcgaagcatcaggcgcccccaccagctcaaaagataactatttgggtggcacgagtaccatctccgataacgctaaagagttgtgcaaagcagtcagcgtgagtatgggccttggggtagaggccctggagcacctctccccgggggagcagcttaggggtgactgcatgtatgcccccttactgggtgttcctccagccgtgcggccaactccgtgtgcccctctggcagaatgtaagggtagcctgctagatgacagcgctggcaagtccacagaagacaccgcagagtactccccgttcaaagggggctacaccaagggactcgagggagaatcccttggttgctctggatctgctgcagcgggctcaagcgggacgctggagcttccctccacccttagcttgtacaagagcggtgctttggacgaagccgcagcctatcaaagcagagattattacaacttcccacttgcgttagctggacccccacctcccccacccccccctcaccctcacgcacggattaagctagagaatcctctcgattacggaagcgcttgggccgcagctgcggcccaatgccgctacggagatctggcatctctgcacggagccggggccgcggggcccggcagcggttccccatcagcagccgcttcctccagttggcacacattgttcacagctgaggaggggcagctgtacggcccttgtgggggggggggcggtggtgggggcggcgggggaggcggaggcggaggaggcggaggtggagggggcggggaagccggagcagtagccccatacggctacacccggcccccccaaggcttagccgggcaggaaagcgattttacagctcctgacgtctggtaccccggtggcatggtgtccagagtcccttacccctccccaacctgcgtcaagagtgaaatgggaccatggatggattcttattctggcccttatggagatatgcggctggagaccgccagagatcacgtcctgcccattgactactacttccccccacagaaaacctgcttgatctgcggagacgaggccagtggctgtcactatggagctctgacctgtggtagttgtaaagtattctttaaaagggccgccgaagggaaacagaaatacctctgcgcatctagaaatgactgcaccatcgataagttccgccgcaagaattgccccagctgtcggcttcggaagtgctacgaagcggggatgactttgggcgcacggaaactgaagaaattggggaatctcaaacttcaggaggagggcgaggcatcatctaccacatcacctacagaggagaccacccaaaaactgaccgtaagtcatatcgaagggtacgagtgtcagccaatcttcctgaacgtgttggaagccatagaacctggcgtggtgtgcgccggccacgataacaatcaacctgatagcttcgccgccctgctcagtagcctgaatgagctgggagagaggcagcttgtgcacgtggtgaagtgggctaaagcccttccaggcttccgaaacttgcatgtggacgatcaaatggccgttatccagtacagctggatgggcctgatggtgttcgcaatgggctggcgcagtttcacaaacgtgaactcacggatgctttactttgcaccagacctggttttcaatgaataccgaatgcataagagtcggatgtactctcaatgcgtacggatgcggcatttgagtcaggagtttggatggctgcaaattacacctcaggagttcttgtgtatgaaagccctcctgttgttctccataatcccggtggatgggctaaaaaaccaaaaattcttcgatgaactgagaatgaattacattaaggagttagaccgcattattgcttgcaaacgcaagaatccgacgagctgctcaaggaggttttatcagttaaccaaactgctggatagcgtccagcctattgcaagggagttacatcaattcacatttgatctgctgataaaatctcacatggtgtctgtggactttccagagatgatggcagaaatcatctctgtgcaagtacccaaaattctctctggaaaggttaaacccatttatttccacacccagtag

SEQ ID NO: 367 - DNA, 2205 bp, Artificial Sequence
  derived and/or modified sequence
atggaggtgcagctgggcctgggccgggtgtacccccggcccccctctaaaacctacaggggcgcatttcaaaacctatttcaaagtgtccgtgaggttatccagaacccgggcccacgccacccagaggccgccagtgccgcgccaccaggggcctcactcctgctgctgcagcagcagcagcaacagcagcagcagcagcagcagcaacagcagcaacaacagcagcagcagcaacaggaaacaagccctcgacagcagcaacaacaacaaggagaggacggcagcccacaggcacatcggagagggcctactggatacctggtgctggatgaggagcagcagccctctcagccccaatccgcactagagtgccaccctgaacgtggatgcgtgcctgaacccggagccgcggtggccgctagcaagggcctgccccagcagctccccgccccgccggatgaggacgattcagccgcccctagtaccctttccttactgggaccgacttttcccggtctcagctcctgctccgccgatctgaaggatattctgtcagaagcgagtaccatgcagctattacaacaacaacagcaggaagccgtgagtgagggttcctcctctggacgagcacgggaggcttctggggcgcccacctctagcaaggacaattatcttggcggaactagcactatcagtgataatgctaaagaactgtgtaaggccgtgtccgtgtccatgggcctcggtgtcgaagctttggagcatttgtccccaggagagcagctgagaggtgactgtatgtatgcaccattgctgggggtgccccccgccgtgcggcccactccctgcgctccgctggctgagtgtaaagggtcgcttctggacgattccgcgggcaagtctacagaggacacggccgagtatagcccgttcaagggagggtacactaaaggtctggagggcgagagcttagggtgtagcggttctgcagctgccggcagttcaggcacactggaactgcccagtacgctttctctgtacaagtccggggccctggacgaagctgctgcttaccagtccagggactattataattttcccttagcgctggcaggacccccacctccaccccctcctccgcatcctcatgcacgaataaaactcgaaaatcctctggattatgggtctgcatgggccgcggccgccgcccaatgtagatacggagacctagccagcctgcacggtgccggggccgccggtcctgggtctggctcaccgagcgcggctgcctcctccagctggcacaccttgttcaccgcggaggaaggccagctgtatggtccatgcgggggcggaggaggcggaggtgggggaggagggggtggtggcgggggcgggggtggggggggcggtggtgaagccggcgccgtggcaccatacgggtacactagaccacctcagggactggctgggcaggagtcggacttcacagccccggacgtgtggtatccaggaggcatggtaagtcgggttccttatcctagccctacctgcgtaaaatcagagatgggcccctggatggactcctacagcgggccttacggcgatatgcgactcgaaaccgcgagggatcatgtgttaccaatcgactattacttccctccacagaaaacctgtctgatttgcggggatgaggcctcaggctgtcactacggagctctcacgtgtggcagctgcaaggttttctttaagcgagccgctgaaggaaaacagaagtacttgtgtgctagtcggaacgactgtactatcgacaagtttagacggaagaactgccctagctgtagactgaggaagtgttacgaggccgggatgaccctgggagctcggaaactcaagaaactgggtaatctaaaactgcaggaggagggggaagcttcaagcaccacatcaccaacagaagagacaacacaaaagctgacagtgtcacacatcgaagggtacgagtgccagcccatctttctgaacgtgctggaggccatagagcccggagttgtgtgcgccggccatgataacaatcagcctgattccttcgctgccctcctgagctctcttaacgagctaggggagcgtcaactggtccatgtggtgaagtgggccaaggcactgccagactgtgagcgtgcagcctcggtccatttctag

SEQ ID NO: 368 - DNA, 1596 bp, Artificial Sequence
  derived and/or modified sequence
atggaggtgcagctgggcctgggccgggtgtacccccggccccccagcaagacctatcgtggagccttccaaaatctgtttcaatccgtgcgggaagttatccagaaccccggaccccgtcatcctgaagccgctagtgccgcccccccaggagcttctctcctgctgcttcagcagcagcagcaacagcagcagcagcagcagcagcagcagcaagaaacgtcaccacggcagcagcagcaacaacagggcgaggacggctctccacaagcccacaggaggggccccactggctacttggttctggacgaggagcagcagccatcacagcctcagagcgccctggagtgtcaccctgagcgcggctgcgtgccagagcccggtgctgcagtggccgcaagtaagggtctgccccaacaactgcctgctcctcctgacgaggacgatagcgcagcccccagcaccctgtctttactcggtccgacttttcctggcttatcctcttgcagtgctgacctgaaagacatactgagcgaagcttccacgatgcagctgctccagcagcagcagcaggaagctgtgagtgaaggatccagctctggccgggccagagaggccagcggagctcctacatcctcaaaggacaactatctaggcggaacaagcactatcagtgataacgcaaaagaactgtgcaaagcagtgagcgtatctatggggttaggtgtggaggcattggaacacctgtccccaggcgagcaactgcggggcgactgcatgtacgcccccttattgggggtaccaccagccgttaggcctacgccttgtgcccccctggccgagtgcaaagggtctctgctcgatgacagcgcaggaaagtctaccgaggataccgcagaatattccccattcaaaggtggctatactaaaggactcgagggcgaatctctggggtgctccgggtcagccgcggccggaagttcaggcaccctcgaattaccaagcacactttcactgtacaagagcggagccctcgacgaggccgctgcataccagagccgtgattactataatttccctctggcacttgcagggccacctccacccccacccccaccccatccacacgcccgaataaagctcgagaatccccttgactatgggtccgcctgggccgctgctgcagctcagtgtaggtacggtgatctggctagtttgcatggtgctggcgccgccggacctggatcagggtccccttcggcagctgcctcatcatcgtggcacacactgttcacagcagaagaaggacagctgtatgggccgtgcggaggaggcggcgggggcggcggaggcggcggaggcggcggcgggggaggaggaggcgggggaggtggagaagccggcgccgtggcgccatacgggtacacacggcctccccagggacttgcggggcaagaatctgacttcaccgctcctgacgtgtggtatcccgggggaatggtgtcaagggtaccctaccctagcccaacctgtgtgaagtcagagatgggtccctggatggacagttatagcggaccctatggagacatgcgatag

SEQ ID NO: 369 - DNA, 2217 bp, Artificial Sequence
  derived and/or modified sequence
atgcagctgctgcagcagcagcagcaggaggccgtgagcgagggctcctcaagcggcagggcccgcgaagctagcggagcccccacatcaagcaaagacaactatcttggcgggacatcaaccatttcggacaacgcgaaggagctgtgcaaagccgtttcagtctctatggggctcggagtggaagccctggaacacctaagtcccggtgagcagcttcgaggagactgtatgtacgcgcccttactgggcgtaccccccgcggtgagaccaaccccatgcgcccctctcgctgaatgtaaaggatcccttctggacgattccgcagggaaaagcaccgaggatacagcagagtattcccccttcaaaggagggtatacaaagggactcgagggagagtccctcggctgctctggctctgcagccgctggatctagtggtactctggagctccccagcacgctgagtttatacaagtcaggagctttggatgaggctgcagcctatcagtcaagagactactataactttccgttagcactggccggaccacctccgcctccacccccccctcatccacacgccaggatcaagctcgaaaaccctcttgactacgggtccgcctgggcggccgctgccgctcagtgtcgctatggagatttggcgtcccttcacggcgctggagccgcagggccaggatctgggagcccatccgcggccgcctcaagttcgtggcatacacttttcacagctgaggaggggcagctctatgggccatgcggcggcggaggtggcggagggggcggcggcgggggagggggagggggaggcggcggcggtggaggcggagaggcaggggccgttgccccctatggttacactagaccgccgcaagggctggcaggtcaagaaagtgatttcacggcgcctgacgtgtggtaccctggcggcatggtgtcaagagttccataccctagtcctacatgtgtgaagtccgaaatgggcccttggatggactcttactccggcccctatggcgacatgagacttgagactgcgcgagaccacgtactgccaattgattactactttcctccacagaaaacttgcctgatatgcggagacgaagcatcgggatgtcattacggagccctcacctgcggttcctgcaaggtcttcttcaagagggcggccgagggcaaacaaaagtacttatgcgcgtcccggaatgactgtacaattgacaaattccgacgaaagaactgtccttcgtgtcgccttcgaaagtgctatgaggccggaatgactctgggcgcacggaagctgaaaaagctcggcaatcttaaactacaggaagaaggggaggccagcagcacgactagtccaacagaagagaccacccagaagctgaccgtttcccacatcgagggctacgagtgccagccaatttttctaaatgtcttggaggccatcgaacctggagtggtgtgtgctgggcatgataataaccagcccgactccttcgccgccttgctgtctagtctgaacgagctgggtgaacggcagctcgtgcatgtggtgaagtgggccaaagcattgccaggctttagaaacctgcacgtggatgatcagatggccgtgatccaatattcttggatggggctgatggtgttcgccatggggtggcggagctttactaacgtaaactcacgcatgctctatttcgcacccgatttggtcttcaacgagtatcgcatgcacaagtcaaggatgtattcgcagtgtgttcggatgcggcacctgagtcaagagttcggctggttacagattaccccccaggaatttctgtgcatgaaagcgctgctgctcttcagtatcactttctgtctgcacccaacgagcgtaccagtcgacggtcttaaaaatcaaaaattcttcgatgaactccgaatgaactatatcaaggaattggaccggatcatcgcctgcaagcggaagaatcccacatcatgctcccgtcgattctatcagttgaccaagctgttggactcagtccaacctattgcgcgtgagctccaccaattcacctttgacctgttgattaagagtcacatggtgagtgtcgactttcccgaaatgatggcggagattatatccgtgcaggtgcctaagatattgtctggaaaggtcaagccaatctacttccatactcaatag

SEQ ID NO: 370 - DNA, 2763 bp, Artificial Sequence
  derived and/or modified sequence
atggaggtacagcttggccttggcagggtgtatcccagacccccttctaaaacatatcgcggagcctttcagaatttgttccaaagcgtccgcgaggtgatccagaatcccggtccgcgacatccagaggccgcaagcgccgctcctccaggggcaagtctgctgctgttgcaacaacaacagcagcaacagcagcagcagcagcagcagcagcagcagcagcagcagcagcagcagcaggagacctccccccgtcaacagcagcaacagcagggagaggacggcagccctcaagcccacaggagaggcccaaccggctacttggtcctggacgaggagcagcagcccagccagcctcagtccgcattggaatgtcatcccgaaagggggtgtgtgcccgagcctggcgcagcagttgcagcatctaagggtctgccccaacaactaccagccccacccgatgaagatgactccgccgctccgagcacactttccctcctcggacctacatttcctgggctatcctcatgctctgccgacttgaaggacattctgtccgaggcttccactatgcagttgctgcagcagcaacagcaggaggccgtgagtgagggttctagttctggcagggcgagagaagccagcggtgcgcctacttcttcaaaagacaactacttgggcggtactagcacaatatctgataacgccaaggagttatgcaaggccgtgtctgtcagtatgggcctgggagtggaggctctggagcacttgtcacccggagaacagttaagaggcgattgtatgtacgcccctcttctgggtgttccacctgctgtgcggccaactccctgcgctcctctcgccgaatgcaaggggtctctgctggacgattctgccggtaaaagtaccgaagatacagccgagtactccccattcaagggcggatacactaagggcctggaaggagagtcactgggctgtagcgggtcggccgctgccggaagcagcgggactctggagctcccctcgacactcagcctctacaaatccggggctctggatgaagcagcagcatatcagtcccgcgactactataactttcccctagcgctggccggaccgccaccccctcctccaccgccacacccacacgcgaggatcaaactggaaaacccactagactatggaagtgcatgggcagccgctgcagctcagtgtaggtatggggatctcgcctccctgcacggcgctggcgcagccggtccagggtcaggtagcccatctgccgcagcctcttcaagctggcacaccttgttcaccgccgaggagggacagctctatggcccttgcggagggggaggaggtggcggagggggtggcggtggtggtggtggcggtggcggtgggggtggcggaggagaggcaggggcagtagccccttacggttatacccggcctccacagggcctggctggccaggaaagcgatttcaccgcccctgatgtgtggtaccccggaggtatggtcagtagggttccataccccagtcccacctgcgtcaaatctgagatgggcccttggatggactcgtactcagggccttacggtgacatgaggctagagaccgcccgtgaccatgtgttgcccattgattattattttccaccacagaagacctgtctcatctgcggggacgaggcaagcggatgccactacggcgctctgacatgcggatcatgcaaggtgttttttaagcgggcagcagagggtaaacagaaatacttatgtgcatctaggaatgattgtacaattgataagtttcggagaaaaaactgtccatcctgccggttgaggaagtgctatgaagcagggatgaccctcggcgcacggaaactgaaaaagttagggaatcttaagctgcaggaagaaggtgaggcgtcttccaccacgagccccaccgaagagacaactcagaagctgacagtgtcacacattgagggttacgagtgccagcctatctttcttaacgttttagaagccatcgaacccggagtggtgtgcgcgggacatgacaataaccagccagacagtttcgcggcattgctctcctccctaaatgaattgggcgaacggcagctggtccacgtggtgaaatgggctaaggcattgcccggatttcggaacctgcacgtcgacgaccaaatggccgtgatccagtactcttggatgggactgatggtctttgccatggggtggaggtcttttactaatgtgaattcacgcatgttgtacttcgctccagatctagtgttcaacgagtaccggatgcataagtcgagaatgtatagtcaatgcgtccgcatgagacatctgagtcaagagtttggatggctgcagatcacacctcaggaatttctgtgtatgaaggcactcctgctgtttagtattatacccgtcgacggtttaaagaaccagaaattcttcgatgagctgagaatgaattacatcaaagagttggatagaattatcgcctgtaaaaggaagaaccctacgagttgctctaggcggttctatcagttgaccaagctgctcgactcagtccagccaatcgcacgcgagctgcatcagtttaccttcgacctcctgattaagagccatatggtcagtgtggacttccccgagatgatggctgagatcatctccgtgcaggtacctaagattctctctggcaaggtcaagcctatttattttcatacccagtag

SEQ ID NO: 371 - DNA, 2205 bp, Artificial Sequence
  derived and/or modified sequence
atggaggtgcagctcggactggggagagtgtaccccagacctccatctaaaacttacaggggcgcttttcagaatctgtttcagtccgtgagagaagtgattcagaaccctgggccacggcaccctgaggccgctagcgcggctcccccaggtgcatctcttcttctgcttcagcagcaacagcagcagcagcaacagcagcagcaacagcagcaacagcagcagcaacaacagcagcaggagaccagcccgagacagcaacaacaacagcaaggggaggatggtagcccacaggcccaccgccgagggcctactggatacctggtgctggatgaggaacaacagccgtctcagcctcagtctgccctggaatgccaccccgaacgcggatgcgtgcctgagccaggcgctgcagtcgccgcatctaagggactgccgcaacaactgcctgcccctccagacgaggacgacagcgccgcaccaagtaccctatctcttctcgggccaacttttcctggactgtcctcctgttcagcggatctaaaggacatcctgagtgaagctagtactatgcagttgttgcagcaacagcagcaggaggcggtcagcgagggcagcagtagcggaagggccagagaggcatcaggtgcccctacctccagcaaggacaactacttggggggtacatcaacaatttccgacaatgccaaagaactgtgcaaggcagtcagcgtgtcaatgggcttaggggtggaagccctagagcacctgagtcccggagagcagctgcgcggagattgcatgtatgcaccattgttaggagtgcccccagccgttcgaccgaccccctgcgcgccactggccgagtgcaaggggtcactgctggacgattcagccggaaaatccacagaagacacagcagagtatagtcccttcaagggcggttacacaaaagggttagaaggtgaaagcctggggtgctctggatcagcagccgctggctccagcggcacactggagctgccctctactctgtcactttacaagtccggcgcattagacgaagctgccgcataccagagccgcgactattacaacttccctcttgcactagccggtcctccccctccacctccacccccacacccacacgctagaattaaattagagaatcctctggattatggaagtgcctgggcagctgctgcagctcagtgcaggtatggagatttggccagcttacacggtgcaggcgcagctggaccaggtagtggttcgcccagtgcggctgctagtagctcttggcacacgctattcacggccgaggaaggtcaactctacggaccatgcgggggtggtggaggagggggaggtggtgggggaggaggcggaggtggtgggggagggggtgggggaggcgaagctggggcagttgcaccctacggctacaccagaccccctcaggggctggctggccaggaatctgatttcactgcgccagatgtttggtaccccggagggatggtcagcagggtcccataccctagccccacatgcgtcaagagtgaaatgggaccgtggatggattcctacagtggcccttatggcgacatgagacttgaaaccgcacgggatcacgttctgcctattgactactattttcctccacaaaaaacatgcctgatttgtggagacgaggcctccggatgtcattacggggctcttacatgcggtagctgcaaggtcttcttcaagagagcagctgaggggaaacagaagtatctatgtgcttcacggaatgattgtactattgataagttccgcaggaaaaactgtccttcctgtcgactacggaagtgttatgaagcagggatgacccttggagccagaaagttgaaaaagctgggaaacctcaaactacaggaggagggagaggcttctagcacaacatcccctacggaggagaccacacagaagcttactgtctctcatattgaaggctatgaatgtcagcccatcttccttaatgtgcttgaggccatcgaacccggagtggtgtgtgccggtcatgataataaccaacctgattcttttgccgcactcctgtccagcctaaatgaactgggggaaagacagctcgtgcatgtggtgaaatgggcaaaagctctgcctgattgcgagcgggctgcgagcgtgcacttttag

SEQ ID NO: 372 - DNA, 1596 bp, Artificial Sequence
  derived and/or modified sequence
atggaggtgcagctcggacttgggagagtctatccccgacccccatcaaaaacatatagaggagcatttcaaaacctgttccagtccgtgcgtgaagtgattcagaacccaggtcccagacacccagaggccgcatcggccgctccaccgggagccagcctgctcttactgcagcagcagcagcagcagcagcagcagcagcagcagcaacagcaggaaacttccccacgacagcaacaacagcagcagggcgaagatggctctccccaggcacatagacggggtcctactggctatttagtcttggacgaagaacagcagccttcccagcctcagagtgccctggaatgtcaccccgaacgaggatgcgtcccagaacccggagcagccgtggctgcaagcaaggggctcccacagcaattgcctgctccccctgacgaggatgactcggcagcccctagcaccttgagcctgctgggtcctacgtttcctggcctctcttcttgctctgccgacttgaaagacatcctgagcgaggcctctactatgcagctgctgcaacagcagcagcaagaagccgtgtccgaaggatcgtcctctggtcgcgcacgggaagcatccggagctcccacatctagcaaagacaactaccttggtgggacttctactatctcagataacgccaaggaactatgcaaagcagtaagcgtttcaatggggctaggcgttgaggcactggagcacctgagtccaggggaacagttgaggggggattgtatgtacgctcctctcttgggcgtgcccccagccgtgagacccactccctgcgcacccctggctgaatgtaaaggtagcctgttagatgattccgctggcaaatcaacagaagacaccgccgaatactctccatttaagggtggttatacgaaaggactcgagggagaaagcctcggctgcagcgggagcgccgctgccggaagttctggcaccttagagttgccctccaccctgtcactttataagagcggggctttagacgaagcagccgcataccagagccgcgattactacaattttccgctcgctttggctggccctcctccccctccacctccaccacatcctcatgcacggatcaagctggagaaccccctcgactacggttccgcgtgggctgccgctgctgctcagtgccgctacggtgacctcgcctctttacatggcgcaggcgcagctggtccagggagcggaagtcccagtgccgcagcgagctcttcttggcacactctcttcaccgccgaggagggacagctgtatggtccatgtgggggtgggggaggcggagggggtggcggaggcggtgggggtggtggcggtggcggaggaggtggaggtgaggctggcgcagtcgcgccatatggctacactcggcctccgcagggtctggctggacaagaaagtgactttaccgctcctgacgtctggtatcccggagggatggtcagtcgggtaccatatcccagccctacttgcgtgaaatccgaaatggggccatggatggatagctatagcggcccatacggagacatgaggtag

SEQ ID NO: 373 - DNA, 2217 bp, Artificial Sequence
  derived and/or modified sequence
atgcagctcctgcagcaacaacaacaggaggccgtttccgagggaagctcttctggacgggctagggaggcatccggggcacccacttcaagtaaagataactaccttggcggtacaagcactatcagcgataacgcgaaggagctttgcaaggccgtgagtgtctcaatgggactcggcgtcgaggccctggagcatctaagtcctggcgaacagttgaggggagactgcatgtacgccccactgctgggggtccctccagccgttagacctacaccttgcgctccattagccgaatgcaagggctctttgcttgatgattctgccggaaagtcaacggaggacacagccgaatattcacccttcaaggggggttacaccaaaggcctggagggcgagtctttgggttgcagcggttctgcagctgcaggaagctccggcaccctcgagcttccaagcaccctttccttgtataaatctggagcactggatgaggcggcagcttaccaaagtagggattattacaacttcccattggccttggctggcccacctccacccccacctcctcctcaccctcacgccaggatcaagctggagaacccactggactatggtagcgcctgggccgctgcagccgcacagtgccgttacggggacctagcaagcctgcatggggcaggagccgcaggtccgggatccggcagcccaagcgcggctgccagctctagttggcacactttattcactgccgaagaaggccagctatacggaccttgtggcggaggaggcggaggaggaggtggcggaggtgggggagggggaggcggaggagggggagggggaggtgaggcaggcgctgtggccccatatggctacacgcgacccccacaaggtctcgctgggcaagaatccgatttcacggccccagatgtgtggtacccaggcggaatggtgagtagagtcccataccctagccctacctgcgtcaaatccgagatgggcccttggatggactcttacagcggcccatacggtgacatgaggttggagactgcaagggaccatgtgctgcccatcgactattactttcccccacagaaaacctgtctcatatgtggagatgaagcttccggctgccattacggggcattgacctgcggtagttgcaaggtgttcttcaaacgggctgcagaggggaaacagaagtacctgtgtgcttcacgcaacgattgcacgatcgataaattcaggcgaaaaaactgcccaagctgtcgtctgagaaaatgttatgaggctggaatgactctgggggctcggaagctgaaaaagctcggaaacctgaagctgcaagaggagggagaggcaagcagtacaacatctcccaccgaggagactactcaaaagctcacagttagccacattgagggctacgaatgccaacctatatttctgaatgtcctcgaggccattgagcccggtgtcgtctgcgcaggacacgacaacaatcagcctgatagtttcgccgctctgcttagctcactgaatgagctaggtgaacggcagcttgtgcacgtggtgaagtgggcgaaagcacttccaggctttcggaaccttcatgtagatgaccagatggcggtgattcagtattcctggatggggctaatggtgtttgccatgggctggcggtcctttaccaacgtcaacagtcggatgctatatttcgcacccgatcttgttttcaacgagtatagaatgcataaatcgaggatgtattctcagtgtgtccgaatgagacacctatcccaggagttcggctggctacagatcactccccaggaatttctctgtatgaaagccctccttctgttttccatcacattctgcttacatccaacctctgtgcccgtggacggtctgaagaatcagaaattcttcgacgaactcaggatgaattacatcaaggagctggatcggatcattgcatgcaagcgcaagaacccaaccagctgctctcgcagattttaccagctgaccaaattgctcgactccgtgcaacctattgcaagagaactccatcagttcacttttgatctgctaatcaaatcccatatggtgagcgtggacttcccagaaatgatggcagaaattatttccgtccaagttccaaaaatcttgtccgggaaggtgaaacctatttacttccacacccagtag

SEQ ID NO: 374 - DNA, 555 bp, Artificial Sequence
  derived and/or modified sequence
atgccagtaaaaggagcctcttccttattgttcctgccactgcctccaagcgcatggcagctctgcctcctgagtaaacgaagagtacaccctatcagaacccctttgccctttcacagctggattaaggccctggtgatttctaaccagaaggtgccagagagggaaaggccagaaggaacaggagtcctgtctgatggatgcctggggcagtcccaggagggggaacctttgctctcccctcccgctctcgcacacttcccactgcatgcacgctgttgcggatcttcttgggcctggccgggaagcgccggtgaggctattagaatggtgtcaggggctcccttcctatgctttcttgacggtctggatggccttccctgctcgtccccaatggctgctctgcctgcccctatggctgccctgcccgctaggaggcagcgccaagaacacatcgagggaggcagccagggttgtggggtgaggtcccccgctccctgccggggtaagcccggatctgccacatcctctactctgaggctctgtcctgcctag

SEQ ID NO: 375 - protein, 322 aa, Artificial Sequence
  derived and/or modified sequence
MSAKSRTIGIIGAPFSKGQPRGGVEEGPTVLRKAGLLEKLKEQECDVKDYGDLPFADIPNDSPFQIVKNPRSVGKASEQLAGKVAEVKKNGRISLVLGGDHSLAIGSISGHARVHPDLGVIWVDAHTDINTPLTTTSGNLHGQPVSFLLKELKGKIPDVPGFSWVTPCISAKDIVYIGLRDVDPGEHYILKTLGIKYFSMTEVDRLGIGKVMEETLSYLLGRKKRPIHLSFDVDGLDPSFTPATGTPVVGGLTYREGLYITEEIYKTGLLSGLDIMEVNPSLGKTPEEVTRTVNTAVAITLACFGLAREGNHKPIDYLNPPK

SEQ ID NO: 376 - protein, 236 aa, Artificial Sequence
  derived and/or modified sequence
MSAKSRTIGIIGAPFSKGQPRGGVEEGPTVLRKAGLLEKLKEQECDVKDYGDLPFADIPNDSPFQIVKNPRSVGKASEQLAGKVAEVKKNGRISLVLGGDHSLAIGSISGHARVHPDLGVIWVDAHTDINTPLTTTSGNLHGQPVSFLLKELKGKIPDVPGFSWVTPCISAKDIVYIGLRDVDPGEHYILKTLGIKYFSMTEVTRTVNTAVAITLACFGLAREGNHKPIDYLNPPK

SEQ ID NO: 377 - DNA, 969 bp, Artificial Sequence
  derived and/or modified sequence
atgagcgccaagagcagaaccatcggcatcatcggcgcccccttcagcaagggccagcccagaggcggcgtggaggagggccccaccgtgctgagaaaggccggcctgctggagaagctgaaggagcaggagtgcgacgtgaaggactacggcgacctgcccttcgccgacatccccaacgacagccccttccagatcgtgaagaaccccagaagcgtgggcaaggccagcgagcagctggccggcaaggtggccgaggtgaagaagaacggcagaatcagcctggtgctgggcggcgaccacagcctggccatcggcagcatcagcggccacgccagagtgcaccccgacctgggcgtgatctgggtggacgcccacaccgacatcaacacccccctgaccaccaccagcggcaacctgcacggccagcccgtgagcttcctgctgaaggagctgaagggcaagatccccgacgtgcccggcttcagctgggtgaccccctgcatcagcgccaaggacatcgtgtacatcggcctgagagacgtggaccccggcgagcactacatcctgaagaccctgggcatcaagtacttcagcatgaccgaggtggacagactgggcatcggcaaggtgatggaggagaccctgagctacctgctgggcagaaagaagagacccatccacctgagcttcgacgtggacggcctggaccccagcttcacccccgccaccggcacccccgtggtgggcggcctgacctacagagagggcctgtacatcaccgaggagatctacaagaccggcctgctgagcggcctggacatcatggaggtgaaccccagcctgggcaagacccccgaggaggtgaccagaaccgtgaacaccgccgtggccatcaccctggcctgcttcggcctggccagagagggcaaccacaagcccatcgactacctgaacccccccaagtag

SEQ ID NO: 378 - DNA, 711 bp, Artificial Sequence
  derived and/or modified sequence
atgagcgccaagagcagaaccatcggcatcatcggcgcccccttcagcaagggccagcccagaggcggcgtggaggagggccccaccgtgctgagaaaggccggcctgctggagaagctgaaggagcaggagtgcgacgtgaaggactacggcgacctgcccttcgccgacatccccaacgacagccccttccagatcgtgaagaaccccagaagcgtgggcaaggccagcgagcagctggccggcaaggtggccgaggtgaagaagaacggcagaatcagcctggtgctgggcggcgaccacagcctggccatcggcagcatcagcggccacgccagagtgcaccccgacctgggcgtgatctgggtggacgcccacaccgacatcaacacccccctgaccaccaccagcggcaacctgcacggccagcccgtgagcttcctgctgaaggagctgaagggcaagatccccgacgtgcccggcttcagctgggtgaccccctgcatcagcgccaaggacatcgtgtacatcggcctgagagacgtggaccccggcgagcactacatcctgaagaccctgggcatcaagtacttcagcatgaccgaggtgaccagaaccgtgaacaccgccgtggccatcaccctggcctgcttcggcctggccagagagggcaaccacaagcccatcgactacctgaacccccccaagtag

SEQ ID NO: 379 - DNA, 1532 bp, Artificial Sequence
  derived and/or modified sequence
agtgggtggagccagctgtcctcattagataaaggttgtttattcaacccaagtataaatggaaaaaaaagatgcgccctctgtcactgagggttgactgactggagagctcaagtgcagcaaagagaagtgtcagagcatgagcgccaagtccagaaccatagggattattggagctcctttctcaaagggacagccacgaggaggggtggaagaaggccctacagtattgagaaaggctggtctgcttgagaaacttaaagaacaagagtgtgatgtgaaggattatggggacctgccctttgctgacatccctaatgacagtccctttcaaattgtgaagaatccaaggtctgtgggaaaagcaagcgagcagctggctggcaaggtggcagaagtcaagaagaacggaagaatcagcctggtgctgggcggagaccacagtttggcaattggaagcatctctggccatgccagggtccaccctgatcttggagtcatctgggtggatgctcacactgatatcaacactccactgacaaccacaagtggaaacttgcatggacaacctgtatctttcctcctgaaggaactaaaaggaaagattcccgatgtgccaggattctcctgggtgactccctgtatatctgccaaggatattgtgtatattggcttgagagacgtggaccctggggaacactacattttgaaaactctaggcattaaatacttttcaatgactgaagtggacagactaggaattggcaaggtgatggaagaaacactcagctatctactaggaagaaagaaaaggccaattcatctaagttttgatgttgacggactggacccatctttcacaccagctactggcacaccagtcgtgggaggtctgacatacagagaaggtctctacatcacagaagaaatctacaaaacagggctactctcaggattagatataatggaagtgaacccatccctggggaagacaccagaagaagtaactcgaacagtgaacacagcagttgcaataaccttggcttgtttcggacttgctcgggagggtaatcacaagcctattgactaccttaacccacctaagtaaatgtggaaacatccgatataaatctcatagttaatggcataattagaaagctaatcattttcttaagcatagagttatccttctaaagacttgttctttcagaaaaatgtttttccaattagtataaactctacaaattccctcttggtgtaaaattcaagatgtggaaattctaacttttttgaaatttaaaagcttatattttctaacttggcaaaagacttatccttagaaagagaagtgtacattgatttccaattaaaaatttgctggcattaaaaataagcacacttacataagcccccatacatagagtgggactcttggaatcaggagacaaagctaccacatgtggaaaggtactatgtgtccatgtcattcaaaaaatgtgattttttataataaactctttataacaagatta

SEQ ID NO: 380 - DNA, 1185 bp, Artificial Sequence
  derived and/or modified sequence
gtcactgagggttgactgactggagagctcaagtgcagcaaagagaagtgtcagagcatgagcgccaagtccagaaccatagggattattggagctcctttctcaaagggacagccacgaggaggggtggaagaaggccctacagtattgagaaaggctggtctgcttgagaaacttaaagaacaagagtgtgatgtgaaggattatggggacctgccctttgctgacatccctaatgacagtccctttcaaattgtgaagaatccaaggtctgtgggaaaagcaagcgagcagctggctggcaaggtggcagaagtcaagaagaacggaagaatcagcctggtgctgggcggagaccacagtttggcaattggaagcatctctggccatgccagggtccaccctgatcttggagtcatctgggtggatgctcacactgatatcaacactccactgacaaccacaagtggaaacttgcatggacaacctgtatctttcctcctgaaggaactaaaaggaaagattcccgatgtgccaggattctcctgggtgactccctgtatatctgccaaggatattgtgtatattggcttgagagacgtggaccctggggaacactacattttgaaaactctaggcattaaatacttttcaatgactgaagtaactcgaacagtgaacacagcagttgcaataaccttggcttgtttcggacttgctcgggagggtaatcacaagcctattgactaccttaacccacctaagtaaatgtggaaacatccgatataaatctcatagttaatggcataattagaaagctaatcattttcttaagcatagagttatccttctaaagacttgttctttcagaaaaatgtttttccaattagtataaactctacaaattccctcttggtgtaaaattcaagatgtggaaattctaacttttttgaaatttaaaagcttatattttctaacttggcaaaagacttatccttagaaagagaagtgtacattgatttccaattaaaaatttgctggcattaaaaataagcacacttacataagcccccatacatagagtgggactcttggaatcaggagacaaagctaccacatgtggaaaggtactatgtgtccatgtcattcaaaaaatgtgattttttataataaactctttataac

SEQ ID NO: 381 - DNA, 1112 bp, Artificial Sequence
  derived and/or modified sequence
gggaaataagagagaaaagaagagtaagaagaaatataagagccaccatgtcagcaaagtcgagaactatcgggattatcggtgctcctttcagcaaggggcaaccccgaggtggagtggaggaaggccccaccgtccttcggaaagcaggacttttggagaaactcaaagagcaggaatgcgatgtcaaagattatggagatctgccctttgcagacatcccaaacgattcaccgtttcagattgtgaaaaatccgcgctccgtagggaaggcgagcgaacagcttgcgggtaaagtcgcggaggtgaagaaaaatggacgcatttcgctcgtgttgggaggtgatcattcgttggctatcggatccatctccgggcacgcgagagtacaccccgatcttggtgtcatctgggtagacgcgcacaccgacatcaacacacccctgacgacaacttcggggaaccttcacggacagcctgtctcgttcctcctcaaggagcttaagggaaagattccggacgtaccgggattttcgtgggtgacgccctgtatctcagccaaggacattgtctacatcggtctgcgcgatgtggacccaggcgagcattacatcctcaagacccttggtattaagtacttctccatgacggaagtggacaggttgggtattggaaaagtcatggaagagactttgtcatacctcttgggccggaagaaaagaccgattcatctctccttcgacgtagatggacttgacccaagctttacgcctgccacggggacccctgtcgtaggtgggctgacatatagggaagggctctatatcacggaggagatctacaagaccggcttgctgtcggggttggatatcatggaggtgaatccttcactcgggaaaacacccgaggaagtgacgcggacagtgaacacagccgtggcgatcacgcttgcgtgcttcggactggccagggaagggaaccacaagccgattgactatttgaatccgcccaagtgataagctgccttctgcggggcttgccttctggccatgcccttcttctctcccttgcacctgtacctcttggtctttgaataaagcctgagtaggaag

SEQ ID NO: 382 - DNA, 969 bp, Artificial Sequence
  derived and/or modified sequence
atgtcagctaaatctagaaccataggaatcataggtgctcctttctcgaagggtcagccgcgtggcggcgtggaggaaggccccacagtcctgcggaaggccggcctgttggaaaagttaaaggaacaggagtgcgatgtcaaggactacggtgatctccccttcgccgatattccgaacgatagtccctttcaaattgtgaagaatcccaggtcagtgggcaaggccagcgagcagttggccgggaaagttgccgaagtcaaaaagaacggccggataagcctagtgttgggaggcgatcattccctcgctattgggtccatatctggacacgcccgcgtgcaccccgacctgggcgttatatgggtggatgcacacactgacattaatacgccactgaccacaacctcaggtaacctccatggacaaccagtgtcttttctcctcaaagagcttaagggcaagatccctgatgtgccaggattcagctgggtcaccccttgtatctccgctaaagacattgtatatatagggctgagagatgttgatcccggtgagcattatatcttgaagacgttaggtatcaaatacttctccatgactgaggtggaccgccttggcatagggaaagtgatggaggagacactttcttacctactgggcaggaagaagaggccaattcacctgtcgtttgatgttgacggactcgacccttccttcacaccagccaccggcacccccgtggttggcggactcacctaccgtgagggtctgtatattacagaagagatttataagacgggcctgcttagcggactggatattatggaggtaaacccctcccttggaaaaacacccgaagaggtgactcgcaccgtaaacactgccgtggcaattaccctggcctgtttcggactggcacgggaaggaaaccacaaacccatcgactacctcaacccacccaaatag

SEQ ID NO: 383 - DNA, 711 bp, Artificial Sequence
  derived and/or modified sequence
atgtcagctaagtcaaggacgatcggcatcatcggtgcccctttcagtaaaggccagccgcgcggcggtgtagaggagggtcccactgtactgaggaaggcagggttgctagaaaaattgaaggagcaggagtgcgacgtcaaagactacggagacctacccttcgcggacatcccaaatgactccccctttcagatcgtgaagaaccctcgaagcgtggggaaggccagcgagcagctggctggaaaggtcgcggaggttaaaaagaatggtcggatttcgctggttctcgggggcgaccatagtctggctattggtagcatcagcggccatgcccgcgtccaccccgatttgggggtcatttgggtggacgcccacacagacattaataccccgctgacgaccacgagcgggaacctgcatggacagcctgtctcattcttgttaaaggagctaaaaggaaagattcccgatgtgccaggcttttcctgggtcacaccttgtatctctgcaaaggatatcgtatacatcgggctgcgggacgtggatcccggtgaacattacatcctcaagaccctcggaatcaagtatttctcaatgacagaggttacccggacagtcaataccgcggtcgccatcactctggcttgttttggcctggccagagaggggaatcacaagccgattgattacctaaacccaccaaaatag

SEQ ID NO: 384 - DNA, 969 bp, Artificial Sequence
  derived and/or modified sequence
atgtctgccaagagcaggaccatcggcatcattggagcccccttcagcaagggccagccccggggcggcgtggaggagggccccaccgtgctgaggaaggccggcctgctggagaagctgaaggagcaggagtgtgatgtgaaggactatggagacctgccctttgctgacatccccaatgacagccccttccagatcgtgaagaaccccaggtctgtgggcaaggccagcgagcagctggccggcaaggtggccgaggtgaagaagaatggccgcatcagcctggtgctgggcggggaccacagcctggccatcggcagcatcagcggccacgcccgggtgcacccagacctgggcgtcatctgggtggatgcccacacagacatcaacacccccctgaccaccaccagcggcaacctgcacggccagcctgtgtccttcctgctgaaggagctgaagggcaagatcccagatgtgcccggcttctcctgggtgaccccctgcatcagcgccaaggacatcgtgtacatcggcctgagagatgtggaccccggggagcactacatcctgaagaccctgggcatcaagtacttctccatgacagaggtggaccggctgggcatcggcaaggtgatggaggagaccctgagctacctgctgggcaggaagaagaggcccatccacctgagctttgatgtggatggcctggaccccagcttcaccccagccaccggcacccctgtggtgggcggcctgacctaccgggagggcctgtacatcacagaggagatctacaagacaggcctgctgagcggcctggacatcatggaggtgaaccccagcctgggcaagaccccagaggaggtgaccaggacagtgaacacagctgtggccatcaccctggcctgcttcggcctggcccgggagggcaaccacaagcccatcgactacctgaacccccccaagtag

SEQ ID NO: 385 - DNA, 711 bp, Artificial Sequence
  derived and/or modified sequence
atgtctgccaagagcaggaccatcggcatcattggagcccccttcagcaagggccagccccggggcggcgtggaggagggccccaccgtgctgaggaaggccggcctgctggagaagctgaaggagcaggagtgtgatgtgaaggactatggagacctgccctttgctgacatccccaatgacagccccttccagatcgtgaagaaccccaggtctgtgggcaaggccagcgagcagctggccggcaaggtggccgaggtgaagaagaatggccgcatcagcctggtgctgggcggggaccacagcctggccatcggcagcatcagcggccacgcccgggtgcacccagacctgggcgtcatctgggtggatgcccacacagacatcaacacccccctgaccaccaccagcggcaacctgcacggccagcctgtgtccttcctgctgaaggagctgaagggcaagatcccagatgtgcccggcttctcctgggtgaccccctgcatcagcgccaaggacatcgtgtacatcggcctgagagatgtggaccccggggagcactacatcctgaagaccctgggcatcaagtacttctccatgacagaggtgaccaggacagtgaacacagctgtggccatcaccctggcctgcttcggcctggcccgggagggcaaccacaagcccatcgactacctgaacccccccaagtag

SEQ ID NO: 386 - DNA, 969 bp, Artificial Sequence
  derived and/or modified sequence
atgagcgccaagagccggaccatcggcatcatcggcgcccccttctccaaagggcaaccccggggcggcgtcgaagaggggcccaccgtgctgcgaaaggcaggcctacttgagaagctgaaggaacaagaatgtgacgttaaagactatggagatctgccattcgccgacatacctaatgactccccatttcaaatcgtaaaaaatcctagaagcgtcgggaaggcttcagagcaactggctgggaaggtggctgaagtcaaaaagaatggcaggatttccttagtactcggaggcgatcattctctggcaatcgggagcatcagcggacatgctcgagtacaccctgacttaggtgtgatttgggtggacgcccatacagatattaacactcccctgacaacaactagcggcaatttacacggccagccggtgtcatttctgcttaaggaactaaagggcaagattcctgatgttcctgggtttagttgggtgaccccgtgcatttctgccaaggatatagtctatataggacttcgtgatgtagaccccggcgaacactacatccttaaaacactagggatcaagtatttctctatgacggaggttgacagattggggattgggaaggttatggaagagacgctgtcttacctactgggaagaaaaaagaggccaattcacctctcttttgacgtcgatggtctagaccccagcttcacccctgcaacaggaacccctgtcgtgggtggtctgacttatagagagggactctacatcacagaagaaatttacaagacaggtctgcttagtggactggacataatggaggttaatccgagcctggggaagacgcccgaagaagttaccagaaccgtgaacacggctgtagccattactctggcctgctttggtctggccagggaaggtaatcacaagcccatcgattacctcaaccctcccaagtag

SEQ ID NO: 387 - DNA, 711 bp, Artificial Sequence
  derived and/or modified sequence
atgagcgccaagagccggaccatcggcatcatcggcgcccccttctctaaaggacagccaagaggcggggtcgaggagggtcccaccgtactgaggaaagccggcctgctcgagaaacttaaggaacaggagtgcgatgtcaaggattacggcgatctaccctttgctgatatcccaaacgacagccccttccaaattgtaaagaaccctcgatctgtgggtaaggcctccgagcagctggccggaaaggtcgcagaggtgaaaaagaatggccggatttctttggtactgggcggtgatcatagtctagctattggctctatcagcgggcacgctcgagtccatcccgatctgggtgtaatctgggtggatgctcacaccgatatcaacacacccctcaccactacaagtggcaacctccatggccagccagtgagcttcttattgaaggagctgaaaggcaaaatacccgatgtgcctggcttcagctgggtcaccccgtgtatttctgctaaggatatcgtgtatattggattgcgggacgtcgatccaggcgaacattacatactgaaaaccctcggaattaagtacttctctatgactgaagttacccgcactgtgaacactgcggtggccattaccctggcatgctttgggctcgccagagagggcaaccataagcctatagattatttgaacccccctaaatag

SEQ ID NO: 388 - DNA, 969 bp, Artificial Sequence
  derived and/or modified sequence
atgtcagctaagagtaggaccatcggtattattggagccccattctctaagggtcaaccgaggggtggcgtcgaagaaggcccaactgtgttacgcaaggccggattgctggagaagctgaaggagcaggaatgtgacgtgaaagattatggggatctcccgtttgccgacatccctaacgattctcctttccagatcgtcaagaatcctagaagtgtgggtaaagcctctgaacagctcgcaggcaaggtcgctgaagttaagaagaatgggaggatttctctggtgctgggaggcgaccattctctggctatcggctctatcagcggacatgcgagagtgcatcctgatttgggtgtcatttgggtggacgcccacacggatatcaatacacccttgaccacaacctcagggaacctgcacggtcaaccagtctcatttctgttaaaggagctcaaggggaagatccctgatgtgcccggattttcctgggtcacaccatgtatatccgccaaggacatcgtttacatcggcctccgcgacgttgacccaggggaacactatatcttgaaaaccctcggcattaaatatttttccatgactgaggtggacagactgggcattggaaaagtcatggaggaaaccctgtcctacctgttaggcagaaagaagaggcctatccacctctctttcgatgtagatggacttgatccctcctttacccccgctaccggcacgccggttgtgggcggattaacatatcgggaggggctgtatattaccgaagagatatataagacgggcttactgtctggcctggacatcatggaagtgaatccctccctgggcaaaacacctgaagaagtgactaggactgtcaacaccgccgtggccataacactggcatgtttcggtttggctagggagggaaaccacaagcccatcgattacctgaacccgcctaaatag

SEQ ID NO: 389 - DNA, 711 bp, Artificial Sequence
  derived and/or modified sequence
atgtcagcgaagtcacgaacaatcggcattatcggcgctcctttttccaagggccagcccagaggaggcgtggaagagggccctaccgtcttgaggaaggcaggactcctcgaaaagctgaaggaacaggagtgcgatgttaaggattacggggacctcccttttgcggacattccaaatgatagtccctttcagattgtaaagaaccccaggagtgtgggtaaggcctctgagcagttggcaggtaaggtggctgaagtgaaaaagaacggcagaatttctctggtcctgggcggtgaccactctctcgccatcggatctatttctgggcatgccagggtgcaccccgatctgggagtcatttgggtggatgcccacaccgatatcaatacaccactcactacaacatccggtaatctgcacggacagccagtgagttttttactaaaagaactgaagggaaaaatccccgatgttcccggttttagctgggtgacaccatgtatatccgcaaaggatattgtgtatataggcttgagagatgtagatcccggtgagcattacatcttaaaaaccttgggcatcaagtattttagtatgactgaagtgacgcggactgtcaataccgcagtcgccatcacacttgcctgttttggacttgccagagaaggtaatcataagccaattgattatttgaacccacctaaatag

SEQ ID NO: 390 - DNA, 966 bp, Artificial Sequence
  derived and/or modified sequence
atgtcagcaaagtccaggactatcgggataataggtgcacctttttcaaaaggtcagccgaggggtggggtcgaagaaggaccaaccgtgttgcgtaaagcagggctgctggaaaagctgaaggaacaagaatgtgacgtgaaggattacggcgatctgcctttcgcggatatccctaacgattcgccattccaaattgtcaaaaaccctagatcagtgggaaaggcaagcgaacaactggctggtaaggtggcagaggtaaagaaaaatggtcgcatctcgctggtcctgggaggcgaccactcccttgcgatcggttccatttccggtcatgcacgggtccatcctgatcttggggtgatttgggtggacgcccataccgacatcaacacccccctcaccactacctcggggaatcttcatggccaacccgtctcctttttgctcaaggagcttaagggtaagattcctgacgtgccgggcttttcgtgggtcaccccatgcattagcgccaaggatatcgtgtacataggacttagggacgtcgatcctggagagcattacattctgaaaaccctggggattaagtatttctctatgactgaggtggatagactgggtatcgggaaggtgatggaagagactctttcgtacctgctggggcggaagaagcgcccaatacatctttcattcgacgtcgacggtcttgatccttcgtttactccagctactggtaccccagtggtcggaggtcttacctaccgtgagggactgtacatcactgaagaaatctacaaaaccggtttgctgtcgggacttgacatcatggaggtgaacccatcgctgggcaagacgcctgaagaagtcactaggaccgtgaacactgcagtggcaattaccctggcatgttttggactggcgagagaagggaaccataagcctattgattacctgaaccctcccaag

SEQ ID NO: 391 - DNA, 966 bp, Artificial Sequence
  derived and/or modified sequence
atgtccgccaagagccggaccatcggaatcatcggagctccgttctcgaagggacagccacgcggaggcgtagaggaaggacctaccgtgctcagaaaggccggtctgctggagaagctgaaggagcaagagtgcgatgtgaaggactacggtgacctcccttttgcggatatcccgaacgactcaccatttcagatcgttaagaacccaaggtcggtcggaaaggcatcagaacaactggccggtaaggtggcagaggtgaagaagaatggacggatctccctcgtgctgggcggcgaccactccttggccatcggatccatctctgggcacgctcgagtccaccccgatctcggagtcatctgggtggacgcccacactgatatcaacactccattgaccactacctcaggaaatcttcatgggcagccggtgagcttccttctgaaggagctgaagggcaagatcccagatgtcccaggattctcctgggtgaccccatgtatcagcgctaaggacatcgtgtatattggcctccgggacgtggacccaggagaacactacatcctcaagacccttggcatcaagtatttcagcatgactgaggtcgacagactgggaatcggaaaggttatggaggaaaccctgagctatctcctgggtcggaagaaaagaccgatccacctctccttcgacgtggatgggcttgacccgtcgttcaccccggcgactggcactccggtcgtcggaggcctcacttacagggaaggactgtacatcactgaggagatttacaaaactggtttgctcagcggcctggacatcatggaagtgaacccatctctcggaaagactccggaggaggtgacgaggacggtgaataccgccgtggcgatcactctggcttgttttggcctggcgcgcgaaggtaaccataaacccatcgattacctcaacccaccaaaa

SEQ ID NO: 392 - DNA, 966 bp, Artificial Sequence
  derived and/or modified sequence
atgtctgccaaaagtagaaccatcggaattatcggagcgcccttcagcaaagggcaaccaaggggtggagtagaggagggaccaacggtcctgcggaaagcgggcctcctggagaaactgaaggaacaagaatgcgatgtgaaggactacggcgacctcccttttgcagacatccccaacgactcccctttccaaattgtcaaaaatcctagaagcgtcggcaaagcgtctgagcagctcgccgggaaggttgccgaggtgaagaagaatggccgaatctccctggtgttgggcggcgatcacagtctcgccattgggtccatatccggtcacgcaagagtgcacccagacctaggggtgatctgggtagatgcgcacaccgatatcaacactcccctgacgacgaccagcggaaacctgcacggccagcccgtgagctttctcctcaaggaactcaaaggcaaaatccccgatgtgcctggtttttcatgggtgacaccatgtatcagtgcaaaagacatcgtctacatcggactccgagacgttgacccaggcgaacactacatcctaaaaacattgggtataaaatacttctcaatgactgaggtggaccggctgggaattgggaaggtgatggaagagaccctgtcctacctgctgggacgtaaaaagcggcctattcacttgtcatttgatgtagacggtctcgaccctagttttaccccagccaccgggacacccgtcgtcggggggctgacatatagggaaggactttacattaccgaagaaatttataagaccggccttttgagcggtctggacataatggaggtaaatcctagcctcggcaaaacccctgaggaggtgaccagaaccgtgaacacagccgtggctatcactttggcatgtttcggcctcgcaagagaaggcaaccacaagccgatcgactacctcaatcccccaaaa

SEQ ID NO: 393 - DNA, 966 bp, Artificial Sequence
  derived and/or modified sequence
atgtcggccaagtcgcgcaccattggaatcattggggcgccgttctccaaaggccaacctcggggcggagtcgaagaaggaccaactgtccttagaaaggctggcctcctggagaaactgaaggagcaggaatgtgatgttaaggattacggagatctgccttttgccgatatcccaaatgacagccccttccagatagtgaagaacccacgctccgtaggaaaggcatcagagcagcttgctggaaaggtcgcggaggtgaaaaagaacggtcgaatttcgctcgtgctgggaggagatcactcgctggccatcggttcgatctccggacacgcacgggtccatccagatctgggtgtgatctgggtcgacgctcatactgacatcaacacccctctgactacgacctctgggaacctccatggccaaccggtcagctttctcctgaaagagctgaaaggcaagatcccagatgtcccaggtttctcatgggtgactccgtgcatctcggccaaggatatcgtgtatatcggactgagggacgtggacccgggggaacactacattcttaaaaccctcggcatcaaatacttctctatgaccgaagtcgaccggctcggtatcgggaaggtgatggaggagactctcagctaccttcttggacgtaagaaacgcccaatccatctgtctttcgatgttgacggactcgaccccagcttcacgccggcaaccggaacgcccgtggtgggaggactgacctacagagaaggactgtacatcactgaggagatctacaagaccggtctgctctccggactggatatcatggaggtgaatccaagcctggggaaaacgccggaggaagtgacccggaccgtgaacaccgccgtcgcgatcaccctggcttgcttcgggttggcgagggagggaaatcacaagccaatagactacctgaatccgccgaag

SEQ ID NO: 394 - DNA, 966 bp, Artificial Sequence
  derived and/or modified sequence
atgtccgcaaaatcccgcactatcgggatcatcggagccccattttcaaaaggacagccccggggaggggtggaagaaggacccactgtgctgcgaaaggctggactgctggaaaagctgaaagaacaggaatgcgatgtgaaagattacggagatctcccattcgcagatatccctaatgactccccattccagatagtgaaaaatcctaggtccgtgggaaaagcatctgaacagctggccgggaaggtggccgaggtgaaaaaaaacggaaggatctccctggtactcgggggagaccattcattggccatcgggtcaatctcagggcacgcaagagtgcaccccgatttaggagtaatctgggtcgatgcccatacagatataaacacaccccttacaactacttcaggaaacctccacggacaacccgtgtccttcttgctcaaagagctgaagggaaaaataccagatgtccccggattctcatgggtcacaccttgtatcagtgccaaagatatcgtctacatcgggctaagggatgtggatccgggagaacattatatactcaaaactttaggaataaaatatttttcaatgacagaagtggacaggctcgggataggaaaagtgatggaggaaactttgtcctatttgctcggacgaaaaaaaaggcctatacatttatctttcgatgtggacgggctggatccttcttttacaccagctactggaacacccgtggtgggggggctaacataccgggaggggttatatatcacagaagaaatttataagacaggacttctttcaggactcgatattatggaagtgaacccttcccttgggaagacaccagaggaagttacaagaacagtgaatactgcagtagccataacacttgcatgttttggactggctagggaagggaaccataaacctatcgattatctcaaccccccaaaa

SEQ ID NO: 395 - DNA, 966 bp, Artificial Sequence
  derived and/or modified sequence
atgagcgcgaagtcgagaaccattggaatcatcggagctccattctccaaaggacaaccaagaggcggtgtggaggaaggaccgaccgtcctcaggaaagccggactgctggagaaacttaaggagcaagaatgtgatgtgaaagattacggagatctcccattcgcagacatcccgaatgactcaccgtttcagattgttaagaacccgcggtccgttggtaaggcgtcagagcagctggcggggaaggtggccgaggtgaagaagaatgggcggatctccctggtgctcgggggtgaccacagcctggccatcggatccatatcaggacatgcccgcgtgcatccagatttgggagtgatctgggtcgatgcccacaccgatatcaacacgccgctgaccaccacctcgggaaacctccacggacagccagtcagctttctcctcaaggaactcaagggaaaaatcccggacgtgcctggattcagctgggtgaccccgtgcatctcggctaaggacatcgtatacatcggcctgcgcgacgtggatcctggggaacactacatcctcaagacgctcggaatcaaatacttctccatgaccgaggtggatagattgggaatcggtaaggtcatggaagagactctttcatatttgttgggacgaaagaagcgccctatccatctctcatttgacgtggacgggctcgacccgagcttcaccccagcgactggcactcctgtcgtgggcggcctcacttacagagagggtctttacatcactgaagagatctacaagactgggcttctgtcaggacttgatatcatggaggtgaacccgagcctgggaaagactccggaggaagtgactcgcactgtcaatacggcggttgcaatcactttggcctgcttcggacttgctcgcgaggggaatcataagccaatcgactatcttaacccgccaaaa

SEQ ID NO: 396 - DNA, 966 bp, Artificial Sequence
  derived and/or modified sequence
atgtccgcaaaatcgagaaccattggcattataggggctccgttcagcaaaggccagccacgagggggagtggaggaaggaccaaccgtgttgcggaaggcgggactcctcgaaaaactgaaggaacaagaatgtgatgtgaaggattacggagatctccctttcgcggacattcctaatgattccccatttcagattgtcaagaacccaaggtcggtcggtaaagcaagcgagcagcttgctggtaaagtggcggaagtgaagaaaaatggcaggatttccttggtgctgggaggcgaccactccctggccatcggttcgatttcgggacatgcacgtgtgcatcctgatttgggggtgatctgggtcgatgcccataccgacatcaacacccctcttactaccacttcgggaaatctgcatgggcaacctgtgtccttcctgcttaaggagcttaagggcaagattcctgatgttcctggtttttcctgggtcaccccttgcatctcggcaaaggacattgtgtacatcggactccgagatgttgatcctggtgagcattacatacttaagactcttggaatcaagtacttctccatgaccgaagtggacaggttgggaattggaaaagtgatggaggaaactctttcttacctgcttggtcggaaaaaacgccccatccacctctcctttgatgtggatggcctggatccgagctttacccctgccactgggacccctgtggtgggaggcctgacgtaccgagaaggactgtacattaccgaggagatttacaagactgggctgttgtcaggtcttgacatcatggaagtgaatccatcgttgggaaagactcccgaagaagttactcgcaccgtgaacaccgcagtggctataactctggcgtgtttcggacttgcgagggaaggaaaccacaagccgattgattaccttaaccctccaaag

SEQ ID NO: 397 - DNA, 966 bp, Artificial Sequence
  derived and/or modified sequence
atgtccgccaagagtcgaactattggaatcataggagcacctttctctaaagggcagcccagaggcggggtggaggaaggccccaccgtattaaggaaagccggcttgctagaaaagctgaaggaacaggaatgcgatgttaaggattacggcgacctaccatttgcggatattccgaatgatagcccttttcagatcgtaaaaaacccacgaagtgtgggcaaggcctccgaacagctcgcaggcaaagtggccgaagtcaagaaaaatggtagaatctctctggtgctgggtggggaccacagtcttgccatagggtccatttctggtcacgccagagtccacccggatctgggggtgatttgggtggatgctcacactgatatcaacacaccgcttacaaccaccagcgggaatctgcacggccagcccgtatcttttctgttgaaagagctgaaaggtaaaatccctgacgtaccaggttttagttgggtgacgccatgtatctcagctaaggatattgtttatataggcctgagggatgtggacccaggagaacactatattcttaagaccctggggattaagtatttcagcatgacagaggttgaccgactcggtatcggaaaagttatggaagaaactttgagctatttgttgggaagaaagaagcggccaatccacttaagctttgatgtcgatggcctggacccaagtttcacccccgccaccggcaccccagtggtggggggcctcacttaccgcgaaggcctctacattaccgaagagatctataagacaggcttactgagtggcctcgatatcatggaagtgaatccctccctgggaaaaacaccggaagaagtgactagaacagtaaacactgccgtggccatcacgctcgcttgcttcggtctagcacgagaggggaatcataagcccatagattacctaaacccacctaag

SEQ ID NO: 398 - DNA, 966 bp, Artificial Sequence
  derived and/or modified sequence
atgtcggccaaatcccggaccattggcatcatcggcgcccccttttccaagggccagcccaggggcggagtcgaggaaggtccgaccgttttgcggaaagccgggctgcttgagaaacttaaggaacaagaatgcgatgtgaaggactacggagatttgccattcgcggacatcccgaatgactccccgttccagatcgtcaagaacccccgctcagttggaaaagcctcggagcagttggcaggcaaagtcgctgaggtgaagaagaacggcagaattagcctggtgctcggaggggaccactccttggcgatcggaagcatcagcgggcatgccagggtgcatccagatctgggggtgatctgggttgacgcgcacaccgacatcaacaccccactgactactacttctggcaatcttcacggtcaacctgtgtcctttcttctgaaggaattgaagggtaagatccctgatgtgccaggattcagctgggtcacgccgtgcatctcggccaaggacatcgtgtacatcggcctccgcgatgtggacccaggggagcactatattctgaaaactctcggaattaagtacttctcaatgactgaggtggaccgcttgggaatcggaaaggtcatggaagagactctctcctacctgcttggtcggaagaaacggccgatacacctgtcattcgacgtcgatggtctggacccgtcgtttacccctgcaactggaactccggtcgtgggaggcctcacgtacagagaaggactctacatcaccgaggaaatctacaagactggtctgctgtctggactggatatcatggaagtgaaccctagcctcggcaagaccccggaagaagtgactcgtactgtgaatacggctgtggcaataaccctcgcttgtttcggtctggctagagaaggaaaccataagccgatagattacctgaatcccccgaag

SEQ ID NO: 399 - DNA, 966 bp, Artificial Sequence
  derived and/or modified sequence
atgagcgctaaatctaggacaataggaatcataggagcaccgttcagcaaaggtcagccccggggaggagtcgaagagggtccaaccgtgctccgcaaggccggtctgcttgaaaagctgaaggagcaggagtgcgatgtgaaagactatggggatctacccttcgcggacatccctaatgattcgccattccagattgtgaaaaacccacggagcgtggggaaggcaagcgaacagctggcaggtaaggtggcagaggtgaaaaagaatggtcgaattagcctcgttctgggcggggaccacagtctcgccatcggctccatctcaggccatgcgagagtgcaccccgatcttggggtcatctgggtggatgcacataccgatatcaatacgcccctgacgaccacatccggcaatctgcacgggcagccagtgtcctttctgcttaaagagctgaagggtaagatccccgatgttccaggtttcagctgggttaccccctgtatttccgccaaggatattgtctacatcggtttacgagacgtggatccgggtgagcactatatcctgaagaccctgggaattaaatatttttctatgacagaggtggaccggctcggaataggtaaggttatggaggagacactttcctacctgcttggtcgaaaaaagcgccctatccatctatccttcgacgtggatggattagacccaagctttactcctgctacgggcacccccgtcgtgggaggtctgacttatcgtgaaggactgtacatcactgaggaaatatataagacgggcttactctctggcctggacatcatggaagttaacccatcactgggcaagacgcctgaggaggtcacgaggaccgtaaacactgcagtggccatcaccttggcctgctttggcttagccagggaagggaatcacaaaccaatcgattacctgaacccgcccaag

SEQ ID NO: 400 - DNA, 966 bp, Artificial Sequence
  derived and/or modified sequence
atgtcggcgaaatcgcgtacgataggtataataggtgcgccgttttcgaaaggtcaaccgcgaggtggtgttgaagaaggtccgacggttctacgaaaagcgggtttattagaaaaactaaaagaacaagaatgtgatgtaaaagattatggtgatttaccgtttgcggatataccgaatgattcgccgtttcaaatagtaaaaaatccgcgatcggtaggtaaagcgtcggaacaactagcgggtaaagttgcggaagtaaaaaaaaatggtcgaatatcgctagttttaggtggtgatcattcgctagcgataggttcgatatcgggtcatgcgcgagttcatccggatctaggtgtaatatgggtagatgcgcatacggatataaatacgccgctaacgacgacgtcgggtaatttacatggtcaaccggtatcgtttttactaaaagaactaaaaggtaaaataccggatgtaccgggtttttcgtgggtaacgccgtgtatatcggcgaaagatatagtttatataggtctacgtgatgttgatccgggtgaacattatatattaaaaacgttaggtataaaatatttttcgatgacggaagttgatcgtttaggtataggtaaagtaatggaagaaacgttatcgtatttattaggtcgaaaaaaacgaccgatacatttatcgtttgatgtagatggtttagatccgtcgtttacgccggcgacgggtacgccggttgtaggtggtctaacgtatcgagaaggtctatatataacggaagaaatatataaaacgggtctactatcgggtttagatataatggaagttaatccgtcgttaggtaaaacgccggaagaagttacgcgtacggtaaatacggcggtagcgataacgctagcgtgttttggtttagcgcgagaaggtaatcataaaccgatagattatttaaatccgccgaaa

SEQ ID NO: 401 - DNA, 966 bp, Artificial Sequence
  derived and/or modified sequence
atgagcgcaaagtcccggaccatcgggatcattggtgcaccgttctctaagggccagccacgcggtggcgtggaggaggggcccactgtgctcaggaaggcaggcctgctggaaaagctgaaagagcaggagtgtgacgttaaagactacggcgacctgccgtttgcggatatcccgaatgactcaccttttcagatcgttaagaacccgaggtcagtggggaaggcgagcgaacaactcgccggtaaggttgcggaggtgaagaaaaatgggcgtattagcctggttctcggcggcgaccactccctggctattggctccattagcgggcatgctagggttcaccctgatctgggcgtcatctgggttgatgctcacactgatataaacactccactgacgaccacgagcggtaacctgcacggccagccggtttcttttctgttgaaagagctgaagggcaagattcctgacgtaccaggcttcagctgggttacgccgtgcatcagtgcgaaggacatcgtttacattggtctgcgagatgttgacccaggcgaacactacatcttaaaaacactcgggattaagtacttcagcatgaccgaagttgatcgcttgggtatcggcaaagtgatggaagagactttaagctatctgttaggtcgcaaaaaacgccctatccacctgagcttcgatgttgatggtctggacccgagcttcaccccggcgacggggacccccgtggtcggcggcctgacgtacagggagggcttatatatcaccgaagaaatctataaaactggcctcctgagcggtctggacatcatggaggttaacccatctttggggaaaaccccagaagaggtgacccgcaccgtaaatacggccgtggccatcactttggcctgcttcggattggcccgcgagggtaatcataaaccgatagattacctgaatccacctaag

SEQ ID NO: 402 - DNA, 966 bp, Artificial Sequence
  derived and/or modified sequence
atgagcgcaaagtcacgtacaattggcattatcggggctccatttagcaagggccagccccgtggcggagtcgaagaggggcccaccgtactgaggaaagccggcctgttggaaaagcttaaagagcaggagtgtgacgttaaagactacggcgatttaccctttgccgacattcctaacgatagcccttttcagatagtgaaaaatcctcgtagtgtgggaaaagcctccgagcaactggctggtaaagtcgcggaagtcaaaaaaaacggcaggatttcattggttttaggcggcgatcactccctggctataggaagtatttctgggcacgcacgcgttcaccccgatctcggagtgatctgggtcgatgcccataccgacatcaatacccctctgaccaccacttctggaaacttgcatggccagcccgtctcctttcttctgaaggagctgaagggcaagattccggatgtccccggattctcatgggtgaccccttgtatttcggcaaaggacatagtgtacattggattgcgcgatgtggatcctggcgaacactacatacttaagaccctggggatcaaatacttttccatgaccgaggtggatcgcctgggtattggtaaagtcatggaagaaacactcagctatctattgggcaggaaaaaaaggccaattcacctttccttcgatgtggatgggttggacccttctttcaccccagcaaccgggacccccgttgtggggggtctgacctacagagagggcctgtacattactgaggaaatctataagaccggcctgctttccggcctggacattatggaagttaacccgtctttaggcaaaactcctgaagaagttacaaggaccgttaatacggctgtagccatcaccttagcctgcttcggcctggcgagagagggcaatcataagcccattgactacctgaacccaccaaag

SEQ ID NO: 403 - DNA, 966 bp, Artificial Sequence
  derived and/or modified sequence
atgtccgccaagtccagaactattgggattattggtgcacccttttcgaaggggcagcctcgtgggggagtggaagaaggtcccactgtccttcgaaaggccggtctgcttgaaaagctgaaggaacaggagtgtgatgtgaaagattacggagatctgcctttcgccgacattcccaacgacagcccatttcagattgtcaagaatccccgcagcgtcgggaaggcatccgaacaactggcaggaaaggtcgccgaagtgaaaaagaatggtaggattagccttgtccttggtggagatcattcccttgcaatcgggtcgatttcaggccacgcgcgggtccacccggatcttggggtcatttgggtggacgcccacactgacattaacacgccactgactactaccagcggtaacctgcatggacagccagttagctttctgctgaaggaacttaagggaaagattccagacgtgcccggattttcctgggtcaccccatgcatctcagcaaaagacatcgtgtacattggtctgcgagacgtggacccaggagagcactacattctgaaaacccttggaattaagtacttctcgatgaccgaggtcgatagacttggcattggaaaagtgatggaagaaactctctcctaccttttgggacggaagaaaagacccattcatctttcttttgatgtggacggactcgatccatcatttacccctgctaccggtactccggtggtggggggacttacctacagggaagggctctacataaccgaagagatctataagaccggattgctgtcgggactcgacattatggaggtgaacccttcattggggaaaacccctgaagaagtgacccgcacggtgaacaccgcggtggctatcactctggcgtgtttcggacttgcgcgcgaaggcaaccataaacctattgattacctcaaccctccaaag

SEQ ID NO: 404 - DNA, 966 bp, Artificial Sequence
  derived and/or modified sequence
atgtccgcgaaatcaagaactatcggaataataggagctccattctcaaaagggcagccaagggggggagtagaagaaggacccactgtattgaggaaagccggattgctcgaaaaactgaaagaacaggaatgtgatgtgaaggattacggagacctgccgttcgcagatattcccaatgattctccatttcaaatagtgaaaaaccccaggtccgtgggaaaagcatctgaacagctcgcagggaaggtagcagaggtcaaaaaaaacgggaggatatctctagtgcttggaggagatcacagtctagctattgggtcgatctctggacacgcccgcgtgcatccagacctaggagtcatctgggttgacgcccatactgatataaacactcctttgactactacttctggaaacctacacggacagcccgtctccttcttgctcaaggagctgaaaggaaaaatccctgatgtgcctggattttcttgggtcactccttgtatctccgcaaaagatatcgtatacatcggactaagagacgtggatcctggggaacattatattctgaagactcttgggatcaaatatttctcaatgacagaagtggacaggctggggattgggaaagtcatggaagaaacactgtcgtatctactggggcggaaaaaaagaccaatccacctgtccttcgacgtcgatggactggatcctagttttacgcccgcaacaggaacacccgtggtgggaggactgacatatagggaaggattgtatataacagaagaaatctataaaacaggactcctgtctgggctcgatatcatggaagtgaatccctctctcgggaaaactccagaggaagtgacaaggacagtaaatactgctgtggctataacattagcttgtttcggactggccagggaagggaatcataaaccaatagattatttaaatccgcccaaa

SEQ ID NO: 405 - DNA, 966 bp, Artificial Sequence
  derived and/or modified sequence
atgtcagcgaagagccgcactatagggattatcggggcccccttttcaaaaggacagccacgcggaggggtcgaggaaggtcctacggtgttgagaaaggcggggttgctcgagaagctcaaagaacaggagtgtgacgttaaagactatggtgatctaccattcgccgacattccaaatgactctcctttccagattgtgaagaacccccgctccgtgggaaaggcctcagagcaactagccggaaaggtggcagaggttaaaaagaacggaagaatctcactggtcctcggcggcgatcacagtctggcgatcgggagtatttcgggacacgcccgagtacacccagatttgggtgtgatctgggtggatgcgcatactgacatcaatactcccttgacaacgacgtccggtaacctgcacggccagccagtctcattcctactgaaggagctgaaaggtaaaatccccgacgtgccaggcttttcgtgggtgacaccctgcattagcgccaaggacatcgtctatattggcctgagagacgttgatccaggggagcactacatcctgaagaccctcgggattaaatacttttcaatgactgaggtggaccgtcttggaattggcaaggtaatggaggaaactctctcatacttgctcggaagaaagaagaggcctatccacctgtccttcgacgttgacggactggaccccagctttacccccgcaaccggaacacctgtagtaggaggcttgacgtaccgagagggcctgtatattaccgaggagatttacaagacagggttgctgtcaggcctcgatatcatggaggtgaacccatccctgggaaagactcctgaagaagtgacacgcacggttaatacagccgtggctatcacccttgcctgctttggcctcgcgcgcgaagggaatcacaagcccattgattatctgaacccccctaaa

SEQ ID NO: 406 - DNA, 966 bp, Artificial Sequence
  derived and/or modified sequence
atgagcgcaaagagccgtacgatcggtatcatcggtgcacccttttcgaagggccagcctaggggtggtgtggaggagggacctactgtgctccggaaggcaggactgctggaaaagttgaaggaacaggagtgtgacgtcaaggactacggtgatctcccgttcgccgacataccaaatgattcaccctttcagatcgtgaagaatccacgttccgtgggcaaggcctcggaacaactggcaggtaaagtggctgaagtcaagaagaacgggagaatttctcttgtcctgggaggggaccattcgcttgcgattggcagcatcagcggacatgccagagtgcatcccgatctcggtgtcatttgggtcgatgcacacaccgacattaacacccctctgaccacgacttcaggcaacctgcacggccaacctgtgagttttctgctcaaggaacttaagggtaaaatccccgacgtgcccggattttcgtgggtgaccccttgtatctccgcgaaggatatcgtgtacatcggtcttagagatgtcgatcccggcgaacactatatcctcaaaaccctggggattaagtacttctcgatgacggaagtggataggcttggcattggtaaggtgatggaggaaaccttgagctaccttctgggcagaaagaaaagacctattcatctgagctttgatgtcgacggactggacccatctttcactcccgcaactgggactccagtcgtcgggggtcttacctaccgcgagggcctttacattactgaagagatatacaaaactgggcttctgagcggtcttgacattatggaagtgaaccctagccttggtaagaccccagaggaggtaactagaaccgtgaatactgcagttgcaattacgctcgcctgctttggactggctagggaggggaatcacaaacctattgactacctcaaccctcccaaa

SEQ ID NO: 407 - DNA, 966 bp, Artificial Sequence
  derived and/or modified sequence
atgtcagctaaaagtcgaacaataggtattattggagctccattttctaagggacaacctagaggtggtgtggaggaaggaccgactgtgctgagaaaagccggccttctcgaaaagcttaaggaacaagaatgtgatgttaaagattatggtgatcttcctttcgcagacattccgaatgacagcccattccaaatcgttaaaaaccccaggtcggttgggaaggcatcggagcaattggcaggaaaggtggctgaagttaagaagaacggccgcatatctctggtccttggaggtgaccattcgcttgcaataggcagtatctctggtcatgcgagggtacatccagaccttggtgtcatttgggttgacgcgcacacagatataaacacacccctgaccacaaccagcggtaatctgcacggtcagcctgttagcttcctgttgaaggaactcaaggggaagatcccagacgtcccaggttttagttgggttacaccttgtatatccgccaaagatatcgtttacatcggtctgagagacgttgatcctggcgagcattacattctgaaaactttggggattaaatacttttctatgactgaagttgaccggcttggtataggtaaggttatggaagagacgctctcttatcttttaggtaggaagaaacgaccgattcacctatcatttgacgttgacggcctcgacccaagctttacgccagcaacaggtacccctgttgtggggggattaacctaccgggaaggattgtacattactgaagagatatacaaaaccgggctgttaagcggacttgatattatggaagtgaacccttctcttggaaagacccctgaagaagttaccaggacagttaacactgcagtagccataaccctagcatgttttgggcttgcaagagaaggaaatcataaacctatcgattaccttaaccctccaaag

SEQ ID NO: 408 - DNA, 966 bp, Artificial Sequence
  derived and/or modified sequence
atgtcggcgaaaagcagaaccatcggcatcatcggtgcccccttcagcaagggccaaccgcgcggcggtgtcgaggagggacccacggtcctccgtaaagctggcctgctcgagaagttgaaggagcaggagtgcgatgtgaaggattatggagaccttcctttcgctgatataccaaacgactctcccttccaaatcgtgaagaacccccggagcgtcggcaaggcatccgagcagctggccggtaaggtcgccgaagttaaaaagaacggccggatctctctggttctgggcggagatcactcactcgccataggatctatcagcgggcacgctcgggtgcatcccgacttaggagttatatgggtggatgctcacacagatatcaatacccccttaactaccacttctggaaaccttcacgggcagcctgtctcttttttgctcaaagaactcaagggtaagatcccagacgtgccgggcttttcttgggtaactccttgcatatctgccaaagatatcgtttacatagggctgagagatgttgaccccggggaacactacatcttgaagacgctggggatcaagtacttcagtatgacagaagtcgatagactcgggatcgggaaagttatggaggagactctctcctatctgcttggaagaaagaaaagaccaattcacctctcttttgacgtcgacgggctcgatcctagctttaccccagctaccggcacgccagtggttggcggactcacttaccgagaggggctgtatatcacagaggagatttataagaccggactgctgagcgggcttgacattatggaggttaatccttcgctcggtaaaacacccgaggaggttactagaaccgtgaataccgcagtggcgattaccctggcgtgtttcggactcgcacgtgaaggaaaccataaacctatcgattacctgaatccacccaaa

SEQ ID NO: 409 - DNA, 966 bp, Artificial Sequence
  derived and/or modified sequence
atgtcagccaagtctagaacaataggcatcataggggcaccattttctaaaggtcagcccaggggcggggtagaagagggccccactgtgcttagaaaggccggtttactcgaaaaattaaaagaacaggagtgtgatgtgaaggattacggagatctgccatttgctgatattcctaacgatagccctttccaaatcgtgaaaaacccccgtagcgtaggcaaggcttctgagcagctcgcaggcaaagtcgccgaagtgaagaaaaatgggaggatcagcctggtgctcggtggtgaccacagcctcgcaatcggaagcatctccggtcacgcaagagtccaccccgatttgggcgtcatttgggtcgacgcccatacggacatcaacaccccactcaccacgacttctggaaacctgcacggccagccagtgtcgtttctgctcaaggaactgaaaggcaagatccccgatgtgcccggattcagttgggttacaccatgcatcagcgccaaagatattgtgtatataggacttcgggacgttgatccgggagagcactacatcttgaagactcttggaatcaagtacttttccatgaccgaagtggatcgcttagggattggcaaagtgatggaagagactctgagctatttattggggagaaaaaagcgcccaatacacttgtcctttgacgtggacggcctagacccttcctttactcctgcaactggcacacccgtggtcggcggcctaacttatagggagggtttgtatatcaccgaagaaatctacaagaccggactcctttcaggcttagatataatggaagtgaacccatcactgggcaagactccagaggaggtgacacggaccgttaacacggccgtcgctatcacgttagcttgttttgggctggctcgtgaggggaaccataaacctatcgattatcttaacccgcctaaa

SEQ ID NO: 410 - DNA, 966 bp, Artificial Sequence
  derived and/or modified sequence
atgagcgccaagtcacgaacgatcggtatcatcggcgcgccgttctccaagggacaaccccggggcggagtcgaggagggacctacggtgctcaggaaggccggcctgctcgagaagttgaaagaacaggagtgcgacgtgaaagattacggagatctgcctttcgccgacatcccaaacgacagcccgttccagatcgtgaaaaatccgagaagcgtgggaaaagcatcggagcaactcgccggcaaggtggcagaagtgaaaaagaacggacggatctcactggtgctgggcggagatcactcccttgccatcggttctatctccggacatgcacgggtgcatccggacctcggagtgatatgggtggatgctcacactgacatcaatactccgctcaccaccactagcgggaaccttcacggacagccagtctccttcctgctcaaagaactcaaaggaaagatccctgacgtgcctgggttttcatgggttacgccatgtatctcagctaaggacatcgtgtacattggtctgcgggatgtcgatccgggcgagcactatattctcaaaactctgggaatcaagtacttcagtatgactgaggtcgacagactgggaatcggcaaagtgatggaagaaaccctgagctacctgctgggaaggaaaaaacggccgatccatctgtcgttcgacgtggatggccttgatccgtcgttcaccccggccacgggaaccccggtggtgggcggcctcacgtatcgcgaaggactttacatcactgaagagatctacaagactggcctgctctcgggtctggatatcatggaggtgaatccaagcctcggcaagacccctgaagaagtcactcggactgtcaacacggccgtcgcgattacgttggcttgcttcggcctcgcgagagagggtaaccacaagcctatcgattacctgaacccgccgaag

SEQ ID NO: 411 - DNA, 966 bp, Artificial Sequence
  derived and/or modified sequence
atgtctgctaagtccaggaccatcggaataatcggagcacctttctccaagggccaaccacggggaggagttgaagagggccctaccgtactcagaaaggcaggcctgttggagaagctcaaggaacaggaatgcgacgtcaaggattacggcgatcttccattcgcagatatacctaatgattctccctttcagatagtgaagaacccaagaagcgtggggaaagcgagcgagcaactggccggaaaggtcgctgaagtcaagaagaacggcagaattagcctggtcctcggaggagaccactccttggcaatcggaagcatatccgggcacgctagagtacatcctgatctcggagtaatctgggtggatgcacataccgacattaatacaccacttaccaccacttctggcaacctacacggccagcctgttagctttctgctcaaagaactgaagggaaagataccagatgttccgggcttttcatgggtgaccccttgtattagcgctaaggacatcgtttacatcggactacgggacgtcgatcctggagaacactacatccttaaaaccctgggcattaagtacttctccatgaccgaggtggatcgcctgggtataggcaaagtgatggaggagactctttcctacctgcttgggcggaagaagcgcccgatccaccttagcttcgacgtagacggcctggaccctagctttacccctgctaccggcacccccgtcgtgggtggattaacctacagagaagggctgtacataaccgaggagatctataaaaccggcctcctaagtggattagatatcatggaggtgaacccctcactgggcaagacccccgaggaagtgaccaggacagtcaatacagccgttgcaattactctggcttgcttcggtcttgcaagagagggtaatcacaagcctatcgattaccttaaccctccaaaa

SEQ ID NO: 412 - DNA, 966 bp, Artificial Sequence
  derived and/or modified sequence
atgagcgctaagtcgcggactattgggatcatcggtgcaccgttctcgaaagggcaaccacggggaggagtcgaagaagggcctacggtcctgcgcaaagccggcctgctggaaaagttgaaagaacaagagtgcgatgtgaaggactacggcgatctgccgttcgcggacatcccgaatgactcgcctttccagattgtgaagaacccgagatcagtcggaaaggcttccgaacagctcgccggaaaggtggctgaggtgaagaaaaacggccgaatttcgctggtccttggcggcgaccactccctggctatcggctcgatctcaggacacgcgcgggtgcacccagacttgggggtgatctgggtggacgcgcacaccgatatcaacactcccctgaccactacctcaggaaatctgcatggacagccagtgtcattcctgctgaaggaactgaagggaaagatcccagacgtgccaggattctcatgggtgacgccgtgcatctcggcgaaagacatcgtgtacatcgggctccgcgacgtcgacccaggcgagcactacatcctcaagacccttggcatcaaatacttctccatgactgaggtcgaccgcctcggtatcggaaaggtgatggaggaaacgctgagctacctgctgggtcggaagaagcgaccgatccatctttcatttgatgtggacgggctggatccctccttcactcctgcgaccggaactccagtggtgggcggactgacctaccgcgaaggtctgtacatcactgaagagatctacaaaacggggctgctgtcaggacttgacataatggaagtgaatccgtcactcggaaaaactccggaagaggtgactcgcactgtcaatactgccgtggctattactctggcttgtttcggactcgccagagaaggtaaccacaagccgatcgattacttgaaccccccaaag

SEQ ID NO: 413 - DNA, 966 bp, Artificial Sequence
  derived and/or modified sequence
atgagcgcaaagtcaaggaccataggaataatcggtgcacccttttcgaagggacaaccacgtggtggagtcgaagagggacctaccgtgctgagaaaagccggactgctggaaaagctgaaggaacaagaatgtgatgtcaaggattatggtgatcttcctttcgcagacattccaaacgattcgccatttcagatcgtcaagaatccgagatccgtcggcaaggcatccgagcaacttgccggtaaagtggctgaagtcaagaaaaacgggaggatctcccttgtgcttgggggcgaccattctctggcaattgggtcgatctccggccatgcacgtgttcatccggatctgggggtgatttgggttgacgctcacactgatatcaacactccacttactaccacttccggaaaccttcacggtcagccagtgtcatttcttctgaaggaactcaagggtaagatcccagacgtgcctggattctcctgggtgaccccgtgtatctcggcaaaagatattgtttacattgggcttcgtgatgtcgacccaggggaacactacattctcaagactcttggtattaagtacttttcaatgaccgaggtggatcggcttggcattggcaaggtgatggaggaaactctgtcctacctgttggggcgaaaaaagcgccctattcatctctcattcgatgtggatggacttgatcctagcttcaccccagcaactgggacgccagtggtcggtggattgacgtacagggaaggactgtacatcaccgaagagatttacaaaaccggtctgctgtcgggacttgacatcatggaagtgaacccatcgctgggtaagactccagaagaggtgactaggaccgtgaacaccgcggtggcaattacccttgcttgctttggcctcgcaagagagggaaatcacaaacccattgattacctgaacccccctaag

SEQ ID NO: 414 - DNA, 966 bp, Artificial Sequence
  derived and/or modified sequence
atgtccgcaaagtcgcgcaccataggaatcataggagcacccttttctaagggacaaccgcgaggaggggttgaggaaggtcctactgtccttcgaaaggccggactgcttgaaaagttgaaggaacaagagtgcgatgtgaaggactacggagatctgccttttgcagacattccaaacgactcccctttccaaattgtcaaaaaccccagatcagtgggaaaagcatcggaacaactcgccggtaaggtcgcggaggtcaagaaaaacggaagaatctcattggtcctggggggcgaccatagcctcgccattggatcgatctcaggccatgctagggtgcatccagacctgggagtgatctgggtggatgcacacaccgacatcaatactccccttaccacgaccagcggtaatctgcatgggcagccagtgagctttctgcttaaagaactcaagggcaagattcccgatgtccctgggttttcatgggttactccatgtatatccgccaaagatattgtctacataggccttcgagacgtggatcctggagagcactacatcctgaaaaccctcggtatcaaatacttttcgatgaccgaggtcgacagactcggaattggaaaggtgatggaagaaactctctcgtatcttcttggacgcaagaaaagaccaattcaccttagttttgacgtggatggactggatccatcgtttactccagcaactggaaccccggtggtgggcggactgacctaccgcgaaggcttgtacatcaccgaagagatatacaaaactggactcttgtcggggcttgatatcatggaagtcaatccttccctgggtaagacgccggaagaagtgactcgaaccgtcaacaccgccgtggcaattacccttgcatgtttcggactggctcgcgagggcaatcataaacctatagactacctgaatcctccgaaa

SEQ ID NO: 415 - DNA, 966 bp, Artificial Sequence
  derived and/or modified sequence
atgtctgccaagtcccgtactatcggcataatcggcgctcccttcagtaagggccagccaaggggcggcgtagaagaagggccgaccgtgctcaggaaagcaggtctccttgagaagttgaaagagcaggaatgcgacgtaaaagactatggagatttgccatttgccgacatccctaatgactcccctttccagatcgttaaaaatcctcgttccgtcggcaaggcttcagagcagctggctggcaaggtcgcagaggtgaagaagaacggtagaatctcccttgtgctaggtggagatcatagcctggcaattgggtccatctcaggacatgcaagggtacaccctgatcttggggtgatctgggtggacgcgcacaccgacattaacacccccctgacaaccacgagcggaaatctgcatggccagcctgtctcctttctactgaaggagctaaagggaaaaatccccgacgtgcccggcttttcctgggtgacaccttgcatctcagccaaagacattgtttacatcggactgagagacgtggaccctggcgagcactacattttgaaaacgttgggcatcaaatacttcagtatgaccgaggtggaccgtcttgggatcggtaaggttatggaggagactctgtcttatttgctcggacgtaaaaaacgcccaattcatctgagctttgacgtcgatggcctggaccccagtttcacaccggctactgggacgcctgtagtgggggggttgacttaccgggaagggctgtacattaccgaggagatatataagaccggcttgctgtctggcctggacatcatggaggtgaacccctctctggggaagacccccgaagaagtgacacggacggtgaatactgcagtcgctatcaccctcgcgtgttttggactagcgcgtgaggggaaccataagccaatcgactacctgaatccaccgaag

SEQ ID NO: 416 - DNA, 966 bp, Artificial Sequence
  derived and/or modified sequence
atgtccgccaagtcccgcactataggcattatcggtgccccattctccaaaggccaaccccgtggcggagtcgaggaaggccccacagtattgcgtaaggctggcctcctcgagaaactgaaggaacaggaatgcgatgtgaaggactatggagatctgccatttgccgatatcccaaatgacagtcctttccagatcgtgaagaatccacgctccgttggcaaggctagcgagcagctcgcaggaaaagtggctgaagtcaaaaagaacggccgcatctccctcgttctgggtggtgatcacagtctggccattggatccatctctggacacgccagagtgcaccctgacttgggcgttatatgggttgacgcacatactgacatcaacaccccactgacaacaaccagtggtaatttgcatggacaacctgtttccttcctgctgaaagaactcaaaggcaaaatacctgatgtccccggtttctcatgggttactccttgcatctccgctaaagatatcgtgtacattggtctccgcgacgtggaccctggtgaacactatatcctcaaaacattgggcattaagtacttttcaatgaccgaggtcgaccgccttggtataggtaaggttatggaggagaccttgagttatctgttgggcaggaagaagcgcccaatccacctctctttcgacgtggacggcctggatccctctttcactcctgccaccggcactccagtcgtgggtggcctgacttatagggaaggactgtacattaccgaggaaatctataagactggtcttctttccggcctggacatcatggaagttaacccttctctcggcaaaacaccagaagaggtcacccgcactgttaacactgcagtggctatcaccctcgcttgctttggcctcgcccgcgagggtaatcataagcctattgactacctgaacccaccaaag

SEQ ID NO: 417 - DNA, 966 bp, Artificial Sequence
  derived and/or modified sequence
atgagtgctaaatcccgcacaatcggcatcatcggggcaccctttagcaagggacagcccagaggcggcgtggaagagggccctacagtgctcaggaaagcaggcctgctggagaaacttaaggaacaggaatgtgacgtaaaggattacggcgatctgccattcgccgatattcccaacgacagcccctttcagattgtcaagaatcctaggagcgttggtaaggcctcagagcagctggcaggcaaggtggcggaggtgaagaaaaacggaagaatcagtctggtgctcggaggtgatcacagcctcgccatagggagcattagcggacatgccagggtgcaccctgacctcggtgttatctgggttgacgctcataccgatatcaatacccccctgactacaacttctggcaatctccatggccagcctgtgtcattcctcctgaaagaactcaaaggcaagatcccagatgtgccaggtttctcttgggtcacgccctgcataagtgcaaaagatatcgtttatatcggcctgagagacgttgacccaggtgagcactacatccttaagaccctgggcattaagtacttcagcatgacagaggtggaccgactgggcatcggcaaagtcatggaggagaccctgagttacctgcttggacgcaaaaagcgccccatccacttgagcttcgacgtcgatggcctggacccttccttcaccccggccaccggaacacccgtggtaggcggcctcacttatcgcgaaggtctctatatcacagaggaaatttacaaaaccgggctgctgtcaggcctggacatcatggaggtgaacccgtcactgggcaaaacccctgaagaggtaacaagaacagtgaacactgcagtcgcaattacactggcgtgctttggtcttgcccgggagggaaaccataaacctatagattacctgaatcccccaaag

SEQ ID NO: 418 - DNA, 966 bp, Artificial Sequence
  derived and/or modified sequence
atgagcgccaaaagccggaccataggcataatcggagcccctttttctaaaggacaacccagaggcggagtggaagaaggccccaccgttctgcggaaagccggactgctggaaaagctgaaggaacaggaatgtgacgtgaaggactacggagacttgcctttcgccgacatccctaacgatagcccatttcaaatcgtgaagaacccacgctctgtaggtaaggcaagcgaacagttggccggcaaagtggccgaagttaagaagaacggaaggatctcacttgtccttggcggcgaccacagtctggctatcgggtccatcagcgggcatgccagggtccaccctgacctgggcgttatctgggtggacgctcacacggatatcaacaccccccttaccaccacatctggaaaccttcacggccagcctgtcagctttctcctcaaggaactgaagggaaagatccccgacgtgccgggctttagttgggtgacgccttgcatctctgccaaagatatcgtttacatcggattgcgcgatgtcgatccaggagaacactatattctcaagacccttggaatcaaatacttctctatgaccgaggtggatcgcctgggcatcggcaaggtgatggaagaaacactcagttatttgctaggacgcaaaaaaagaccaatacacctctcctttgacgtagacggtctggatcctagctttaccccagctactgggaccccagtagttggcgggctgacctacagggaaggactctacatcacagaagaaatctataaaacaggactgctgtcggggcttgacatcatggaggtgaacccctctcttgggaagacacctgaagaagtgacccgaaccgttaatacagctgtggccattactcttgcttgtttcggactcgctagagaagggaaccacaaacctatagattaccttaatcctccgaag

SEQ ID NO: 419 - DNA, 966 bp, Artificial Sequence
  derived and/or modified sequence
atgtcagcgaagagccggactatcggcatcattggagctccattctcgaaaggacagccacgcggaggagtggaggaaggccccaccgttttgaggaaagcgggattgcttgagaagttgaaggagcaggagtgcgatgtgaaggattacggtgatttgccatttgccgacatccccaacgactcaccattccagatcgtcaagaacccccggtccgtgggaaaggcgagcgaacagttggcgggaaaggtggccgaagtgaagaaaaacggtcgcatcagccttgtcctcggcggagatcattcgctcgcgatcggcagcatcagcggacacgcgagagtgcaccccgacctgggcgtgatctgggtcgacgcacacacggatatcaatacgcctttgactaccacctccggaaacctgcatggacaacctgtctctttcctgctgaaagagcttaagggaaagatcccggacgtgccgggcttctcatgggtcacgccatgcatcagcgcgaaggacatcgtgtacataggactgcgggatgtggaccccggagaacactacattctgaaaaccctgggaatcaaatacttttcgatgactgaagtggaccgcctcggaattggcaaagtgatggaagaaactctgtcgtatctgcttggacggaaaaagaggccgatccacctgtcgttcgacgtggacggactggacccgagcttcactccagccaccggaaccccggtggtgggaggcctgacctacagagaaggactgtatatcaccgaggagatctacaagactggactgctgagcgggctggatatcatggaggtcaacccgagcctgggaaagactccggaggaagtcaccaggactgtgaataccgcggtcgcaatcactcttgcttgctttggcctggcccgcgaaggtaatcataaacctattgactacctcaacccgccgaag

SEQ ID NO: 420 - DNA, 966 bp, Artificial Sequence
  derived and/or modified sequence
atgagcgccaagtcccgaactatcgggatcattggagcgccgttctcaaaagggcaaccacgcggaggagtcgaggagggaccgaccgtcctcagaaaggcaggcctgctggagaagctgaaagagcaggagtgtgacgtgaaagattacggggatctgccattcgctgacattccgaatgattcgccgttccaaatcgtgaagaacccgcggtcggtggggaaagcaagtgagcagctggccggaaaagtggcggaagtgaaaaagaacggaaggatctcgctggtgctcggcggggaccactctctggcaatcggctctatcagcggccacgcccgcgtgcacccggacctcggggtgatatgggtcgatgcgcacaccgacatcaatacccctctgacgactacctcaggcaacctccacggtcaaccagtctccttccttctgaaggaactgaagggaaagatccccgacgtccctggattctcctgggtgaccccgtgcatctcagcgaaagacatcgtctacatcggcctccgggatgtcgatccgggggaacattacatcctcaagaccctgggaatcaagtacttctcaatgactgaggtggatagactgggaatcggaaaagtgatggaagagactctgagctacctgctgggccgcaagaagcggccaattcatctgtcctttgacgtggatggactcgacccctcgttcactccggcaaccggaaccccggttgttggcggactgacctaccgggaaggactgtacatcactgaggaaatctataagaccggactcttgtccgggctcgacattatggaggtcaatccatccctcggcaagacgccagaggaagtcacccgcacggtcaacactgccgtcgctattactctcgcttgtttcggcctcgcaagagagggaaatcacaagcctattgattacttgaacccgccaaag

SEQ ID NO: 421 - DNA, 966 bp, Artificial Sequence
  derived and/or modified sequence
atgagtgccaaatctcgtactattgggatcatcggggctccattctctaagggccaaccacgcggcggggttgaagaaggccccaccgttctcaggaaagctgggcttttggaaaagttgaaggagcaagagtgcgacgtaaaagactacggcgacctcccttttgccgacattcccaatgattccccattccagatcgtaaagaatcccagatccgtgggaaaggcatctgaacagctagcaggaaaagtggccgaggtcaagaagaatgggcgaatctccctcgtgcttggcggggatcactctttggccataggcagtatttctggacacgcccgcgtgcatccggatttgggagtgatttgggtcgacgcacacacggacattaacacaccactgactaccacaagcggaaacctccatggtcagcccgtgtcttttctgctgaaggagctcaaagggaaaatccccgatgttcccgggttttcctgggtgacgccttgtatatccgctaaagatatagtctatatcggactaagggacgtcgaccctggagaacattacatcctgaagaccctgggaatcaaatacttctctatgaccgaggtcgatagactcggtataggcaaagtcatggaggaaaccctttcgtacctactcggaaggaaaaaacgaccaattcaccttagcttcgatgtcgatggcttagacccttcattcactccggcaactggaacgccagtcgtggggggactgacctacagggaaggtctctatatcacagaggaaatatacaagaccggcctcctcagcggtttggatattatggaggttaatcccagcttggggaagacacccgaagaggtgacacggaccgtaaataccgccgtggccataactctggcttgtttcggtctcgcacgtgaggggaaccacaagcctatcgattatctcaatcccccaaag

SEQ ID NO: 422 - DNA, 966 bp, Artificial Sequence
  derived and/or modified sequence
atgagtgcgaaaagccgcactattggcataatcggagctcccttcagcaaggggcaacccagaggaggcgtagaagaggggcctaccgtgctcagaaaagcaggactgctcgagaagttaaaagaacaggaatgcgacgtaaaggactacggagatctccctttcgctgatattcccaacgatagcccattccagatcgtgaaaaacccacgcagcgtaggtaaggcctcagaacagctcgcaggtaaggtggcggaggttaagaagaacggtagaatcagcctagtcttgggtggagaccacagtctggctatcgggtctatttcaggtcatgccagagtccacccagacctgggggtcatatgggtggacgctcacacagatatcaacacccctctgaccaccacatctgggaacctacacggccagcccgtgtccttcctcttaaaggagcttaaaggaaagattccggacgttccaggattctcctgggttaccccctgcatctctgcaaaggatattgtgtatataggtctccgtgatgttgacccaggcgaacactatattctgaagactctgggcatcaagtatttttctatgaccgaggtggataggctggggatcggcaaagttatggaggagactctaagttatctgctggggagaaagaaacgtcctatacacctgtcattcgatgtagatgggctggatcccagctttactcctgcaaccggaacaccggtcgtaggaggcctcacatatagggagggactctacattacagaagaaatttataagacgggcctcctgagcggcttagacataatggaggtaaatccttcactgggcaagacccccgaagaggtcacacgaacagtgaacaccgccgtcgccattaccctggcgtgctttgggctggcccgtgaaggaaaccataagccaattgattacttgaatccccctaag

SEQ ID NO: 423 - DNA, 966 bp, Artificial Sequence
  derived and/or modified sequence
atgtcagctaagagcagaacaatcgggatcattggggcccccttttcaaaggggcagcctagaggcggtgtagaagagggccctaccgtcctgagaaaagctggcctcctcgagaaactgaaggaacaagagtgcgatgtcaaggattatggtgatctaccattcgcagatattcctaacgactcacctttccaaatcgttaaaaacccacggagtgttggcaaagcctccgaacagctcgccggaaaggttgctgaagtgaagaagaacggccgaatctctctggtgctcggcggcgatcactcccttgcaatcggtagtattagcgggcatgcaagagtgcaccctgatctgggcgtcatctgggtggatgcccatacagacattaatacgccactgacaaccacaagtggcaatcttcatggacagcccgtgagctttctgctgaaggagctgaaaggaaagatccccgacgttcccgggtttagctgggttactccctgtataagcgctaaggatatagtttatatcggtcttagggatgtagacccgggagagcactatatcctcaaaacgctagggattaagtacttttctatgaccgaggtcgaccgactgggcattggaaaagttatggaggagacgctttcatatctcctcggaaggaagaagagaccaatccatttatccttcgacgtcgacggcttagatccttctttcacccccgcgactggtacaccagtggtcggcgggcttacgtaccgggaggggctctacataacagaagaaatctacaagacagggttgctttctggccttgatattatggaggtgaacccctccctcggtaaaactccagaggaggttacgcgcacagtgaataccgcggttgcaataaccctggcctgttttggcctggcacgcgaaggcaatcataagcccatcgattacctgaatccccctaaa

SEQ ID NO: 424 - DNA, 966 bp, Artificial Sequence
  derived and/or modified sequence
atgagcgcaaagagtagaactatcggcattatcggagcgccattttctaagggtcagcctagaggaggagttgaggagggccccaccgtactgcggaaggccggccttcttgagaaactgaaggaacaagagtgcgacgttaaagactatggggatctgccctttgcggacatcccaaatgatagtccctttcaaatcgtcaagaatcctagatctgttggcaaggcctcagaacaactcgctgggaaggtggcagaggtaaaaaagaacgggagaataagccttgttctggggggggatcattctctggccataggaagtatttctgggcacgcccgggtacaccccgatctgggcgtgatatgggtggacgctcatacagacatcaacaccccactgactacaaccagcggtaacttgcacgggcagcctgtgtccttcctcctgaaggagctgaagggcaagattccagacgtcccgggcttcagttgggttacaccttgtatctctgctaaggacatcgtttatattggcctgcgagacgtggatccgggtgagcactatatccttaaaactttgggcattaagtactttagtatgactgaggtcgatcgacttgggatcggcaaagtcatggaagagacgctctcttaccttctgggccggaagaaacggccaatccatctctccttcgatgtcgacggtctggatcctagctttacccccgctacgggcacgccggtggtcggggggctcacgtacagagaaggcctttacatcaccgaagaaatctataagactggactcttgagcggtctggacatcatggaggtgaatcctagcctcggaaagactcctgaggaagtgacaagaacagtgaacacagccgtagcaatcaccctggcgtgcttcggcctggctagagaggggaatcataaaccgatcgactacttgaatcccccgaaa

SEQ ID NO: 425 - DNA, 966 bp, Artificial Sequence
  derived and/or modified sequence
atgagcgccaagtctagaactattggaataattggagcccctttttctaagggccagccccgcggaggcgtcgaagaaggcccaactgtcttgaggaaggccgggctgctcgagaagctcaaagagcaagagtgtgacgtgaaagactatggagatttgcccttcgccgacatacccaatgattcacccttccaaatagtcaagaaccccaggagcgtcggcaaagcatctgaacagctcgcaggcaaggtagccgaggtgaaaaaaaatggcagaatttctctggtgctgggcggtgatcactcactggctattgggtcgatcagcgggcatgccagagtgcatcctgatctgggagtgatctgggtggatgcgcacacagacataaacactcccctgaccactacatcaggcaacctccacggccaacccgtgagttttttactaaaggagctgaaggggaagattccagacgtccccggattctcttgggttaccccctgcatctctgcaaaggacatagtgtatatagggttgcgcgatgtcgaccctggtgagcactacattctaaagactctgggcatcaaatacttttccatgacagaggtggataggttgggcattgggaaggtaatggaggaaacccttagctatctgctgggccgcaaaaaaagaccaatccacctctcgtttgacgtggatgggcttgacccctccttcacgccagctactggaacaccagtggttggcggactgacataccgggagggcctctacataaccgaagagatctacaagacaggactgctgagcggcctcgatattatggaggtgaacccctccttgggtaaaactccagaggaagtcactaggacagtgaatacagccgtggcgatcacgctagcatgcttcggcctggcacgggagggcaatcataaaccaatcgattacctcaatccccccaaa

SEQ ID NO: 426 - DNA, 966 bp, Artificial Sequence
  derived and/or modified sequence
atgtcagcgaagtcacggactatcggaatcatcggagcacctttctccaaaggccagccgaggggaggggtggaagaaggacccaccgtgctcagaaaggcgggactccttgagaagctcaaggagcaggaatgtgacgtgaaagactacggagatttgccgtttgcggacatccccaacgactccccgttccaaatcgttaagaatccacgcagcgtggggaaagcctcggaacagctcgcagggaaggtcgccgaggtgaagaagaacggacgcatctccctggtcctcggtggcgaccactcgttggccattggctcgatctctggacacgcccgcgtgcaccctgatctgggggttatctgggtggatgcccacaccgacatcaatactccgctcactaccacgagcgggaacctgcatggacaaccggtgtcatttctgctcaaagaactcaagggtaagatcccggacgtaccaggattttcgtgggtcaccccttgcatttccgcgaaggacatcgtgtacattggactgcgagacgtggatccaggagagcattacatccttaagaccctgggcatcaaatacttctcgatgactgaagtggacagattgggaataggcaaggtgatggaggagactctctcctacctgctgggacggaaaaagcggccgatccacctgagcttcgatgtcgatggacttgatccttcgttcaccccggctactggaacgccagtggtgggtggcctgacctaccgggagggtctgtatatcaccgaagagatctacaagactggactgctgagcggcctggacattatggaagtcaacccgtcactgggcaagaccccagaagaggtgactagaaccgtcaacactgctgtcgcaatcaccctggcttgcttcggtttggcccgcgaaggcaaccataaaccaatcgattacctgaatccgcccaag

SEQ ID NO: 427 - DNA, 966 bp, Artificial Sequence
  derived and/or modified sequence
atgtcagcaaagtcacgcaccattggaataatcggagctcctttctcaaagggacagccccgaggtggcgtcgaagagggccctactgtgctgagaaaggcaggattgctggagaagctgaaagagcaagaatgtgatgtgaaagactacggggatcttccatttgcggacattcctaacgattccccttttcagattgtgaagaacccacgttcggtgggcaaggcttccgaacaactcgcaggtaaagtggcagaggtgaagaagaatggtcgtataagcctggtgcttggcggggatcattccctggcaataggatctatctcgggacacgcacgtgtgcatcccgatctgggagtgatctgggtggatgcacacaccgatatcaatacccctctcaccaccacgtcaggaaacctccatggacaaccagtgtcctttctgctgaaggaactgaagggaaaaatcccggacgtccctggattctcctgggtgacgccatgtatctccgccaaggatattgtgtatattggactgagagatgttgatcctggcgaacactacattctcaagacccttggcatcaagtacttttccatgaccgaggttgatcgtcttggcattggaaaggtgatggaggagactctgagctacctgctggggcgaaaaaagcggcctattcatctttcgttcgacgtggatgggcttgacccctcattcaccccagcaacgggaaccccagtcgttggtggtctgacctacagggaaggcctgtacattactgaagagatttacaagaccggcttgctctccggattggatatcatggaagtcaatccctcccttggaaagacccctgaagaggtgaccagaactgtgaacactgctgtcgcgataactctggcatgcttcggcctcgcccgcgagggaaaccacaagccaattgattatctcaatccaccaaag

SEQ ID NO: 428 - DNA, 966 bp, Artificial Sequence
  derived and/or modified sequence
atgtccgctaaaagccgaactatcggtattatcggtgcacctttctcgaaggggcaacctcgcggcggcgtcgaagagggacctactgtgctccggaaggccggtttgcttgagaagctgaaggagcaggaatgtgatgtgaaggattacggagatctgccatttgcggatatacccaacgactcgccgtttcaaatcgtgaaaaacccaagatcagtgggcaaggctagcgagcagctggcagggaaagtggcagaggtcaagaagaacggccgcatctctctcgtgctcggaggagatcattctctcgccatcgggagcatttccggacatgcaagggtgcacccagacctgggcgtgatctgggtggatgcacacactgacattaacactccacttaccaccacctccggtaatctgcatggacaacctgtctcattcctcctgaaagaacttaagggcaagattcccgatgtgcctggattctcgtgggtcaccccatgtatcagcgccaaggatattgtgtacattggactccgagacgtggatcccggagaacattacatacttaaaactcttgggatcaagtactttagcatgaccgaggtggatcggctgggtatcggtaaggtgatggaggaaacgctgagctacctgttgggccgaaagaagcgacctattcacctttccttcgatgtggacgggcttgatcctagcttcacccctgcaactggaacccctgtggtcggcggacttacctacagggaggggctctacattaccgaagaaatctacaaaaccggtcttttgtcaggcctcgatatcatggaggttaacccttcattgggcaagactcccgaggaagtgactcgtaccgtgaacacggccgtggctattactctggcatgctttggccttgcccgcgagggcaatcataagcctattgattacctcaatccacccaag

SEQ ID NO: 429 - DNA, 966 bp, Artificial Sequence
  derived and/or modified sequence
atgtccgccaagagcaggacgataggcattataggtgccccattttcgaaaggccagccacgcggcggagtggaggaaggacctaccgtgctgcgaaaagcagggctgctggagaaactcaaagaacaagaatgtgatgtgaaggattatggggatctgccgttcgcagacattccaaacgactccccctttcaaatcgtcaagaatccgcggtcggtcgggaaagcatccgaacagctcgctggaaaggtggcagaggtgaagaaaaacggcagaatttcgctcgtgcttggaggtgaccacagccttgcaatcggctcgatttcagggcacgcgagagtccatcctgatctgggtgtgatttgggttgacgcacacacggacattaacaccccgctgacgacgacctctggtaatctgcatggacaacccgtgagctttctcctgaaagagctgaagggtaagatcccagatgtgcccggtttttcatgggtcactccctgcatatccgcgaaagatatcgtctacattggacttagggacgtggatccaggagaacactacattctgaaaacgctgggaatcaagtacttttcgatgaccgaagtggatagacttggaatcggtaaggtgatggaagagactcttagctacctgcttggtaggaagaaacgtcctatacacctgagcttcgacgtggatggtcttgacccatcttttacccctgcaactggcacccccgtcgtgggtggtcttacttaccgcgagggcctgtacattaccgaggagatttacaaaaccgggctgctgtccggtcttgacattatggaagtgaacccttcccttggtaaaacccctgaagaagtgactcggactgtcaacactgcggtggccattactcttgcatgttttggcctcgccagagaaggaaaccataaacccattgactaccttaaccctcctaag

SEQ ID NO: 430 - DNA, 966 bp, Artificial Sequence
  derived and/or modified sequence
atgtctgccaaaagtaggacaatagggattatcggggccccctttagtaaaggccagcctcgcgggggggtcgaagagggccccacagtgcttcgaaaggcaggtctgttggagaagctaaaggaacaggagtgtgacgttaaggattacggggatctgcccttcgccgacatccctaacgactcgccctttcagatcgtgaagaacccccgatccgtgggtaaggcatccgagcagttggccgggaaggtagccgaagttaagaagaacgggcgaatctccctggttctggggggggatcactccctagctatcgggtcaatttccggtcatgctcgggtccaccctgatcttggtgtgatttgggtggacgcccatacagatattaataccccgctcaccacgacatccggaaatttgcacggtcaacctgtgagcttcttgctgaaggagctgaagggcaaaatccccgacgtaccagggttttcctgggtgaccccttgtatttctgccaaggacatcgtgtacatcgggctgcgggacgtggacccgggcgaacactacattctgaagacactaggcatcaagtatttctccatgaccgaggtggatcgtttaggcatcggcaaggtaatggaggagaccctctcctatctactggggagaaaaaagaggcccatacacctgtcattcgacgttgatggcctggatccctccttcactcccgccacagggactccagtggttggtggcctgacatacagagaaggtctgtacataacagaggagatttataaaactggtttattgtccgggctggatatcatggaagtgaatccttccctggggaaaacccctgaagaggtgaccagaacagttaacaccgccgtcgcgattacactagcgtgcttcgggctcgcccgggagggtaaccacaagccaattgactatttgaacccccccaaa

SEQ ID NO: 431 - DNA, 966 bp, Artificial Sequence
  derived and/or modified sequence
atgtcggccaaaagcagaactatcggtattatcggggcgccattcagcaaaggccaaccacggggaggcgtggaagaagggcctacggtgctgcggaaggcaggattgctggagaagttgaaggagcaggaatgtgacgtcaaggattatggagatctgccgttcgcagacataccgaacgattcaccttttcagatagtgaaaaacccaaggtccgtgggaaaagcgtcggagcagcttgcgggaaaagtggcggaagtcaagaagaacggacggatttccctcgtgctcggtggggatcattccctggcaattggtagtatctcaggacatgcgcgcgtgcatcccgacctgggcgtaatttgggtggatgcacataccgacatcaacactcctctgaccactacctcaggaaatctgcacggacaaccagtctcctttcttctcaaagagctcaagggaaagatacctgatgtgcctgggttcagctgggtgacgccttgtatctccgcaaaagatattgtgtacattggtctgagagacgtggatcccggggaacattacattcttaagactctgggcattaagtactttagcatgactgaagtggatagattgggaattggcaaggttatggaagagactctttcgtaccttctcggaagaaagaagaggccaatacatctttcgtttgatgtggatgggttggatccctcttttacccctgcgactggcactcctgtcgtgggaggacttacctaccgggaaggactttacataactgaagaaatctacaagaccggtctgctttcaggcctcgatatcatggaggtcaatccttcgctcggaaaaactcctgaagaagtgacccgtactgtcaacactgcagtggctattactctcgcgtgctttggactggccagagaaggcaaccacaagcccatcgattaccttaaccctccaaaa

SEQ ID NO: 432 - DNA, 966 bp, Artificial Sequence
  derived and/or modified sequence
atgtcggcaaaatcgaggactatcggcatcattggagccccattttccaaaggccaaccccgtggaggagtggaagagggaccaacagttctgcgaaaggccggtctcttggaaaaacttaaagaacaagagtgcgatgtgaaagattacggagaccttccgtttgcagatatacctaacgactctcctttccaaattgtcaagaatccgagaagtgttggaaaggcgtcggagcagcttgctggaaaggttgctgaagtaaaaaagaatggccgaatatcccttgttttaggaggagatcattctcttgcgataggatccatttccggacacgcgcgcgttcatccagatctcggtgttatttgggtagatgcgcatacagatattaatactccactgacgactacctctggaaatctacacggccaaccagtttccttcctgcttaaggagttgaaaggaaagattcctgacgttcccggtttcagttgggtgacaccatgcatctccgcaaaggacatcgtttatattggtctccgagacgtcgatccgggtgaacattacatcctgaaaacactgggtatcaaatacttttctatgactgaggtcgatcggttgggcatcgggaaggtgatggaagaaactttgagttatcttttggggcgtaagaaaagaccaatccatctttcgtttgatgtcgatggactagatccatcgtttacaccagctacggggactcctgtagttggtggacttacttatcgagaggggctttatatcacggaagaaatatacaaaacaggtctcctttccggactcgacattatggaagttaacccctcactggggaaaacaccagaagaagttactcgaactgtaaacacagctgtcgcgattacactcgcttgttttggtttagctcgagaaggtaaccataagcctattgattatctcaatccgccgaaa

SEQ ID NO: 433 - DNA, 966 bp, Artificial Sequence
  derived and/or modified sequence
atgtccgctaagtcgcgcaccatcggaatcatcggagccccattcagcaagggacaacctcggggcggggtggaggagggaccgactgtgcttcggaaggctggactcctggaaaaactcaaagaacaggagtgcgacgtgaaagactacggcgacctcccctttgcggatattccgaacgactcccctttccagatcgtcaagaacccaagatcggtcggcaaggcgtccgagcaactggccggaaaggtggctgaggtcaagaaaaacggcaggatctcgctggtgcttggaggagatcactccttggcaatcggaagcatttcaggacatgcgcgcgtgcatccagacctgggagtgatctgggtcgatgcacacaccgacatcaatactccacttaccacgacctccggaaacttgcacggacagccggtcagcttcctcctcaaagagctcaaaggcaaaatccctgacgtcccgggcttcagctgggtcactccctgcatctcggcgaaggatatcgtgtacatcgggctccgggatgtggatccgggggagcactacattcttaagactcttgggatcaagtacttctccatgactgaggttgaccgcctcggtatcgggaaagtgatggaagagactctgagctacctcctgggacggaagaaacgtccgatccatctgagcttcgacgtggatgggctcgacccgtcgttcactccagcaaccggaaccccggtggtgggaggattgacctacagagaaggtctgtacatcaccgaagagatctacaaaacgggcctgttgagcggactcgacattatggaagtcaatcccagcctgggcaagaccccagaagaagtgactcgcactgtgaacaccgccgtggccattactctggcctgcttcgggctcgctagagaaggcaaccacaaaccgatcgattatctgaatccaccgaaa

SEQ ID NO: 434 - DNA, 966 bp, Artificial Sequence
  derived and/or modified sequence
atgtctgcaaaatcacggaccatagggattattggcgcaccgttttctaaaggtcaaccgcgggggggagtcgaggagggtccgaccgtgctgcggaaagctggcctgttagaaaagttaaaagaacaagaatgtgacgtgaaggactatggagacttgccctttgcagatattccgaacgatagcccgttccaaattgtaaagaatcctcgaagtgtgggaaaagcttcagagcagttagcaggcaaagtagcggaagtaaagaaaaatggccgcatttccctggttctgggaggcgatcattccttagccatcggctcaatatcaggccacgcgcgagtacatcccgaccttggagtcatatgggtcgatgcacatacggatattaacacaccgttgacaacaacgtcaggaaacttgcacggccagccggtaagttttctgctcaaggagctgaaaggcaagattcctgatgtcccgggcttctcatgggtcactccgtgcatttcggcgaaggacattgtttacatcggtcttcgagacgtggaccctggggaacactacatcctgaaaactttgggcatcaagtatttctctatgacagaggttgacagactcggcattggtaaagtaatggaagagacgctgtcttatctgttgggcaggaaaaagcgtccgatccatctgtcttttgacgttgacggccttgatcccagcttcacccctgcgacaggtacaccggtggtagggggactgacataccgtgaaggtctgtatatcacggaagaaatttataagactgggttgctctctggccttgacattatggaagttaatccttcactgggaaaaacgccagaggaggtgactcggacggttaatacagcagttgcgattacgctcgcatgcttcggcctggcacgggaggggaaccacaaaccgattgattatttaaatccgcctaaa

SEQ ID NO: 435 - DNA, 966 bp, Artificial Sequence
  derived and/or modified sequence
atgtccgctaagtcccgcaccatcggaatcatcggtgcgccgttctcgaagggacagcctcggggaggtgtcgaagaagggcccaccgtgctcaggaaggctgggctgctcgagaagctcaaggagcaagaatgtgatgtcaaagactacggggatctgcccttcgctgacattccaaatgactcgccgtttcagatcgtgaaaaacccgcgctccgtcggaaaggcgagcgagcagctggccggaaaggtcgctgaggtgaagaagaatggtcgcatctctttggtgttgggaggcgaccacagcctggccattggctccatcagcgggcacgcccgagtgcaccccgacctcggagttatttgggtggatgcccacactgacatcaacactccgctgactactacgtcgggaaacttgcatggacagccagtgtcattcctgcttaaagagctgaaaggaaagatcccagatgtcccgggattctcctgggtgaccccgtgcattagcgcaaaggacatcgtctacataggtctgcgggacgtcgatccaggcgaacactacatcttgaaaacgctgggtattaagtacttctcaatgacggaagtcgaccgcctcggtatcggaaaggtgatggaggagactctctcctacctccttgggaggaaaaaacggccgatccatctgtcatttgacgtggacggtctggacccatccttcactccagccaccgggacccctgtggtgggcggactgacctaccgtgagggactctacatcactgaagagatctacaagactggactgctttcgggactcgacatcatggaagtgaatccgtctctgggaaagacccccgaagaagtgaccagaactgtgaacaccgccgtggccatcacgctcgcttgcttcgggcttgcgcgagagggcaaccacaaaccaatcgattatctcaacccgccaaag

SEQ ID NO: 436 - DNA, 966 bp, Artificial Sequence
  derived and/or modified sequence
atgagtgcaaagtcacggaccattggcatcattggagccccctttagcaaaggccagcctagaggcggagtggaagaaggacctaccgtgctgaggaaggcaggactgcttgaaaagctgaaggagcaggagtgtgacgtcaaagactacggagatcttccttttgccgacattcccaacgattcgccattccaaattgtgaaaaacccccgctccgtggggaaggcgtcagaacaactggccggaaaggtggcagaagtgaagaagaacggacgcatatcgttggtcctcggtggggatcactcccttgccatcggcagcatctctggacacgcccgggtgcacccagaccttggggtcatttgggtcgacgcacacactgacataaacactccactcactaccacctccggaaacctgcatggacaaccggtgtcatttctccttaaagaacttaagggcaagattcccgatgtgccaggtttttcctgggtgaccccatgtatttctgccaaggatattgtgtatatcgggctgcgggatgtcgatcctggcgaacattacatactcaagactctcggtatcaagtacttttccatgaccgaagtcgatagacttggaattggaaaggtgatggaggagactctctcgtatcttctgggcaggaagaagcgtccaatccaccttagcttcgatgtcgacggccttgacccatcattcaccccagcgaccggaactcctgtcgttgggggtctgacctacagagaaggtctgtacatcacggaagagatatacaagaccggacttctgtcaggactggacataatggaggtgaacccatcgcttggtaagactcccgaggaagtgacccgtaccgtgaacactgcagttgcaatcacccttgcgtgctttggtcttgcccgtgagggaaaccataagcccatcgattacctgaatccaccaaag

SEQ ID NO: 437 - DNA, 966 bp, Artificial Sequence
  derived and/or modified sequence
atgtccgcaaagtccaggactattggcattatcggggcgccattttccaagggacaacccagagggggagtggaggaaggaccgaccgtcctcagaaaggccggactgctcgaaaaacttaaggagcaagaatgtgatgtgaaggattacggagatcttccgtttgcggatatacccaacgactcgccctttcaaatagtcaaaaaccctcggtccgtggggaaggccagcgaacaactggcaggcaaggtcgcagaggtgaagaaaaacggccggattagcctggtccttggtggagatcattcgctggccataggcagcatatcaggacacgcaagagttcatcctgacctcggagtgatatgggtcgacgcccataccgatatcaacacccccctgaccaccacgagcggaaatctgcacggccagcccgtgtcctttctcctgaaggaactgaagggtaagatccccgatgtgccaggattttcatgggtgaccccttgtatttcggcaaaggacatagtttacattggtctgcgtgatgtggatcctggggaacattacatcctgaaaaccctcgggattaagtacttttcgatgacggaggtggatagacttggcatcggaaaggtgatggaagaaaccctctcctacctccttggcaggaaaaagcgccctattcatctgtcgttcgacgtggatgggctggatccttcatttactccagcgactggcactccagtggtgggaggacttacgtacagagaagggctttacattacggaagagatctacaagactgggctgctctccggtctggacattatggaagtgaacccttcgctgggcaagacccctgaggaagtcactcggaccgtgaacactgcagtggccatcactctcgcctgtttcgggcttgcgagggaggggaaccacaagccaattgactacctcaatccacctaag

SEQ ID NO: 438 - DNA, 966 bp, Artificial Sequence
  derived and/or modified sequence
atgagcgcaaagtcccgtaccatcggaatcattggtgcaccattctccaagggtcagcctcggggcggtgtggaagaggggcctaccgtcttgaggaaagcaggccttcttgaaaaactcaaagaacaagagtgtgacgttaaagattacggcgatctgccattcgcagacattccaaacgattcaccttttcaaattgtcaaaaatcccaggtccgtgggaaaggcttcagaacaacttgcgggaaaggtggccgaagtcaaaaagaacggacggatatcactggtgctgggaggtgaccatagccttgccatcggttccataagcggtcacgctagggtgcatccggatcttggtgtcatctgggtggatgcccacactgatatcaacacgccacttactacgacttcgggtaaccttcatggacaacccgtgagctttctcctgaaggaacttaagggcaaaattccagatgtgcccggattttcctgggtgacgccgtgcattagtgctaaggacatcgtgtacattggcctgcgcgacgtagacccaggagagcattacattctcaagactctgggaattaagtacttctcgatgactgaagtggatcgcctgggtataggtaaggtcatggaagaaaccctgtcgtatctccttggtcgaaagaagcgacccatccatctctcgtttgatgtggacggacttgatccttcttttactcccgcaaccggaacccctgtcgtgggtggtttgacttacagagagggtctttacattacggaagagatttacaagactggacttctcagcggcctcgacattatggaagtgaacccttctctcggcaagaccccagaagaagttaccagaaccgtgaacactgcggtagccattactctggcgtgttttggccttgcacgagagggaaatcacaagcctattgactaccttaaccccccaaaa

SEQ ID NO: 439 - DNA, 966 bp, Artificial Sequence
  derived and/or modified sequence
atgtccgccaaaagtcgcaccatagggatcatcggggccccattcagcaaggggcagccacggggtggcgtagaggagggccccaccgtgcttcgaaaggccggcctactggaaaagctgaaggaacaagagtgtgacgtcaaagactacggcgacctcccttttgccgatataccgaacgatagtccttttcagatcgtgaaaaaccctaggagcgtgggtaaagctagcgaacagttggcgggaaaggtggcagaagtcaaaaaaaacggcaggataagtctcgtgttgggaggggaccattccctcgcaatcggaagcatttccggccacgcccgggtccaccccgatctgggagtcatttgggtggacgctcacaccgatattaacacccctctgacaaccaccagcggaaatttacacgggcagcccgtctccttcctgctgaaagagctgaagggcaaaatccccgacgtacccggcttctcttgggtcactccatgcatctcagccaaggatattgtgtatataggcttacgggacgttgatccaggcgagcactatattctgaagacccttggaataaagtatttctccatgacagaggtcgatcggctgggcattggtaaggttatggaggagacattgtcctatctgctgggccgcaagaaacggcccatccatctttccttcgatgtcgacggcctcgaccctagttttacgcctgccaccggcacaccagtggtgggaggtctgacttatagagagggcctgtatattactgaagagatctacaaaaccggactgctgtctggcctggatataatggaggtgaaccccagtttaggaaagacaccagaagaggtcaccagaaccgtcaacactgctgtggcaataaccctggcttgcttcgggttagctagagaagggaaccacaagcctatcgactacttgaatcctcccaag

SEQ ID NO: 440 - DNA, 966 bp, Artificial Sequence
  derived and/or modified sequence
atgtcagcaaagtccaggactatcgggatcattggcgcaccgttttcgaagggacaacctcgcggaggcgtcgaagagggaccgacggtcctgaggaaggccggactgctggaaaaactcaaggagcaggaatgtgatgtgaaagactacggggacctcccattcgctgacattccgaacgactccccgttccaaatcgtgaagaacccacgctccgtgggaaaggcgtcggagcagttggcgggaaaggtggcggaggtgaagaagaacggtcgcatctcactggtgttgggcggggaccattcgcttgccatcggttcaatctcgggtcacgcgagagtgcaccccgacctgggagtcatatgggtcgatgcccacaccgatatcaataccccactcacgactacttcgggcaatttgcacggacaaccagtctcattccttctgaaggaactgaagggaaagatccctgacgtgccaggcttctcgtgggtcactccgtgcatctctgccaaggacattgtgtacatcgggctgagagacgtcgatccaggcgaacactacatcctgaaaaccctgggtatcaagtacttctcgatgactgaggtggatcgactcggaatcggcaaggtcatggaagagacgctgagctatctcctggggcgcaaaaagcgccctatccacctttcttttgacgtggatggacttgatccgtcgttcacgccggccaccggtactcccgtggtgggaggactgacctatcgtgaagggctctacatcactgaagagatttacaagaccggactgttgtcaggactggacatcatggaagtaaacccgtcgctcggcaagaccccggaagaagtcaccaggaccgtgaacaccgcggtcgccatcaccctggcctgcttcggactggcgagagagggaaatcacaagccgatcgattaccttaatccgccaaag

SEQ ID NO: 441 - DNA, 966 bp, Artificial Sequence
  derived and/or modified sequence
atgtcagcgaagtctaggaccatcggaatcataggtgctccgttctctaagggccagccgaggggaggcgtcgaggagggcccaaccgtgctgagaaaggcgggactgctggaaaagctgaaagagcaagaatgcgatgtcaaagattatggtgatctcccgttcgcagatatccctaacgacagcccgttccaaatcgtgaagaaccctcgctccgttggaaaggccagcgagcagctggccggaaaggtggccgaggtcaagaagaatggacggatatccctggtgctgggaggggaccactcgctcgccatcggatcgatctccggacacgcacgtgtgcacccggacttgggtgtcatctgggtggacgctcacaccgacattaacactcctctgaccactacttccggtaatctgcatgggcagcccgtcagcttcctgctcaaggaactcaagggaaaaatcccagacgtgccgggcttctcctgggtcactccttgtatctcggcgaaagacatcgtttacatcgggctgcgcgatgtggatccaggagaacattacattcttaagacgttgggtatcaagtacttttcgatgacggaagttgatcgccttgggatcggcaaggtgatggaagagactttgtcgtacctgctgggaagaaagaaaagaccgattcacctctcatttgacgtggacgggcttgacccctcatttaccccagcgactggaaccccagtggtgggcggcttgacttaccgggaaggactgtacattaccgaggagatatacaagaccggactgcttagcggactcgacatcatggaggtgaacccgtctcttggaaaaacccctgaggaagtcactcgtactgtgaataccgctgtggcgatcactctcgcctgcttcggactggcccgagaagggaaccataaaccgatcgactaccttaacccgccaaag

SEQ ID NO: 442 - DNA, 966 bp, Artificial Sequence
  derived and/or modified sequence
atgtccgcaaaatcgagaaccataggcatcataggcgcaccttttagcaagggtcaaccacgtggaggtgtggaagaaggaccaacggtgctccgcaaggctggactgctggaaaagctgaaagaacaggaatgtgatgtgaaggattacggagatctgccgtttgcagacattccaaacgatagcccatttcagatcgtgaaaaatcctagaagcgtcggcaaagcctccgaacaactggcaggaaaagtggcagaagtcaagaaaaatggacgaatctctctggtcctcggcggtgatcacagtttggcgatagggtcaatttcgggtcatgcacgcgtccacccggatcttggtgtgatatgggtggatgcacatactgacattaacactccattgaccactacttcgggtaacctccacgggcagccagtgtcgtttctgcttaaggaacttaagggaaagatacccgatgtgcctggattttcgtgggtgactccctgtattagcgctaaggatatcgtgtacatcggcctccgagacgtcgatcctggcgagcattacattctgaaaaccctcgggatcaaatacttctccatgactgaagtagacagactgggaattggtaaggtgatggaagaaaccctgtcgtacttgctggggcgtaagaagcgccctattcatctttcattcgatgtggatggtcttgatcccagctttacccctgccactggaactccagtggtcggcggacttacttatcgagaaggattgtacattaccgaagaaatctacaagactgggctcctgtctggattggatatcatggaagtgaacccttcgctgggtaagactccagaagaggtgacccgcaccgtcaacaccgcagttgcgattacgctggcctgtttcggcctcgctcgggaaggcaaccacaagcctattgattaccttaacccacctaag

SEQ ID NO: 443 - DNA, 966 bp, Artificial Sequence
  derived and/or modified sequence
atgtcagctaaatcaagaactattggtattataggagctccatttagtaaaggacaaccaaggggtggagtggaggaaggaccaactgttttacgaaaggctggattattagaaaaattaaaagagcaagaatgtgatgttaaggattatggagatctaccattcgcagatattccaaatgattcaccatttcaaattgttaaaaatccaagatcagttggaaaagcatctgaacaattagcaggaaaggttgcagaagttaaaaagaacggaaggatttctcttgttttaggaggagatcatagtcttgcaattggtagtatttcaggacatgctagagttcatccagatttaggagttatttgggtagatgcacatacagatatcaacacacctttaaccactacatcaggaaatttgcatggacaacctgtatcatttttacttaaggaactaaaaggtaaaataccagatgttcctggattttcatgggttacgccttgtatcagtgcaaaagatattgtgtatattggtttaagagatgttgacccaggtgaacactacattcttaaaacattagggattaagtattttagtatgactgaggttgatagattaggtattgggaaggttatggaagaaactctttcctacttattaggacgtaaaaaaagaccaattcatttatcattcgatgttgacggacttgatccatcatttacaccagcaacaggaactccagtagttggaggacttacttatagagaaggattatacattactgaagaaatttataaaactggtttattatctggtttagatattatggaagtaaatcctagtcttggaaagacacctgaagaagttacaagaacagttaacacagctgttgcaattacattggcttgctttggacttgcaagggaaggtaatcataaacctattgattatcttaatccaccaaaa

SEQ ID NO: 444 - DNA, 966 bp, Artificial Sequence
  derived and/or modified sequence
atgagcgcgaaaagccgcactatcggcatcattggggcaccattttccaaaggacagcccagggggggcgttgaggaaggccctacagtgttgcgaaaagccggattactggaaaagctcaaagaacaggaatgcgatgttaaggactatggcgatctgccattcgcggacatccccaatgacagcccctttcagatcgtgaaaaatccaagaagcgttggaaaagcctccgaacagctggctggaaaggtcgctgaggtgaagaaaaatggaaggattagtctggttctggggggagaccactccctcgcaatcgggtcaatctcagggcacgccagagtacatcctgatctcggcgttatctgggtcgacgcccacacagatattaacactcccctcactaccaccagcggcaacttacatggccaaccagtgagctttctgctgaaagaactcaagggcaagattcccgatgtgccagggttctcttgggtgaccccctgcatcagcgccaaagatattgtgtacattgggctgagagacgtggatcctggagagcactacattcttaagactctaggaatcaaatatttctcaatgactgaagtcgatagacttggcattgggaaagtaatggaggaaaccctgtcttatcttctgggccgaaaaaagcggcccatacatcttagctttgacgtggatgggctggacccatctttcaccccagcaaccgggacaccagtcgtgggcggcctaacctatcgtgaaggtctgtacatcactgaagagatttacaagacaggcctgctgtctggccttgacatcatggaagtgaatccctccctcggcaaaactcccgaggaggtgaccaggacggtcaatactgccgtggcaattacgctagcctgcttcggcctggcccgggaagggaaccataagccaatcgattatctgaatccacccaag

SEQ ID NO: 445 - DNA, 966 bp, Artificial Sequence
  derived and/or modified sequence
atgagcgcaaaaagccggacaatcggcattatcggagcaccattttctaaaggacagcctcggggaggagtcgaggaaggcccaactgtgctccgaaaagccgggcttctggaaaagctgaaggagcaggagtgtgatgtgaaagattacggcgatttgccattcgccgacattcccaacgactcgccattccagatcgtgaaaaacccccggtccgtcgggaaagctagcgagcaacttgctggcaaggtagcagaggtgaagaagaatggccgtatcagtttggttctagggggagatcacagtctggccatcggctcgattagtggccatgctcgcgtgcacccagacctgggcgtcatttgggtggacgctcatactgacatcaataccccactaacaacaacatctggcaatctgcacggtcaacccgtgtccttccttctcaaagagctcaagggcaaaatccctgacgtgcccggcttttcctgggtcacgccgtgtattagtgcaaaagatatagtgtacatcggtttgcgcgacgtcgatcctggcgagcattacatcttgaagactctgggcatcaagtattttagcatgacggaggtagataggctcggaattgggaaagtcatggaggaaaccctgagctacctgttagggagaaagaaacggcctatccacctgtcctttgacgtcgacggcctggacccttctttcacacctgcaacaggtacaccggttgtcggcggactgacttaccgtgagggactctacatcaccgaagagatatacaaaacagggctcttgtccggattggatattatggaagtgaacccctccttgggcaaaacccccgaagaggttacgaggactgtgaataccgccgtagctatcacgttagcttgttttggattggctcgagagggaaatcataaaccaatagactatttaaaccctcctaaa

SEQ ID NO: 446 - DNA, 966 bp, Artificial Sequence
  derived and/or modified sequence
atgtcggctaagagtcggacgattggtattatcggcgcacccttttctaagggccagccgaggggaggtgtggaagaaggccccaccgttcttcgcaaggcgggcctccttgagaaactcaaggaacaagaatgcgacgtcaaagattacggtgatctccccttcgcggatatacccaacgactctcccttccaaatcgttaagaacccccggtctgtgggaaaggccagcgagcaacttgcggggaaggtcgctgaagtcaagaagaacggacgcatcagccttgtcctcggcggagatcattcattggctattggttcaatctctggacatgcacgggtgcaccctgacctaggagtgatatgggtggacgctcacactgatatcaacacgcctctcacaactaccagcggcaatttgcacggccagcccgtctccttcttgttaaaagagctgaagggcaaaattccagacgtccccggatttagttgggtaaccccttgcatatcagcgaaagacatagtttatattggcctccgagacgtggacccaggagaacactatatcctcaagaccctaggtattaagtacttctctatgacagaggttgaccggctgggcatcggtaaagtaatggaggaaacgctgtcttacctgctcggtagaaagaagcgccccatccatctttcctttgacgtcgatgggcttgacccttcattcactccggcgactggtacgcccgtagtcggaggattgacatacagagaagggctttacatcacagaagagatctataaaaccggcctgttgagcggattggatataatggaagtgaatccgagcctcgggaagaccccggaagaagtcacgaggacagttaatacggcagtcgcaatcaccctggcatgcttcggcctggcacgagagggtaatcataagcctattgactacttgaacccccctaag

SEQ ID NO: 447 - DNA, 966 bp, Artificial Sequence
  derived and/or modified sequence
atgtcagcaaaatctcgtacaatagggatcatcggtgccccgttctcgaagggccagcctagaggcggcgtagaggaaggcccgactgttctcagaaaggcaggcctgctggaaaagttgaaagaacaagaatgcgacgtaaaagattacggggacctcccattcgctgacatacccaatgactctccattccagatcgtgaagaacccaaggagcgtgggaaaggcatccgagcagttggcgggtaaggttgcggaggtgaagaagaacggtcgcatttccttagtgctcgggggagatcactcccttgccatcggttctatctccggacatgcacgcgttcacccggaccttggcgtgatttgggtggatgctcacactgacataaacacccctttgacaaccacgtcgggaaacttacacgggcagcccgtctcttttctgctgaaggaattaaaaggaaagattccagatgtgcccggtttctcctgggtgacgccatgcatttcggcaaaggacatcgtgtatattggacttcgggacgtggatcccggtgaacattatatactgaagactctgggaatcaagtacttctcaatgaccgaagtggacagactcggaatcggtaaagtaatggaggaaacgctttcttacttgctgggccggaagaagcggcctatccacctctctttcgatgtcgacggcctggatcctagttttactcccgctactggtactcccgtcgtcggaggactgacttaccgagaaggcctgtacattaccgaggaaatatacaagactggcctactaagcgggttggatatcatggaggttaatccatccctgggtaaaacacctgaagaagttacgcgaaccgtgaacactgccgtggctatcacactcgcttgtttcggattggcacgggagggtaatcacaagcctatagactacctgaatcctccaaag

SEQ ID NO: 448 - DNA, 966 bp, Artificial Sequence
  derived and/or modified sequence
atgtccgcaaagtctaggacaattgggataatcggtgcaccttttagcaagggccaaccaaggggcggcgtggaagagggacctactgtactgaggaaagcagggctgctcgagaaactgaaagagcaggagtgtgatgtgaaggactacggagacctgccttttgccgatatccccaacgactcgccttttcaaattgtcaaaaaccctagaagcgtgggcaaggcatctgagcagttggcaggaaaagtcgccgaggtaaaaaagaacggaaggatatcccttgttcttggtggagaccactcgctcgccatcggttccatctccgggcacgctagggtgcatcctgatctgggggttatctgggtggacgctcatacggatatcaatacacccctgaccactactagcggtaatttgcacggccagcccgtgtcattcttgctgaaggagctcaagggcaagatacctgatgttcctggcttttcctgggttacaccctgtatcagtgcgaaagatatcgtttacatcgggctcagggacgttgatccaggggaacattacattcttaaaactttagggatcaaatacttttcaatgaccgaggtggacagacttggcatcggcaaagtaatggaagaaacactgtcttatcttcttggaaggaaaaagcgtcctatccacctctcctttgatgtcgacggcctggacccaagtttcacacctgcgaccggaacccctgtggttggaggcctgacttaccgtgagggcctatatattacggaagaaatctacaagaccggcctgttgagcggactcgacattatggaagtcaaccccagtctggggaagactccagaggaggtaacacgcactgttaataccgccgtagcaattactctcgcctgctttgggctggcccgcgaaggaaaccacaagccaatcgactatctgaatccaccaaaa

SEQ ID NO: 449 - DNA, 966 bp, Artificial Sequence
  derived and/or modified sequence
atgtcagcaaagtccaggaccatcgggatcattggagcgccctttagcaagggacagcctagaggaggcgtggaggaaggacctactgtgctgagaaaggcagggctgctggagaagctgaaggaacaagaatgtgatgtgaaggactacggcgacctgccattcgccgatatccccaatgactcacctttccaaattgtgaagaaccccaggtctgtcggtaaagcttcagaacaactcgccggtaaggtggcggaggtaaagaaaaacggtagaatttcgctagttttaggcggcgaccactccctggcaattggctctatcagcggccatgccagggtgcacccagacctcggcgtcatatgggtagacgcccacaccgacattaacacacccctgaccactacttctggcaacttacacgggcagccagtgtccttcctcttgaaagagcttaaaggcaagatacctgacgtgccaggatttagttgggtcaccccttgtatttctgctaaggacattgtgtacattggtctgcgggacgtggaccccggcgaacactacattctgaagactctgggcatcaagtacttttctatgactgaggtcgatcgacttggcatcgggaaagttatggaggagactctatcataccttctcggcagaaagaaaaggcccatacacttgagttttgacgttgacggactggatccttctttcacacctgccacgggtacacctgttgtgggaggtcttacataccgcgaaggactctatattaccgaggagatttacaagaccggtctcctctccggcctcgacatcatggaggttaacccttcgctgggaaagactcccgaggaagtgacccggacagttaacaccgccgtcgcgatcactctcgcgtgctttggacttgctcgcgaaggaaatcataagcccattgattacctgaatcctccaaag

SEQ ID NO: 450 - DNA, 966 bp, Artificial Sequence
  derived and/or modified sequence
atgagtgccaagagcaggaccattggaattatcggggccccattctcaaaggggcagcctcggggcggagttgaggaaggacccaccgtgctgcggaaagctggcctgttggaaaaactgaaagagcaggaatgcgatgtgaaggattatggcgatctccccttcgccgacatacccaacgattcaccgtttcaaattgtcaagaaccctcgctcagtcgggaaggctagtgaacagctcgcaggcaaggtggcagaagtcaaaaagaatgggaggatatctctggtcttgggcggggaccattcactcgctatcggatctatatctggtcatgctagagtgcacccggacctgggcgtgatatgggtggatgctcacaccgacatcaatactccactgacaaccaccagcggtaatctgcatggccagccagtgagttttttacttaaggaactcaaaggcaaaatccccgacgtgcccggtttttcttgggtaaccccctgcatcagcgccaaagatatagtgtatatcgggctgcgagatgtggatcccggggaacattatatcctcaaaaccctgggcatcaagtatttctcaatgactgaggtagaccgtctgggcattggtaaggtcatggaagagacactgtcttacttgctgggccggaagaagagacccattcatctctcatttgacgtcgacgggctagacccttcatttacccccgccacaggaacccccgtggtgggagggcttacgtacagagaaggcctgtacataaccgaggaaatctacaaaaccggactgcttagtggtctagatatcatggaggttaacccatccttgggaaaaacccccgaagaggtgactcggaccgtgaatacagctgtggccatcacgctggcttgtttcgggctggcccgggaaggaaatcataagcccatcgactatctaaatccccccaag

SEQ ID NO: 451 - DNA, 966 bp, Artificial Sequence
  derived and/or modified sequence
atgtccgccaagtcccgcactattgggatcatcggtgctccattctcaaagggacagcccagaggaggagtggaggaggggccaaccgtccttcgtaaagcgggcctgttggagaaactgaaggaacaggaatgcgatgtgaaggactacggggacctccctttcgccgatatcccgaacgacagcccgtttcagatcgtgaagaatccccggtcggtgggaaaggcatcggagcagcttgcggggaaggtcgccgaggtgaaaaagaatggacggatctcactggtcttgggcggtgaccattctctcgccatcggatcgatctcaggacacgcacgggtccatcctgatctgggagtgatctgggtggacgcgcataccgacatcaacaccccattgaccaccacctctggaaatctgcatggccaaccggtgtcgttcctcctgaaggaactcaaggggaaaatcccggatgtgccggggttctcgtgggtgacgccgtgcatctcagcaaaggatatcgtgtacatcggactgcgcgacgtggaccctggagaacactacatcctgaaaactctcgggatcaagtacttcagcatgaccgaggtcgaccggcttggaatcggtaaggtcatggaggaaactctgagttacctgctcggccgcaaaaagcgcccaatccatctgtcgtttgatgtggatggattggacccgtccttcacccccgcgaccggaacgccggtcgtcggcggcctgacgtacagggaaggactgtacatcaccgaagagatctacaagactggcctcctctcggggctggatatcatggaagtgaacccgtcgctgggtaagacccccgaggaggtcactcggactgtgaatactgccgtggccataactctggcttgcttcggactggcacgggaagggaatcacaagccgatagactacctgaacccgccaaaa

SEQ ID NO: 452 - DNA, 966 bp, Artificial Sequence
  derived and/or modified sequence
atgtccgccaaatctaggacaattggaataattggggcccctttttctaaaggtcagccgcgggggggagttgaggaggggccaactgtcctgaggaaggcaggcctgctggaaaagttgaaggagcaggaatgtgatgttaaagattacggggacttgccctttgcggacataccgaatgactctcctttccagattgtgaagaatcctaggagtgtgggaaaggcatccgaacaactagctgggaaagtggcagaagttaagaagaatggacgcatctctctcgttctggggggagatcattcattggccatcggatccatttccggccatgcgagagttcatccagacctcggagtcatatgggttgacgcccataccgatatcaatactcctctgacaactacctccggcaatttgcatggacaacctgtctcttttctgctgaaggaattgaaaggaaagatcccagacgtgcctggattctcttgggtgaccccctgcatttcagccaaggatattgtgtacatcgggctacgcgacgtggacccgggagagcattatatcctgaaaacactgggaatcaaatacttcagcatgacggaggtagatcggcttggcatagggaaagttatggaagagacgctgtcatatttgctggggcggaagaagagaccaattcacctgtctttcgacgtggatggcttggacccatcttttacccccgcgacaggaacacccgtggtaggggggctgacttatcgtgaaggcctctacatcactgaggaaatttacaaaaccggtctcctctcagggctggatatcatggaagttaacccttctctgggtaagactcctgaggaagtcaccagaaccgtcaacacagcagtggctattactcttgcttgtttcgggctggctcgagaagggaaccacaaacctatcgactatctcaaccctccaaag

SEQ ID NO: 453 - DNA, 966 bp, Artificial Sequence
  derived and/or modified sequence
atgagtgccaagagcaggactataggcattatcggagcccctttcagtaagggacagcccagaggaggcgttgaagagggtcctactgtgctcaggaaggcgggcctgttggaaaaactgaaggagcaggaatgcgacgttaaggactatggagatcttccatttgccgacatacctaacgacagtccgttccagatcgtgaagaacccccgctctgtgggcaaggctagtgaacaattggcaggaaaggtcgctgaagtcaagaagaacggtaggatctctctcgtgctgggtggagaccactctctggccattggttcaatatctggccacgcaagagtccaccccgacctgggcgtcatctgggttgatgcccacactgacataaatacgccactgaccacgacctccggtaatctgcacggacagcctgtttctttcctgctgaaggagctgaagggtaagatacctgatgtgccaggcttcagctgggtgactccctgcatatccgctaaagacatcgtctacatcggcctgagggatgttgatcctggagaacactacatcttgaaaacactgggcatcaagtacttctctatgacagaagttgatcgcctgggcatcggtaaggtaatggaggagactctcagctatttgctcggacgcaagaaaaggccaatacacctgagcttcgacgtggacggtctcgatccttcattcacaccggccaccggaactcccgttgtaggtggtctcacgtacagagagggcctgtacatcactgaagagatctacaagacaggactcttgtccggtctggacattatggaagtgaatccgtcactgggcaagaccccggaggaagtgaccaggaccgtgaataccgctgtggctattacccttgcgtgcttcggactggcaagggagggcaatcacaagcccatcgactacctgaaccccccaaag

SEQ ID NO: 454 - DNA, 966 bp, Artificial Sequence
  derived and/or modified sequence
atgtctgcgaagtcgcgcaccattggtatcattggcgcacctttttcaaagggtcaacctcgaggtggtgttgaagaaggtcccactgttctgcggaaggctggccttctcgaaaaacttaaagagcaggaatgcgacgtgaaggactacggtgatctcccatttgccgacattcctaatgattcgccctttcaaatcgtgaaaaatccgcgatcagtgggtaaggcctccgaacagcttgcaggcaaggtggcggaagtcaagaagaacgggcgcatctcccttgtgctgggcggagatcattcgctcgctattggttcaatctctggtcatgcccgagtgcatcctgacctgggagttatatgggtagatgcccatacggacattaacactcctcttaccactacttcggggaatctccacggacaaccggtgagctttctcttgaaggaactcaagggaaagatacccgatgtgccaggattttcctgggtcactccctgtatctcggccaaggacattgtctatatcggactcagagacgtcgatcctggggaacactacattcttaagactctgggtatcaaatacttttccatgactgaggtggatagattgggaattggaaaagtcatggaagaaactctttcgtatctgctcggcagaaagaaaaggccgatccacttgtccttcgacgtggatgggctggatccttcatttactccagcaactggaaccccagtggtgggcggtctgacctaccgcgaagggctttacattaccgaggagatctacaagacgggactcctctctggcctcgacattatggaagtcaacccttccctcggaaagaccccagaggaggtgaccagaaccgtgaacactgccgtggcaataactctggcttgttttggactcgcaagagagggaaaccataaacctatcgattacctgaacccaccaaag

SEQ ID NO: 455 - DNA, 966 bp, Artificial Sequence
  derived and/or modified sequence
atgagcgctaagtcccgtaccattggaatcattggtgctcccttctcgaagggccaaccccgtggtggcgtcgaagaaggacccaccgtgttgcgaaaggccggcttgctggagaagctgaaggagcaggagtgcgacgtgaaggactacggtgacctgccattcgctgacatcccaaatgacagtccatttcagatcgtcaagaaccctcgtagcgtgggtaaagccagcgagcagctggccggcaaagtggctgaggtcaagaagaacggtcggatctcgctcgtgctcggcggtgaccacagcctggcgattggatcaattagcggccacgcccgggttcaccctgatcttggcgtgatttgggtggacgctcacacggatatcaatactcccctgacgactaccagcggcaacctgcatggacagcccgtgtcctttcttttgaaggaactcaagggtaagatccccgacgtacctggtttctcttgggtaaccccttgtatctctgccaaggatatcgtgtatattggcctcagagatgtcgatcctggtgagcactacattctcaagaccctcggaataaagtacttctccatgaccgaggtcgataggttgggcatcggtaaagtcatggaggagacactctcgtacctgctgggcaggaagaagaggcccattcacctcagctttgacgtcgacggtctggacccgtcttttacccccgcgacgggcaccccagtggtcggcggtcttacttaccgggagggcctgtacattaccgaagagatctacaaaaccggactgctgagtggcttggacatcatggaggtgaacccctctcttggtaagactcccgaggaggtcacgcgcaccgtcaacaccgcagttgcgatcaccttggcctgcttcggacttgcacgcgagggcaaccacaagcctattgactatctcaaccctcccaag

SEQ ID NO: 456 - DNA, 966 bp, Artificial Sequence
  derived and/or modified sequence
atgagcgccaagtcccggacgatcgggattattggggcccctttctctaaagggcagccacggggcggcgtggaggaagggccaactgttctgcggaaggcgggcttgctcgaaaaactcaaggaacaggaatgtgatgtgaaagattacggagatcttccgtttgctgacatccctaacgatagtccgtttcaaatcgtcaaaaacccccggtctgtaggcaaggcatccgaacagctagccggcaaagtggccgaggtgaagaagaacggtaggatatctctggtgctcggaggagaccactctttggcaatcggcagtatcagcgggcatgcacgggtgcatcctgacctgggcgtgatctgggtggacgcccacactgatatcaatacccctcttactaccaccagcgggaacctccacgggcagcccgtcagcttcctgctgaaagaactgaaaggaaaaattcccgatgtgcccggcttctcatgggtcacaccctgtatttctgccaaagatatcgtgtatatcggcctgagggatgtggacccaggtgagcactatatactaaagactcttggtattaagtatttctcaatgaccgaggtcgataggttaggcattgggaaagtgatggaggagacgttaagctacctgctggggcgaaagaagcggcctatacaccttagtttcgacgtcgacggtctggacccctcctttactcccgcgacgggtacccccgtagtgggtggcctgacctaccgagaaggattgtacattaccgaggaaatttacaagaccggactgctgtctggcctggacataatggaggtcaaccctagcctgggaaaaacccctgaggaggtcacgaggacagtgaacactgcagtggccatcaccctggcctgcttcggactggccagggagggaaaccataagcctattgactacctgaatccccctaag

SEQ ID NO: 457 - DNA, 966 bp, Artificial Sequence
  derived and/or modified sequence
atgtccgccaagtcgcgcactatcggcatcatcggagccccgttctcgaagggccagccacgcggaggggtagaagagggtcccaccgtccttcgcaaggcagggcttttggagaagctgaaagaacaagaatgtgacgtgaaagattacggagatcttccatttgcggacatccccaacgattcgccttttcagatcgttaagaacccgagatccgtgggcaaggcatcggaacagctcgctggcaaggtggcggaggtgaagaagaacggacgaatcagcctggtgctcggtggagatcacagcctggccatcggtagcatctcggggcacgctagagtccaccccgacctgggagtgatctgggtggacgctcatactgatatcaatacccctctcaccactaccagcggaaatctgcacggacaaccagtgtcattcttgctcaaggaactcaaaggaaaaatcccggacgtgccgggattctcctgggtaactccgtgcatatccgcaaaggatattgtgtatatcggactgcgcgacgtcgatcctggagaacattacattttgaaaaccctcgggatcaaatactttagcatgaccgaggttgataggctgggcattggaaaggtcatggaagagactctcagttacttgctggggagaaagaaaaggccgatccatctgtcgttcgacgtcgacggtctggacccttcgttcactcctgcgaccggaactccggtcgtgggtggccttacctacagagaaggtctttacattactgaggagatctacaagacgggcctgctgagcggactcgatatcatggaggtgaaccccagtctgggcaaaactccagaagaagtgacgagaaccgtgaataccgccgtggcaatcaccctggcatgcttcggtctggctcgcgaggggaaccacaagccaatcgactacctgaaccctccaaag

SEQ ID NO: 458 - DNA, 966 bp, Artificial Sequence
  derived and/or modified sequence
atgtctgccaagagccgcacaatcgggataatcggcgctccattctctaaaggccagcctcgcggcggtgttgaagaaggcccaacagttcttcggaaggcgggcttactggaaaaattaaaggagcaggagtgcgacgtaaaagactatggcgacctgccgtttgcggatatccctaatgatagccccttccaaattgtcaagaaccccagaagcgtaggcaaggccagtgagcagctggcagggaaagtagcagaagtcaaaaagaatggacgcatatctctcgtattggggggtgatcattcattagctatcgggtctattagcggccatgctagagtgcaccctgacctgggcgtgatctgggtcgacgcccatactgatataaataccccactgactacgaccagtggaaatctgcacgggcagccagtttctttcctgcttaaagagctgaaaggcaagatcccggatgtgcccggtttcagttgggtcacgccctgtatttcggccaaggacatcgtatatattggcctacgggatgtcgacccgggagagcactatatcctcaagaccttgggaatcaagtatttctctatgaccgaagtggatcgactcggaattggaaaggttatggaagaaaccctgtcttacctactggggcggaagaagcggcccattcatctctccttcgatgtggatgggctggaccccagcttcacgccagcgacaggaacccctgtcgtaggaggcctgacctatcgtgagggcctttacatcaccgaggaaatttataagactggcctgctttcaggactggacattatggaggtgaacccaagtctcggcaagacaccagaagaggtgactaggacagtaaacacggcagtcgctattacactcgcttgtttcggattggcccgggaggggaatcataaacccatcgactaccttaaccctcccaag

SEQ ID NO: 459 - DNA, 966 bp, Artificial Sequence
  derived and/or modified sequence
atgagtgccaagtcacggactatcggtattataggcgcacctttttccaagggccaaccaaggggcggcgtggaagaggggcctacagtgttacgtaaggctggcctgctggagaaacttaaggagcaggaatgcgatgtcaaagactacggcgacctgccttttgctgatattcctaacgattctcctttccagattgttaagaatcctcgctccgtgggcaaagcaagtgagcaactggccggcaaagtggccgaggtgaaaaagaatggccgtatttcactggtgctgggcggagaccatagcctagctattggctcaatttctggccacgcccgcgtgcatccagatttgggagtgatctgggtcgatgctcatacagacatcaacacacccttaaccaccaccagcgggaacctgcacggacaacctgtttcttttctcctgaaggagctcaagggtaagatccctgacgtgccagggtttagttgggtcaccccttgcatctctgccaaagacattgtttatatcggcctgagggatgtggacccaggggaacattacatactgaagacccttggaatcaagtacttctctatgaccgaagtggaccgtctgggcataggtaaagtcatggaggagactctgagctacttgctaggaaggaagaagagacctatacacctgagcttcgatgtcgatggcctggacccaagttttacccccgccaccgggactccagtggttggcggacttacatatagggagggtctatacattaccgaggaaatctataaaacaggactgctgtctggattagacattatggaagttaacccatctctcgggaagaccccagaagaagtgacccggacagttaacaccgctgtggctattaccctagcttgtttcggcctggcccgggaaggcaatcacaagcctatcgattatctaaatccccctaaa

SEQ ID NO: 460 - DNA, 966 bp, Artificial Sequence
  derived and/or modified sequence
atgtcagccaaaagccgcaccatcggtattatcggggctccgttttcaaagggccaacctagggggggtgtggaggagggacctaccgtgctccggaaggccggattactagagaagcttaaagagcaagaatgtgatgtgaaagactatggtgatctgccatttgctgacatacctaacgacagcccgttccagattgtgaaaaacccaaggtcggtcggtaaagcgagtgagcaacttgccggcaaggtggccgaggtcaaaaagaacggacggatatctctcgtcctcggcggggatcactcgctggcaatcggctcaatctctgggcatgctagagtgcatcccgatctcggtgtaatctgggtcgacgcccatacagacattaacacgccattgactacgacttcgggtaatctccatggtcagcctgtgtctttcttgcttaaggaactaaagggcaaaattcccgacgtccctggattttcctgggtaactccatgcattagtgccaaggacatagtgtatatcggccttcgggatgtagaccctggagaacactacattctcaaaacactgggcataaagtactttagcatgactgaggtcgatagactcggaataggaaaagtgatggaggagaccctctcctatctcctgggtcgcaagaaacggcctattcacctgtcttttgacgttgacggtttagatccgtcctttacaccagcaacaggaaccccagtagttgggggactgacttaccgggaggggctttacattacagaggaaatctataagacaggcttgttgtccgggctggatatcatggaggttaatccctctcttggcaaaacacccgaggaggtcacgagaaccgtcaataccgccgtggctatcaccctagcctgcttcggtctggcccgggagggtaaccataaacctatcgactatctaaaccccccaaaa

SEQ ID NO: 461 - DNA, 966 bp, Artificial Sequence
  derived and/or modified sequence
atgtccgctaaatcacgtaccattggcataatcggggctcctttttccaagggccagcctagaggcggtgtggaagagggacccacggtgttgcgtaaggccggactgctggagaaattgaaggagcaggagtgtgacgtgaaagattacggggacttgcccttcgcggacatcccaaacgacagcccgtttcaaatcgtgaaaaatcctaggtccgtggggaaagccagcgagcagcttgctggtaaagttgccgaggtaaagaaaaatggacgtatcagcctggtgctcggaggcgatcattctttggctattggctctatttcaggtcatgcacgagttcatccggatcttggcgttatctgggtggacgctcacacggatattaacacacccctgactacgaccagcggtaacctgcatggacaacctgtgtcatttctcttgaaagaattgaagggtaaaataccagacgtaccagggtttagctgggtcaccccatgtatctccgcaaaggacatcgtttacattggcctccgggacgtagatccaggtgagcactacattctgaagacacttggaataaagtactttagtatgacggaagtggacaggctcgggatcggaaaggttatggaggaaaccctgtcgtacctcctggggaggaaaaagcgccctattcacctgtcattcgacgtggacggcctggatccaagctttactcctgcaacagggacacctgtggttgggggattgacttatagggagggtctatatattaccgaggaaatctacaaaaccggcctgctcagtgggctggacattatggaagttaaccccagtttgggcaagactcctgaagaggttactagaaccgtcaacacggcggtggccattacacttgcctgctttggattggcacgggagggcaatcacaaacccatcgactatctcaatccacccaag

SEQ ID NO: 462 - DNA, 966 bp, Artificial Sequence
  derived and/or modified sequence
atgagtgcaaagagccgtacaattggtataattggcgcccccttttcgaaaggacagccccgtggcggagttgaagagggaccaactgtgttacgaaaagccggcctacttgagaagctcaaagagcaggagtgcgatgtcaaggattacggagacttgcccttcgccgatattccgaacgactccccctttcaaatagtcaaaaacccgaggtctgtgggaaaggcttcggaacagctggccggaaaggtggccgaagtgaagaagaacggccgtatctctcttgtgttaggaggcgaccactcgttggccattggcagcatctcgggtcacgcccgtgtacatccagatttgggagtcatttgggttgatgcacatacagacataaatacaccgctaaccaccacctcgggcaaccttcacggccagccagtctcctttctcttgaaggagcttaaaggcaagatccccgacgtgccaggcttttcctgggtgaccccatgtatttccgccaaggatattgtgtacatcggtctgagagacgtggaccctggcgagcattacatcctgaagacgctgggcattaagtattttagcatgacggaagttgaccggttgggtatcggaaaggtgatggaggagacgctttcctacctcctgggccggaaaaagcggccaatccatctaagctttgatgtagatggcctggacccctccttcacaccggccacgggcactcccgttgtgggcggtctcacttatcgtgaaggcctttatataacggaggagatttacaaaacagggctcttatcgggtctggatatcatggaagtgaatccatcactgggcaagacgcccgaggaagtgactcggactgtgaacaccgccgtggccataacgttggcctgtttcggactggcccgcgaaggaaaccacaagcccatcgactatctaaatccaccgaaa

SEQ ID NO: 463 - DNA, 966 bp, Artificial Sequence
  derived and/or modified sequence
atgtcggccaagtcaaggactatcggcatcatcggtgcgccgttctcaaagggacagcctaggggaggcgtggaagaagggcctaccgtcctgcggaaggcaggccttcttgaaaagctgaaagaacaagagtgcgatgtcaaggactacggcgacctgccgtttgcggacattcctaacgactcgccgttccaaatcgtgaagaacccgcggagcgtggggaaggcatcggagcagctggctggaaaggtggcagaggtgaagaagaacggacggatctccctggtgctgggcggcgaccattccttggccatcggctcaatcagcggacacgcccgcgtgcatcccgacctgggggtcatttgggtagatgcgcacaccgacatcaacactccgcttaccacgacttccggtaacctccatggacagccggtgtcgttcctcctcaaggagctcaaaggcaagattccggatgtgccgggcttctcttgggtcactccgtgcatctcagccaaagacatcgtgtacataggactgcgagatgtcgaccctggggaacactacatcctgaaaacgttgggtatcaagtatttcagcatgactgaggtggataggctcggaatcggaaaagtgatggaggaaaccctttcatacctgctgggtcggaagaagcgtccaatacacctgtcgttcgatgtggacggcctggatccgtcctttacccctgccactggaaccccagtggtgggcggactcacctaccgggaaggactctacatcacggaggaaatctacaagaccggcttgcttagcggcttggatatcatggaagtgaatccgtccctgggaaaaaccccagaggaagtcacgcgcaccgttaataccgccgtggccatcactcttgcttgctttggccttgcgcgagaaggcaatcataagccgatcgactacctgaacccaccgaaa

SEQ ID NO: 464 - DNA, 966 bp, Artificial Sequence
  derived and/or modified sequence
atgtcagccaaatccagaactatcggtatcattggagcgcctttttccaaggggcagccccgtggaggagtggaagagggacctactgtgttgcgcaaagctggcctgctggagaaactaaaagagcaggaatgtgatgtgaaagactacggagaccttccatttgcagatatccccaacgactcaccttttcaaattgtaaaaaaccctcggagcgtcggtaaagcaagcgagcaattggctgggaaggttgccgaggtcaagaaaaatgggcgcatctctctagtgctggggggagaccattccctagcaattggctctattagcggacacgcaagagtgcatccagatctgggggtgatctgggttgacgcccataccgatatcaacactcccctgacgaccacgagtggaaacctgcacggacagccggtgtctttcttacttaaggagttgaagggcaaaattcccgacgtcccaggattttcctgggtcactccttgcatctccgctaaggacatagtttacatcggcctcagggacgtggatccgggtgaacactatattctcaagacgctcgggatcaagtacttcagcatgaccgaagtcgaccggctcgggatcggaaaggtcatggaagaaaccctgagctacctactcggccgcaagaaaagaccaatccacctgtcctttgatgtcgatgggctggaccccagctttacacccgcgacaggcacaccagtagtaggcggcctcacctatcgcgagggcctgtatattacggaagaaatttacaagacgggtctcctgagcggattagatatcatggaggtgaatccctcattaggaaagacacctgaagaggttactaggaccgttaataccgcagtagcaattacgctggcttgcttcggactcgctagggaagggaaccataagcctattgattacctaaaccccccaaag

SEQ ID NO: 465 - DNA, 966 bp, Artificial Sequence
  derived and/or modified sequence
atgagcgctaagagccgaacgattggcatcattggtgcaccttttagcaaggggcagccgcgcggaggtgtcgaagagggcccaacagtgttacgaaaagcaggactacttgagaaactgaaagaacaggagtgtgatgtaaaggactacggcgacctaccgtttgcagacatcccaaatgattcgccctttcagatagtgaaaaatccccgctcggtgggaaaagcttctgagcagctggctggaaaggtggcagaagtcaaaaagaacgggaggatctccctggtgctcggaggggatcatagtctggcgattggttccatttcagggcacgcccgcgtgcaccccgaccttggcgtcatctgggtcgacgcccacacggatataaatacacccctgacaactacatctgggaacctgcacggacagcctgtgtccttcctcctgaaggagctgaaaggaaaaattccagacgtgcccggattttcttgggtcaccccttgtatctccgccaaagacattgtctacatcggtctgagagacgtggatcctggagagcactacatcctgaagacactaggcatcaaatactttagtatgactgaggttgaccggctgggtataggaaaggtgatggaggagactctgtcatatttgctcggtaggaagaaaaggcccatccacctatcattcgatgttgatggacttgatccaagcttcaccccggccaccgggactccagttgttggcggactaacgtatcgtgaaggcctttatataacagaggaaatctataagactggactcctgtctggcttggacataatggaggtcaaccctagcctgggaaagacacctgaagaagtgacacggaccgtcaacaccgccgtggcaattacactggcatgcttcggtttggccagggagggaaatcacaagcccattgattatcttaatccacctaaa

SEQ ID NO: 466 - DNA, 966 bp, Artificial Sequence
  derived and/or modified sequence
atgtctgcaaagagtcgaactatcggcattatcggggcgcctttctctaaggggcagcccagggggggggtggaagaggggcctactgtgttgcggaaagctggcctgcttgaaaaactgaaagagcaagaatgcgacgtgaaggactatggcgacctcccattcgccgacatcccgaatgatagcccatttcagatcgtgaaaaatcccagatcagtgggcaaagcatctgagcaactcgcagggaaagtggcggaggtgaagaagaatggaaggattagtttagttctggggggtgaccatagtctggcgattgggagtatatctggacacgcgagagtgcaccccgacctcggcgtcatctgggtagatgcacacaccgacattaacactccacttaccaccaccagtggcaatctgcacggacagcctgtctcgtttctgttgaaggaacttaagggtaagatcccggatgtcccgggattcagctgggtgacaccttgtattagtgcgaaggacattgtgtacatcggtctgagggacgtggatcccggggagcattatattctgaaaacactagggatcaaatacttcagtatgacagaagttgacaggctgggcatcgggaaagttatggaggagacactcagctatttgctgggccgaaaaaaacgaccgattcacctcagcttcgacgtggacggtttggacccctcatttactccggccaccggaaccccagtcgtgggaggcttgacttaccgtgagggtctatatattactgaagagatttacaagacaggactgttgtccgggctggacattatggaagtgaacccaagcttagggaagacgccggaagaagtaacaaggacagtgaacacagccgtggcaataacattggcctgtttcggtctggcgagggagggcaatcacaagcctatagactacttgaaccccccaaaa

SEQ ID NO: 467 - DNA, 966 bp, Artificial Sequence
  derived and/or modified sequence
atgagcgctaagtcgcgcaccatcgggatcataggggccccatttagcaaaggacagccgagaggaggtgtggaggaaggaccaactgtgctgcggaaggctggactccttgagaagctcaaggaacaggagtgcgatgtcaaagactacggggacctgccctttgctgacatcccgaacgattcaccgttccaaatcgtgaagaacccgagatctgtcgggaaggcgtccgagcaacttgcgggcaaggtggctgaagtgaagaagaacgggaggatttctttggtcctcggaggtgatcactccctcgcgatcggaagcatcagcggtcatgctcgggtgcaccctgatctgggggtgatctgggttgatgcgcatacggatatcaatactccacttacgaccacgtccggcaacctccatggccagcccgtctccttcctgctcaaagaactgaagggaaaaatcccggatgtgccgggattctcatgggtgaccccatgcatcagcgccaaggatatcgtgtacatcggccttcgggacgtggatccgggagaacactacatcctgaaaaccctgggcatcaaatacttctcgatgacggaagtggaccgcctgggaatcggcaaggtgatggaggagactctctcctacctcttgggtcgcaagaagcggcctatccacctctccttcgacgtggacggcctcgacccgagcttcactcccgcaactggaactcctgtcgtgggaggcctgacttaccgggaaggtctgtacattaccgaagagatttacaaaactgggctgctgagcggactcgacatcatggaggttaatccgtctctgggcaagaccccggaagaagtgactcggacggtgaacactgcagtcgctatcaccctggcatgcttcgggctggcacgggagggaaaccacaaaccaatcgattacctcaaccctccgaag

SEQ ID NO: 468 - DNA, 966 bp, Artificial Sequence
  derived and/or modified sequence
atgagcgccaagtcccgcacgatcggaatcatcggagcccctttctctaaaggccagccgcgcgggggtgtggaggaaggaccaaccgtgctgagaaaagctggtctgctcgaaaagctcaaggagcaggagtgcgatgtgaaggactatggtgacctgccgttcgccgacattccaaatgattccccatttcaaatcgttaagaaccctcgctcagtgggaaaagctagcgagcaactggccggcaaagtggcggaggtcaagaaaaacggacgcatctcgctcgtcctgggaggtgatcattccctggcgatcggctcaatatcgggacatgcgagagtccacccggaccttggcgtgatctgggttgatgcccacactgacattaacaccccgttgactaccacctcgggcaacctgcatgggcagcctgtttccttcctcctgaaagaactgaaaggtaagattccagacgtgcccggcttcagctgggtgaccccttgcatttcggcgaaggatatcgtgtacatcggactccgggatgtggacccgggcgagcactatatcctgaaaactttggggattaagtatttctcaatgacggaggtggaccggctcgggatcgggaaggtgatggaagaaaccctcagctatctgctgggacgtaagaagcgcccgattcacctctcgtttgacgtggacgggctggacccatccttcactccggctaccggaaccccggtagtcggagggctcacctaccgggaagggctctacatcactgaggagatttacaagactgggctcttgagcggactggatatcatggaggtgaacccgtccctgggcaaaaccccagaggaagtcacgcggacggtcaacaccgccgtggccattactctggcatgtttcggactggcacgggaaggaaatcataagcctattgattacctcaatccgccgaag

SEQ ID NO: 469 - DNA, 966 bp, Artificial Sequence
  derived and/or modified sequence
atgagcgcgaagtcccgcactatcggtatcatcggcgctccattcagcaagggccaacctcgcggaggcgtcgaagagggaccgaccgtcctgcgaaaggccggcctcctggaaaagctgaaggagcaagaatgcgacgtcaaggactacggtgacctgccgttcgcggacataccgaacgattcgccattccagatcgtgaagaacccccggtccgtcggaaaggcatcggagcagttggcgggaaaagtggccgaggttaagaaaaacggacggatctcactcgtgctcggaggggaccactccctcgctatcggatccatcagcggacacgcccgggtgcaccccgatctcggagtgatttgggtcgacgcacataccgatatcaacaccccactcaccaccacctccggaaatctgcacggtcagccagtgtcgtttcttctgaaggaactgaagggaaagatcccggatgtccccggctttagctgggtgaccccatgcatttccgcaaaggacatcgtgtacatcggactgcgggatgtggatcctggggagcactatatcctgaaaactctggggatcaagtacttctcgatgactgaagtggaccggttgggaatcggaaaggtcatggaggagactctgtcgtatctcttgggaaggaagaagcggccaatccacttgtccttcgatgttgatggtctggatccttcattcactcctgcaactgggactccagtggtgggagggcttacttaccgggagggattgtacatcaccgaagagatatacaagaccggactccttagcggcctggacatcatggaagtgaacccgagcctgggtaaaactccagaggaagtgaccaggactgtcaataccgccgtggccatcactctggcctgctttggtctggcccgggagggcaaccataagccgatcgactacctgaatccaccgaag

SEQ ID NO: 470 - DNA, 966 bp, Artificial Sequence
  derived and/or modified sequence
atgtctgcaaagagcaggacaatcggaattattggagcccccttctccaagggccagcctcgcggtggcgtcgaagaaggccctactgtgcttaggaaggctggcctgcttgagaagctcaaggagcaagagtgcgatgtcaaagattacggcgatctcccattcgccgacatccccaacgacagtcctttccagattgtaaagaatcctaggagcgtgggaaaggcctctgagcaactggcaggaaaggtggctgaggttaagaagaacggcaggatttctcttgttctcggtggtgaccacagcctggctatcggaagtatctccggacatgccagggttcacccagacctgggagttatctgggtcgatgcacacacggacatcaatacaccactcaccaccacctccgggaaccttcacggccaaccagtatccttcttgctgaaggaactcaagggcaagattcctgatgtaccaggcttcagctgggtaaccccatgtatctctgcaaaggatattgtgtatatcggtctgcgcgatgtggacccgggcgaacattacatccttaagactctggggatcaagtacttttcaatgacagaggtggaccgcctgggcatcggtaaggtgatggaggagacgctgtcatatctgctcgggagaaagaagcgaccaattcatctttcttttgatgtcgacggtttggacccaagtttcactccggccacggggactcccgttgtgggaggtctgacatacagagaggggctctatatcactgaggagatctataagacaggccttctttccggcctcgacattatggaggtcaaccccagtctcggaaagactcctgaagaagtgaccaggactgtcaacacagcagtggccataactcttgcatgctttggacttgcaagggaggggaatcacaaacccattgactatctgaacccccctaag

SEQ ID NO: 471 - DNA, 966 bp, Artificial Sequence
  derived and/or modified sequence
atgtctgccaagagtcgcaccatcggcattattggggcgcccttttctaagggccagccacgaggtggcgtggaggaggggccaaccgtgctacgcaaagcagggctcttggaaaagctgaaggaacaggagtgcgacgttaaagattatggagatctgccttttgcagatatccccaatgattccccgtttcaaatcgtgaaaaaccccagatcagtagggaaagcctcagagcaattggccggtaaagtggccgaagtgaaaaaaaacggcaggattagcctcgttcttggaggcgaccactcgctggccattggttccatctctggacacgcgcgggtgcatccggacctgggcgtgatctgggtggacgcccataccgacatcaacaccccgctcacaactacaagcgggaaccttcacggacagccagtgtcattccttctgaaagaactcaaaggtaagatacccgatgttcctggtttctcgtgggtcactccctgtatttccgcgaaagatatcgtgtacatcggcctgagagatgtagatccaggggagcattatatcctgaagactcttggtattaagtatttctccatgactgaagtcgataggctgggtattggaaaggtaatggaagagaccctctcctatctactgggccggaagaagcggccaatacatttatccttcgatgttgatggtctggatccttctttcacacccgccacaggaaccccagtggttggagggctgacttatcgagaaggtctctatattacagaggaaatctacaagactggtctgctgtcaggactggatataatggaggtcaaccccagccttggcaaaacgcccgaagaagtgacgcggactgtaaataccgcggtcgccatcacccttgcttgtttcggcttggcccgggaggggaaccataaaccgattgactatctaaacccccccaag

SEQ ID NO: 472 - DNA, 966 bp, Artificial Sequence
  derived and/or modified sequence
atgtctgctaaatcccgcacgatcggtattataggggcccccttttctaaaggacaacctaggggtggagtggaggaaggtccaactgtgctgcggaaagccggtctgttggaaaaattgaaagaacaggaatgtgatgttaaagactacggtgatcttccctttgcagatatccctaacgactccccctttcagattgtcaagaaccccagaagcgtcggcaaggcctctgaacagttggccggaaaggttgccgaagtgaagaagaacggtaggatctccctcgtcctgggcggagatcatagcctggccattggcagcatttccggacacgctagagttcaccccgacctcggagtgatctgggttgatgcacacactgacatcaatacacccctgaccactacctctgggaacttgcacgggcagcctgtgtccttcctcctcaaagagcttaagggtaaaatccctgacgtgccagggttttcttgggtgaccccatgtatcagcgctaaggacattgtgtatattggtctgcgcgatgtggacccgggtgaacattacatcttaaagacattaggcataaagtatttctccatgaccgaagttgatcgcctgggcatcggaaaagtaatggaggaaacactctcctacctgctgggaaggaaaaaaagacctatacacttgtccttcgacgtggatggcctagacccgagcttcactcctgccaccgggacccctgtggtgggagggttgacatatagagagggattgtatatcaccgaagagatctataaaactgggttgctgtcagggttggacatcatggaagtcaatccctccctgggtaaaacacctgaggaagtgaccagaacagtgaatacagctgtggctattaccctggcctgctttggcctggccagagaggggaaccacaagcctatcgactatttgaatcccccgaag

SEQ ID NO: 473 - DNA, 966 bp, Artificial Sequence
  derived and/or modified sequence
atgtctgctaaaagcagaaccatcgggatcattggtgcacccttctctaagggccagcctcggggaggcgtcgaggagggtccgactgtcctcaggaaggctggcttgctggagaaactgaaagaacaagaatgtgacgtcaaggactacggggacctgccgttcgcagatataccaaacgattcaccgtttcagatcgtgaagaacccacgatctgtgggcaaagccagcgagcagttggccggtaaagttgcagaggtgaagaagaacggcagaatcagccttgtccttggaggagaccattcactagcgatcggttctatctcgggccatgcacgcgtgcaccctgacctaggagtgatttgggtcgatgcccacacggacataaacacccccctgaccaccacaagcgggaatttgcatggccaacctgtgagttttctgcttaaggaacttaaaggtaagattccagacgtccctggattttcctgggtgaccccctgcatatcagcgaaggatattgtttacatcggactcagggatgtcgatccgggggagcattacattttaaagaccttaggcattaaatacttctcaatgactgaggttgatcgactgggtatcgggaaggtgatggaagaaacacttagttacctactcggtcgaaagaaacgtcccatacatctcagctttgatgtagacgggctggatcccagttttacccctgccactggcaccccggtggtggggggactaacctacagagaaggattgtacattaccgaggagatatataaaaccggccttttgtcgggtctagacattatggaggtgaatccgtctctgggaaaaacgccggaagaagttacacgcactgtgaatacagccgtggccatcactttggcatgctttggacttgcccgcgaaggcaatcacaaaccaatagactatctgaatccgcccaag

SEQ ID NO: 474 - DNA, 966 bp, Artificial Sequence
  derived and/or modified sequence
atgtcggcaaagagccgtactatagggattattggagcacctttctcaaaaggacaacctcgcgggggcgtcgaggaaggtccaaccgtgctcagaaaggcgggactcctcgagaaactgaaagagcaggaatgtgacgtgaaagactacggagatctcccatttgcagatataccgaacgattcaccatttcagattgtgaagaacccgaggtcggtgggtaaggcatcagaacaacttgcggggaaagtggcagaagtgaaaaagaatggtagaatctccctcgtgcttgggggtgaccattccttggcaatcggatcgatctccgggcatgcacgggtgcatcccgatctgggtgtgatttgggtcgacgcacacaccgatatcaacactcctctgaccactacttcgggtaacctgcatggtcagccagtctcatttctcctcaaggaacttaaggggaaaatccccgacgtgcctggattttcgtgggtgaccccatgtatctccgcaaaggacattgtgtacatcggtctgcgcgatgtggatccaggcgaacactacatactgaaaactctgggcatcaaatacttctctatgactgaagtggatcggctgggaatcggaaaggtgatggaagaaactctctcctaccttcttggacgtaagaagcggcccatacatctgtcattcgacgtcgacggtcttgatccttcatttactccggcaaccggtactcctgtggtgggcggattgacctaccgcgaaggactgtacattactgaagaaatctacaagacgggccttctgagcggattggatatcatggaggtgaacccttcgcttggcaagactcctgaagaggtgacccgcaccgtcaatacggcagtcgcaatcacgctggcatgcttcgggctggcacgtgaggggaatcataaaccaattgactaccttaatccacccaag

SEQ ID NO: 475 - DNA, 966 bp, Artificial Sequence
  derived and/or modified sequence
atgtcagcaaagagcagaactatcggaataatcggtgccccattctcgaagggacaacctcgaggaggggtggaggaaggtccgaccgtgctgcgcaaggcagggcttctcgaaaagctgaaagaacaggaatgtgacgtcaaagattacggagatctgcctttcgccgatatccctaacgactccccatttcaaatcgttaagaaccctcgttcggtcgggaaggcttccgaacagcttgctggtaaggttgcggaggtgaaaaagaacggtcgtatttccttggtgctgggtggagatcatagcttggcaatcggctcgatttctggacatgcacgagtccatccagatctgggagtcatttgggtggacgcgcacactgacattaacacccccctcactaccacttccggcaaccttcatggtcaaccagtgtccttcctgcttaaggagttgaagggaaagataccagatgtccctggattttcgtgggtcactccctgtatttccgcaaaggatatcgtctatattggactgagagacgtggatccaggagagcactacattcttaagaccctgggtattaagtactttagcatgaccgaggtcgatcgccttggaattggaaaggtgatggaagaaactttgtcctacctgctgggcaggaagaagcgaccgattcacctttcctttgatgttgatggcctggatccgagcttcaccccagcaactggaactcccgtggtcggagggctcacttatcgtgaaggactttacataacggaggagatatacaaaaccggccttctctctggtctggacattatggaggttaatccctcgctcggcaagacgcccgaagaagtcaccagaaccgtgaacaccgcagtggcaatcactcttgcctgctttgggcttgcacgggagggtaatcacaaaccaatcgattacctgaatcctccaaaa

SEQ ID NO: 476 - RNA, 1112 nt, Artificial Sequence
  derived and/or modified sequence
gggaaauaagagagaaaagaagaguaagaagaaauauaagagccaccaugucagcaaagucgagaacuaucgggauuaucggugcuccuuucagcaaggggcaaccccgagguggaguggaggaaggccccaccguccuucggaaagcaggacuuuuggagaaacucaaagagcaggaaugcgaugucaaagauuauggagaucugcccuuugcagacaucccaaacgauucaccguuucagauugugaaaaauccgcgcuccguagggaaggcgagcgaacagcuugcggguaaagucgcggaggugaagaaaaauggacgcauuucgcucguguugggaggugaucauucguuggcuaucggauccaucuccgggcacgcgagaguacaccccgaucuuggugucaucuggguagacgcgcacaccgacaucaacacaccccugacgacaacuucggggaaccuucacggacagccugucucguuccuccucaaggagcuuaagggaaagauuccggacguaccgggauuuucgugggugacgcccuguaucucagccaaggacauugucuacaucggucugcgcgauguggacccaggcgagcauuacauccucaagacccuugguauuaaguacuucuccaugacggaaguggacagguuggguauuggaaaagucauggaagagacuuugucauaccucuugggccggaagaaaagaccgauucaucucuccuucgacguagauggacuugacccaagcuuuacgccugccacggggaccccugucguaggugggcugacauauagggaagggcucuauaucacggaggagaucuacaagaccggcuugcugucgggguuggauaucauggaggugaauccuucacucgggaaaacacccgaggaagugacgcggacagugaacacagccguggcgaucacgcuugcgugcuucggacuggccagggaagggaaccacaagccgauugacuauuugaauccgcccaagugauaagcugccuucugcggggcuugccuucuggccaugcccuucuucucucccuugcaccuguaccucuuggucuuugaauaaagccugaguaggaag

SEQ ID NO: 477 - protein, 13 aa, Artificial Sequence
  derived and/or modified sequence
HSVPVYFPAQDPR

SEQ ID NO: 478 - protein, 533 aa, Artificial Sequence
  derived and/or modified sequence
MGPRGAASLPRGPGPRRLLLPVVLPLLLLLLLAPPGSGAGASRPPHLVFLLADDLGWNDVGFHGSRIRTPHLDALAAGGVLLDNYYTQPLCTPSRSQLLTGRYQIRTGLQHQIIWPCQPSCVPLDEKLLPQLLKEAGYTTHMVGKWHLGMYRKECLPTRRGFDTYFGYLLGSEDYYSHERCTLIDALNVTRCALDFRDGEEVATGYKNMYSTNIFTKRAIALITNHPPEKPLFLYLALQSVHEPLQVPEEYLKPYDFIQDKNRHHYAGMVSLMDEAVGNVTAALKSSGLWNNTVFIFSTDNGGQTLAGGNNWPLRGRKWSLWEGGVRGVGFVASPLLKQKGVKNRELIHISDWLPTLVKLARGHTNGTKPLDGFDVWKTISEGSPSPRIELLHNIDPNFVDSSPCPRNSMAPAKDDSSLPEYSAFNTSVHAAIRHGNWKLLTGYPGCGYWFPPPSQYNVSEIPSSDPPTKTLWLFDIDRDPEERHDLSREYPHIVTKLLSRLQFYHKHSVPVYFPAQDPRCDPKATGVWGPWM

SEQ ID NO: 479 - DNA, 1745 bp, Artificial Sequence
  derived and/or modified sequence
gggaaataagagagaaaagaagagtaagaagaaatataagagccaccatggggccaagaggagcggcttcactcccgcgaggaccaggacctaggcgattgcttctccccgtggtccttcctctgctgcttcttttgcttctcgcgccacctggttcgggtgcgggagcctcaagaccgccccacctcgtatttctgctcgccgatgacctcgggtggaatgacgtagggttccacggatcgcgaatccgaacgccgcatcttgatgcattggcagcaggtggagtacttttggataactactacacgcagccattgtgtacaccctcgaggagccagttgctgactggccgctaccagatccggaccggacttcagcaccagatcatctggccctgtcagccgtcatgtgtcccccttgatgagaagcttttgcctcagctgcttaaagaagcggggtatacgacacatatggtggggaagtggcacctcggaatgtacagaaaagaatgccttcccaccagaaggggattcgatacctacttcggttatctgctggggtcagaggactactactcccacgaacgctgcacgcttatcgatgcattgaacgtaacccgctgcgccctcgactttcgggatggagaggaagtcgccacagggtataagaacatgtattcgacaaacatcttcacgaaaagggccattgcgctgattacgaatcatcccccggaaaagcccctctttctctacttggcgctgcagagcgtgcatgagcctctgcaagtgcccgaggagtatcttaaaccctacgatttcatccaagacaagaaccggcaccactacgcgggaatggtgtcgttgatggatgaggcggtcggaaatgtgacagcggctttgaagtcgagcggactctggaacaatacggtgttcatcttttcaactgataatgggggacagacgttggcgggtggtaataactggccccttaggggaagaaaatggtcgctgtgggaaggtggagtgaggggtgtcgggtttgtcgcgagccccttgctgaaacaaaagggggtcaagaaccgagaattgattcatatcagcgactggctgccgaccctcgtcaagctggcacgcgggcacacaaacggtacgaagccattggacgggtttgacgtgtggaaaacaatctccgagggctcgccttcgccgaggattgagttgctccacaacatcgaccccaactttgtagacagctcaccgtgcccccgaaattcgatggcgcctgctaaagatgatagcagcctgccagagtactccgcgttcaacacttcagtgcatgcagcaattcgccacggaaattggaagcttctgactgggtatcctggttgtggctattggttcccaccgccgtcgcagtataatgtatcggagattccgtcctcggatccgccgactaaaacattgtggttgttcgacatcgaccgcgaccccgaagagcggcacgacctttcgagggaatatccccatattgtgacgaagttgcttagccggttgcagttctaccataaacacagcgtaccggtgtattttcctgcccaagatcctcgctgcgaccccaaggccacgggagtctggggtccctggatgtgataagctgccttctgcggggcttgccttctggccatgcccttcttctctcccttgcacctgtacctcttggtctttgaataaagcctgagtaggaag

SEQ ID NO: 480 - DNA, 1602 bp, Artificial Sequence
  derived and/or modified sequence
atgggccccagaggcgccgccagcctgcccagaggccccggccccagaagactgctgctgcccgtggtgctgcccctgctgctgctgctgctgctggccccccccggcagcggcgccggcgccagcagacccccccacctggtgttcctgctggccgacgacctgggctggaacgacgtgggcttccacggcagcagaatcagaaccccccacctggacgccctggccgccggcggcgtgctgctggacaactactacacccagcccctgtgcacccccagcagaagccagctgctgaccggcagataccagatcagaaccggcctgcagcaccagatcatctggccctgccagcccagctgcgtgcccctggacgagaagctgctgccccagctgctgaaggaggccggctacaccacccacatggtgggcaagtggcacctgggcatgtacagaaaggagtgcctgcccaccagaagaggcttcgacacctacttcggctacctgctgggcagcgaggactactacagccacgagagatgcaccctgatcgacgccctgaacgtgaccagatgcgccctggacttcagagacggcgaggaggtggccaccggctacaagaacatgtacagcaccaacatcttcaccaagagagccatcgccctgatcaccaaccacccccccgagaagcccctgttcctgtacctggccctgcagagcgtgcacgagcccctgcaggtgcccgaggagtacctgaagccctacgacttcatccaggacaagaacagacaccactacgccggcatggtgagcctgatggacgaggccgtgggcaacgtgaccgccgccctgaagagcagcggcctgtggaacaacaccgtgttcatcttcagcaccgacaacggcggccagaccctggccggcggcaacaactggcccctgagaggcagaaagtggagcctgtgggagggcggcgtgagaggcgtgggcttcgtggccagccccctgctgaagcagaagggcgtgaagaacagagagctgatccacatcagcgactggctgcccaccctggtgaagctggccagaggccacaccaacggcaccaagcccctggacggcttcgacgtgtggaagaccatcagcgagggcagccccagccccagaatcgagctgctgcacaacatcgaccccaacttcgtggacagcagcccctgccccagaaacagcatggcccccgccaaggacgacagcagcctgcccgagtacagcgccttcaacaccagcgtgcacgccgccatcagacacggcaactggaagctgctgaccggctaccccggctgcggctactggttccccccccccagccagtacaacgtgagcgagatccccagcagcgacccccccaccaagaccctgtggctgttcgacatcgacagagaccccgaggagagacacgacctgagcagagagtacccccacatcgtgaccaagctgctgagcagactgcagttctaccacaagcacagcgtgcccgtgtacttccccgcccaggaccccagatgcgaccccaaggccaccggcgtgtggggcccctggatgtag

SEQ ID NO: 481 - DNA, 5327 bp, Artificial Sequence
  derived and/or modified sequence
ctgccacaggctgggctcttgtgctagaaatgacttgctagctagacatcatggttcaggatctgagtcagaggtttaaccatttataagcttttttcttatgaaaaattggcactaattataatgtctaactgtcagagttgttgcaggctttacaggagacgcgggctgtgaagatgctttgtaaattgtgaagcgttattaaagaacacatcttttttttttaggaaaccacagtgcaaatttaattgccggggaagataacgggccttggtgccctccaagcgtcagctgagtttccaagaagccgggcagcgggcgcccgcgggttcgtctctggctcctcctccgccacagcagccgggggcccgggtcggaggcggcgggggccgagcgcccggcctcgcaagcccacggcccgctgggggtgccgtcccgcgccggggcggagcaggccccggcagcccagttcctcattctatcagcggtacaaggggctggtggcgccacaggcgctgggaccgcgggcggacaaggatgggtccgcgcggcgcggcgagcttgccccgaggccccggacctcggcggctgctcctccccgtcgtcctcccgctgctgctgctgctgttgttggcgccgccgggctcgggcgccggggccagccggccgccccacctggtcttcttgctggcagacgacctaggctggaacgacgtcggcttccacggctcccgcatccgcacgccgcacctggacgcgctggcggccggcggggtgctcctggacaactactacacgcagccgctgtgcacgccgtcgcggagccagctgctcactggccgctaccagatccgtacaggtttacagcaccaaataatctggccctgtcagcccagctgtgttcctctggatgaaaaactcctgccccagctcctaaaagaagcaggttatactacccatatggtcggaaaatggcacctgggaatgtaccggaaagaatgccttccaacccgccgaggatttgatacctactttggatatctcctgggtagtgaagattattattcccatgaacgctgtacattaattgacgctctgaatgtcacacgatgtgctcttgattttcgagatggcgaagaagttgcaacaggatataaaaatatgtattcaacaaacatattcaccaaaagggctatagccctcataactaaccatccaccagagaagcctctgtttctctaccttgctctccagtctgtgcatgagccccttcaggtccctgaggaatacttgaagccatatgactttatccaagacaagaacaggcatcactatgcaggaatggtgtcccttatggatgaagcagtaggaaatgtcactgcagctttaaaaagcagtgggctctggaacaacacggtgttcatcttttctacagataacggagggcagactttggcagggggtaataactggccccttcgaggaagaaaatggagcctgtgggaaggaggcgtccgaggggtgggctttgtggcaagccccttgctgaagcagaagggcgtgaagaaccgggagctcatccacatctctgactggctgccaacactcgtgaagctggccaggggacacaccaatggcacaaagcctctggatggcttcgacgtgtggaaaaccatcagtgaaggaagcccatcccccagaattgagctgctgcataatattgacccgaacttcgtggactcttcaccgtgtcccaggaacagcatggctccagcaaaggatgactcttctcttccagaatattcagcctttaacacatctgtccatgctgcaattagacatggaaattggaaactcctcacgggctacccaggctgtggttactggttccctccaccgtctcaatacaatgtttctgagataccctcatcagacccaccaaccaagaccctctggctctttgatattgatcgggaccctgaagaaagacatgacctgtccagagaatatcctcacatcgtcacaaagctcctgtcccgcctacagttctaccataaacactcagtccccgtgtacttccctgcacaggacccccgctgtgatcccaaggccactggggtgtggggcccttggatgtaggatttcagggaggctagaaaacctttcaattggaagttggacctcaggccttttctcacgactcttgtctcatttgttatcccaacctgggttcacttggcccttctcttgctcttaaaccacaccgaggtgtctaatttcaacccctaatgcatttaagaagctgataaaatctgcaacactcctgctgttggctggagcatgtgtctagaggtgggggtggctgggtttatccccctttcctaagccttgggacagctgggaacttaacttgaaataggaagttctcactgaatcctggaggctggaacagctggctcttttagactcacaagtcagacgttcgattcccctctgccaatagccagttttattggagtgaatcacatttcttacgcaaatgaagggagcagacagtgattaatggttctgttggccaaggcttctccctgtcggtgaaggatcatgttcaggcactccaagtgaaccacccctcttggttcaccccttactcacttatctcatcacagagcataaggcccattttgttgttcaggtcaacagcaaaatgcctgcaccatgactgtggcttttaaaataaagaaatgtgtttttatcgtaatttatttccccccagccattgctcactctgtctagacttcctgccacttccaattcttctgtggcttttcctgcctttccttttgacctcagtagtcctatccctgggaaggccactttgcttctctacctgagcacccctgatttctggaacgctgctgagccctgccttacttttgcccctagggctgaagctagaggcctccccgtaataggcggtggagttgctctgtgaggatgttcatggtagacactaagagggctgggtgggagatgcttggctctgtggcatctgttcagcgaggcttttcctatattgcatggagttagtcattgtgattgtagctttatttcataatatattaagacttgcactgctatttactagcagtgagaagaaacctcaggaaaggatatgaaaaagcaagtggccagtgtctgggatactgggccttggtaaagcagaggagggcacacccacagtcctcttattctctgttttactgcttgttttgaggttctggggtctggcaaagaggatgcagtttgacacctgcagccctttctcaatcccactaatgtcttactaatgtggaacagtccatattagctccagagagtgtcaaacccagagaaatgtgtgcaaaaatgatactcttttctgcattagccccaccattgtgttcaccaatgcttggaacactgcctgaaggcactcattttttaatttttattttatttttaattttttatatctttatgagacgatctcactctgtcaccaggttggagtacagtggtacaatcacaactcaccgtagcctcaaactcctgggctcaagtgattctcccacctcaggcacccaaatagctggaactacaggcatataccgccacacccagctaattttattttttgaaaagacaaggttccctatgttgcccagctggtcttaaactcctgggctccagcaattatcccagcttgggctccaaaagtgctgggattacaggcatgagtcaccatgcctggcctcattttttaaaacaaatgaataaatggacaaatgagtaaatgagaaagtctcacaccatgaaagatgctagtccaatgagctgaatacagaggtaatataaatgtcttccagctgttgcttttctgttctcaagctgcccctcctggggtaggagcataatctacatcactgggcagtcacaggacactctatagcaaggttgtagcgtcctctccagtggggggagaaaaggaactgtgcctaccaaaggtactctcttgtcagcaatttccatttctatactttatgggacactagaaactaaaagcaacaaataatctgatataagtccttgtatagtcatccttcaattcagtagcaatattttctggtcactactaacctgtattgtattaaaatgagactattggaaggaaatggtgctaaaactaataacatctcttaccaacctttacccaactcctgggttggcaaacagctgaccaaactgccatcacctcccacttggaagtgtatggccgacagcatgaaatagctgagcccagatgttccttctgcatcctccgaatcccagggctgggtgtaggtagccgttggaggccatcgctacagggcacctatctgttatcgctgctgtcctcccaacagctgtctccagttctagttccttggttttcaggcacagtgggggatgttctgcacccagtggacttcaaaagagttttgaagacttaattttttgtaaaacaagtacttgagattttggtttatccataatagaatgtatttcattagattctctgattctatataagaatgtgaaaagattgatatattgttgttagaaataatgttatttctttccaattttttttttttttttttttgagatggagtctcgctctgtcacccaggctggagtgcagtggtgtgatctcggctcactgcagcctctaactcccaggttcaagctattctcctgcctcagcctcccaagtagctggattacaggcatacaccaccacgcctggctatgttttgtatttttcgtagagatagggtttcaccatgttggccaggctggtctcaaactcctgacctcaagtgatccacccacttcagcttcccaaagcactgggattacaggtgtgagccactgtgcccggcaaatttttttacctttacagaaggttttgcttatttaattgtgagctcatttttctttgttacttttgtccccccagatttgggggacaaaataaaattaatcttttaaaatgtgtcagccatatgtatggggcttccatttggggtgaggagaaagttctggaactagatagtggtcatggttatacaacatcataaatgcaattactgccactgaattgtatgttttaaagtggttaaaatgttaagttttatgttttattacaatttttaaatgtgtcaaccaactttatagtacataaattatatctcagtaaagctgttaaataaataaatatagtaaaaattttagaactaaaaaaa

SEQ ID NO: 482 - DNA, 1602 bp, Artificial Sequence
  derived and/or modified sequence
atggggcctaggggcgctgcgagcttgcctcgcggacccggcccccgtcggctgctgctacccgttgtgctcccattgctgctcctgttactccttgctccacccgggtccggcgccggcgccagtcggccaccgcatctggtttttctcctcgctgacgacctcggctggaatgacgtaggcttccatggcagtagaattcgtactccgcacttggacgcactggcggccgggggcgtgctgctcgataattactatacacaacccctctgcaccccaagccgctctcagctgctgaccggaaggtatcagatcagaaccgggctgcagcaccaaataatttggccctgtcagccaagttgtgtccctctcgacgagaagttgttgcctcagttacttaaagaggccggatacactacccatatggtgggcaaatggcacttgggcatgtacaggaaagagtgcctaccaacaagaagaggtttcgacacctatttcggctacttattaggcagtgaggactattactcacacgaaagatgtacactcatcgatgccttgaatgtcacaagatgtgctctcgatttccgcgatggtgaggaagtggcaaccggatacaagaatatgtattctactaacatctttacaaaaagagctatcgcactgattacgaaccacccacccgagaaacccctgtttctctacctcgccctacagtccgtacacgaaccactccaggttccagaagaatacctgaaaccctatgacttcatccaggataaaaacaggcatcattatgccggtatggtctcattgatggacgaagctgtaggcaatgtcacagcagctctgaagagctccgggttgtggaacaatactgtcttcattttcagtaccgacaacggcggccaaactctggctggcgggaacaattggcccctgagggggcggaagtggtcgctgtgggagggaggggttagaggagtgggatttgtcgctagtccactcttaaagcagaagggcgtcaagaatcgtgaactgatacatatttctgattggctgcctactctagttaagctggctagggggcacaccaacgggactaagcctctggatggctttgacgtatggaagacaatttccgaaggttcaccaagccctagaatagaactgctgcataatattgaccctaacttcgtggattcttccccgtgccctcgcaattccatggctcctgccaaagatgattcgtctctgcccgagtactctgcctttaatacatcagtgcacgccgcaattaggcatggcaactggaagctgctcaccggatatccagggtgcgggtactggttccccccgccaagccaatataatgtgagcgagataccgagcagcgaccctcccactaaaacactgtggctgttcgatatcgatagggacccagaagaaagacatgacctcagccgggagtatccacacatagtaactaagctgctgtcccggctgcagttttatcataaacactctgtgcccgtgtatttccccgcccaagacccccggtgcgatcctaaggctaccggggtgtggggtccttggatgtag

SEQ ID NO: 483 - DNA, 1602 bp, Artificial Sequence
  derived and/or modified sequence
atgggcccccggggggcagcctctttgcccaggggacccggaccgaggcggcttttgcttccagtcgtgctaccgttactgctcctattgctgcttgccccacccggaagtggcgcgggcgcttcgcgcccaccccacttggtattcctgttagccgacgacctggggtggaacgatgtgggctttcatgggtctcggatcaggactcctcacctcgacgcactggcggctggaggcgtgctcttggataattactatacacaaccgctctgtaccccctcaagaagccaacttttgacaggccgataccaaattcgcacgggcttgcaacaccaaatcatctggccttgtcaacccagctgcgtgcctctcgacgagaaactgctgccccagctgctaaaggaagccggatatactacccatatggtcggcaagtggcacctgggaatgtacaggaaggagtgtttacccacacgacgcggatttgatacatactttggatatctgttgggctcagaagattattatagccacgagaggtgtacccttattgatgccctgaatgtcacgcgctgtgctctggacttcagggacggcgaggaagtggcaacaggttacaaaaacatgtatagcaccaacattttcacaaagcgtgcaatcgctctgatcacaaatcaccccccagagaaacctcttttcctttatctggcactgcagtctgtgcatgagcccttacaagtccctgaggaatatcttaaaccctacgacttcatccaggataagaacagacaccattatgcagggatggtttccctaatggatgaagccgtgggcaacgtaaccgctgctctgaagtccagcggcctttggaacaacaccgtttttattttctctacggacaacggcggtcagactttggcaggcgggaataactggcctctcagaggacggaagtggtctctgtgggagggcggggttcgaggggtgggatttgtggcctcacctctattgaagcagaaaggggtgaaaaatcgcgaactgatccacatctccgactggctccctactttggtgaagctggccagaggccataccaacggtacaaaaccactggacggtttcgatgtatggaaaactatctcggagggctcaccttcccccagaattgagcttctgcacaacatagatcctaactttgtggatagcagtccctgtccaagaaatagcatggccccagccaaggatgactcttctctgccagagtatagtgcctttaatacctcagtccacgccgccatccgacacggcaactggaagctgctgaccggttacccaggttgcggttattggtttcctcctcctagtcagtataatgtttcagagatcccctcaagcgaccctcctactaagacactttggctgttcgatattgatcgcgacccggaggaacgccatgacctcagccgcgaatatccacatatcgtgaccaaactactaagccgcctccagttttaccataaacattccgtgccggtttacttccctgcccaggacccaaggtgtgaccctaaggccactggagtctgggggccgtggatgtag

SEQ ID NO: 484 - DNA, 1602 bp, Artificial Sequence
  derived and/or modified sequence
atgggccccaggggggccgccagcctgccccggggccctggcccccggcggctgctgctgcctgtggtgctgcccctgctgctgctgctgctgctggcccctcctggcagcggggccggggccagccggcccccccacctggtgttcctgctggctgatgacctgggctggaatgatgtgggcttccacggcagccgcatccgcaccccccacctggatgccctggccgccggcggcgtgctgctggacaactactacacccagcccctgtgcacccccagccgcagccagctgctgaccggccgctaccagatcagaacaggcctgcagcaccagatcatctggccctgccagcccagctgtgtgcccctggatgagaagctgctgccccagctgctgaaggaggccggctacaccacccacatggtgggcaagtggcacctgggcatgtacaggaaggagtgcctgcccacccggcggggctttgacacctacttcggctacctgctgggcagcgaggactactacagccatgagcgctgcaccctgattgatgccctgaatgtgacccgctgtgccctggacttcagagatggagaggaggtggccaccggctacaagaacatgtacagcaccaacatcttcaccaagagggccatcgccctgatcaccaaccaccccccagagaagcccctcttcctgtacctggccctgcagagcgtgcatgagcccctgcaggtgcctgaggagtacctgaagccctatgacttcatccaggacaagaacagacaccactacgccggcatggtgtccctgatggatgaggccgtgggcaatgtgacagctgccctgaagagcagcggcctgtggaacaacacagtgttcatcttcagcacagacaatggaggccagaccctggccggcggcaacaactggcccctgcggggcaggaagtggagcctgtgggagggcggcgtgcggggcgtgggctttgtggccagccccctgctgaagcagaagggcgtgaagaaccgggagctgatccacatcagtgactggctgcccaccctggtgaagctggcccggggccacaccaacggcaccaagcccctggatggctttgatgtgtggaagaccatcagcgagggcagccccagccccagaattgagctgctgcacaacatcgaccccaactttgtggacagcagcccctgccccagaaattccatggccccagccaaggatgacagcagcctgcctgagtacagcgccttcaacacctctgtgcatgctgccatcagacatggcaactggaagctgctgaccggctacccaggctgcggctactggttccccccacccagccagtacaacgtgtctgagatccccagcagtgacccccccaccaagaccctgtggctgtttgatattgaccgggaccctgaggagagacatgacctgagccgggagtacccccacatcgtgaccaagctgctgagccggctgcagttctaccacaagcacagcgtgcctgtgtacttccctgcccaggacccccgctgtgaccccaaggccaccggggtgtggggcccctggatgtag

SEQ ID NO: 485 - DNA, 1602 bp, Artificial Sequence
  derived and/or modified sequence
atgggcccccggggcgccgccagcctgccccggggccccggcccccgccggttgctgttacctgtggtacttccgctgctcttgctacttctgctggcaccgccagggagtggggccggagcctccagaccaccccacctggtgttcctcctcgcggacgatctgggctggaacgatgtggggttccatgggagtaggattcgaactccccaccttgacgcgcttgccgccgggggcgtgctgttagataactactacacccagcctctctgcacgccctctagaagtcaactcctcaccggacgctatcagattaggactggcttgcaacatcagatcatttggccctgccagcccagttgcgttccactcgacgagaagctgcttccccagctgcttaaggaggctggctacaccacgcatatggtcggcaagtggcacctgggcatgtataggaaagagtgtctgcccacccgtcgtggatttgacacatatttcggctacctgctggggtcagaagattattattcgcacgaacggtgtacgctcattgacgccctaaatgtcacacggtgtgcccttgattttagagatggcgaggaggtcgccaccgggtacaaaaatatgtatagtaccaacatcttcacaaagagggcgatcgcactcatcactaatcatccccctgaaaagcccctgttcctgtatctggccctccaaagcgtccacgaaccacttcaggtccccgaggagtatctgaagccttacgactttatccaggataagaaccggcatcattatgccggaatggtcagtctgatggacgaagctgtgggtaacgttactgcagccttgaagagctctggtctgtggaataacaccgtcttcatttttagcacggataatggcggacagaccttggcaggaggaaataactggcccctgagaggcaggaagtggtccctctgggaggggggggtcagaggagtcggcttcgtcgcctctccgctccttaaacagaagggtgtgaagaaccgggaattaatccacattagcgactggcttcccacactggtgaagttggccagaggacacactaacgggacaaagccacttgacggattcgatgtatggaagacgatttccgaaggtagcccttccccccggatagagctgctacataacatagatcctaatttcgtagatagcagtccatgccctaggaacagcatggcgccagctaaagacgattctagtctgccggagtactcggcattcaacaccagcgtacatgccgcaattcggcacggtaactggaaactcctcaccggatatccgggttgtggttactggttccctcctccttcccagtataacgtgagcgagatccccagctctgatccgcctacaaaaaccctctggctgttcgatattgatagggaccccgaggagagacatgatttgtcacgcgagtacccccatattgtgaccaaactccttagccgcctccagttctatcacaagcactctgtccccgtttacttccccgctcaggatcctaggtgcgatcctaaagcaactggagtgtggggaccctggatgtag

SEQ ID NO: 486 - DNA, 1602 bp, Artificial Sequence
  derived and/or modified sequence
atgggcccccggggcgccgccagcctgccccggggccccggccccagacggcttttgctgcctgttgtcctccccctcctgctactgctgctgctggctccaccaggctccggagccggagcaagtaggccaccccatctagttttccttctggcagatgatctggggtggaacgatgtcgggttccatggctcgaggatccgcaccccccacttggacgctctagctgccggcggcgtcctgttggacaattattacacacagccactgtgtacgcccagccggtctcagttactgaccggccggtatcagattcgcaccggtctccagcaccagatcatctggccctgccagccttcttgcgtgccactggatgaaaaactgcttccccagctgttgaaggaggcaggttacacgacacacatggtgggcaagtggcacttaggaatgtacaggaaagagtgtcttcccactagaaggggttttgatacatatttcggttaccttctgggaagcgaagactattactctcatgaacgctgcacgcttatcgacgcccttaacgtgactcggtgcgccttggactttcgtgatggtgaagaagtggccactggatacaaaaacatgtacagcaccaatatcttcacgaagcgcgccattgctctgataacaaatcacccacctgagaaaccactcttcctgtacctcgccctgcagtctgtccacgagccactgcaggtgccggaagagtatctcaagccttacgacttcatacaggataaaaatcgtcatcattacgccggcatggtgagtttaatggatgaagccgtcggcaacgttactgccgccttgaaatctagcggcttgtggaacaatacagtctttatcttttctactgacaacgggggtcagactttagctggaggaaataattggccccttcgaggccgaaagtggagcctctgggagggcggagtccgcggtgtcggctttgtggcaagccccctgctgaagcaaaagggtgtgaaaaatcgagaattgattcatatatcggactggctgccgacactagtgaaactagcccgcggacacaccaacggcacaaaacctctggatgggtttgacgtgtggaagacaatcagcgaagggagcccgtcaccaaggattgaactcctccacaatatagaccctaatttcgtcgactcaagcccctgccccagaaacagcatggctcccgccaaggatgatagcagtttgcctgaatacagcgcatttaacacttctgtccatgccgccatccgccacgggaattggaaattgctcaccggatatcctggctgtggttactggttcccacccccttctcagtacaacgtctcagaaatcccttcctctgacccccctaccaaaacgctgtggctatttgatatcgatagagatcccgaggaaagacatgatctctcaagagaatatccgcacatagtcaccaagctcctttcacgtctccagttctaccacaaacactctgtgccagtgtacttccctgcacaggatccacggtgcgatcctaaggccacgggcgtctgggggccatggatgtag

SEQ ID NO: 487 - DNA, 1602 bp, Artificial Sequence
  derived and/or modified sequence
atggggcctagaggcgctgcttcactgcctaggggcccagggcctcggcgactgctgctgccagttgtacttcccctgctgttactgttgttactggcaccgccaggctccggggctggggcatctcggccaccccaccttgtcttcctcctagccgatgatttgggatggaatgacgtgggctttcatggatcgcgcattcggacacctcatttggatgccctggccgctggcggagtactgctagataattattacacacagccgctctgcactccctcgcggtcacagctactgaccggaagataccagatccggaccggcttgcagcaccagatcatctggccatgccagcccagctgcgtgcctctggacgaaaagcttttgccacagctcctgaaagaagcagggtacactacacatatggtcggcaaatggcatctgggcatgtacaggaaggagtgtctgcccaccagaaggggctttgacacgtatttcgggtacctccttggaagcgaggattattacagccacgagagatgcacattgatcgacgccctgaacgtcacgcgctgtgctctagatttccgcgacggggaagaggtcgccacaggctacaaaaacatgtactccactaacatttttaccaagagggctattgccttaattactaaccatccccctgaaaaaccattattcctgtatttagccctgcagagcgtgcatgagccactccaggtcccagaggagtacctgaagccctatgattttattcaggacaagaatagacatcattacgcgggaatggtgtctctcatggacgaggctgttgggaatgtgacagcagcgctgaagagctcaggtctgtggaacaacactgtgttcattttttcaaccgacaatgggggacagacattggcgggaggcaacaactggcctctcaggggcagaaaatggtctctctgggagggtggggtgagaggagtggggttcgtcgccagtcccctgctgaagcagaaaggtgtcaagaatcgagagctgatccacatctccgattggctcccaactctagtcaaactggcacgaggtcacacaaatggcacaaagcctctggacggctttgacgtatggaaaaccatctccgaaggatccccaagccctcgaattgagttattgcataacatcgatccaaatttcgtggattcctctccttgtcctagaaatagcatggcaccggctaaagatgacagttcgctgcccgagtactccgctttcaacactagcgtacacgcagccatacgccacggaaattggaagctgctgacagggtaccctgggtgtgggtactggtttccaccgccatctcagtacaatgtcagtgagatcccctcttctgatcctcctacaaagacgttgtggctgttcgacattgacagggaccccgaggagcggcatgatctttctagagagtaccctcacattgtgacgaagcttctcagcaggctgcagttttaccataagcattccgtcccggtttatttcccagcccaggatcctaggtgcgatccgaaggctactggagtgtggggtccatggatgtag

SEQ ID NO: 488 - DNA, 1602 bp, Artificial Sequence
  derived and/or modified sequence
atggggccacgcggagctgcttcgctgccccgtgggcctgggccaaggcggctgttactgccagtggttttacctcttcttctcctgctgctgctcgcccctcccggatctggagctggcgctagcaggccaccacacctggtcttcttactagcagatgacctgggctggaatgatgtgggctttcatggaagtcgtattcgaacccctcatctcgacgccctggccgcaggcggagttctgctggacaactactacacacagcccctttgtaccccctccaggtcacagttactgaccggaaggtaccagatcagaacaggtcttcagcatcagattatatggccatgtcagccatcatgtgttcctctggacgaaaagctgttgccgcaactcctaaaagaggcaggatacaccacccacatggtcggtaaatggcatctgggcatgtaccgaaaggagtgcctgccaactaggaggggcttcgacacttatttcgggtaccttctcggtagcgaagactattactcgcatgaacgctgtacattgattgatgccctaaatgtaactcggtgtgctttggattttagggacggcgaggaagtggcaactggctacaaaaatatgtatagcacaaatatcttcaccaagagggccattgccctgatcaccaaccaccctcccgagaaaccactgttcctttacctggccctgcagagtgtgcacgaacccctgcaggtccctgaggaatatctgaagccttatgacttcattcaagacaagaatagacatcactatgccggaatggtctctttgatggacgaagccgtcgggaacgtcactgctgctttgaagagcagcggtctgtggaacaacacagttttcatttttagtaccgacaatggcggacagaccttggctgggggaaacaattggcctctcagagggcgaaaatggtctctgtgggagggcggtgtgaggggcgtggggtttgtggcatcccccctcctgaaacagaagggagttaaaaatcgagagttaattcacatatcagactggctgcctacgctcgtgaaactggctcgtggtcacacaaacggaacaaagcctctggatggttttgacgtgtggaagacaatatcagaggggtccccaagtccaaggatagagctgctgcataacatcgaccctaattttgtcgacagttccccgtgccctagaaactctatggctcccgcaaaggacgacagctctctgccagagtacagtgcattcaacacatccgtgcacgctgctattcgccacgggaattggaaactcctaactggctacccaggctgtgggtattggtttccaccccctagtcaatataacgtgagtgaaatccctagcagtgatcccccaacgaagacattgtggctgttcgatatcgaccgcgatcccgaagaaagacacgacctctcccgggagtacccccatattgtcactaaactcttaagcaggctgcagttctaccacaagcactctgtgcccgtgtactttcccgcacaagatccgaggtgcgatcctaaggccacaggagtgtggggcccatggatgtag

SEQ ID NO: 489 - DNA, 1602 bp, Artificial Sequence
  derived and/or modified sequence
atggggccaagaggagcagcatctctgccaagagggcctggacctcggcgtcttttgctacccgtggtgctgccccttctactgttgctgctgctggctccaccaggatcaggtgctggagcatcacgcccaccccatcttgtgttcctccttgctgatgatctgggttggaacgatgtcggatttcatggctcacgaattcgcacgcctcatctggacgccttagctgcgggaggcgtgctgctggataattactacacccagcctctatgcaccccttctcgttcacaactgctgactggacgttaccagatcaggacgggtcttcagcaccagattatctggccttgtcaaccaagctgcgtgccactggatgagaaattgctgccccaactactcaaagaagcaggttatacaacccacatggtgggaaaatggcatctgggcatgtatagaaaggagtgcctacctaccaggaggggatttgatacatactttggttatctcctcggttctgaagattactatagccatgaacgatgcacactgatcgatgcgttgaacgtcacaaggtgcgctcttgactttagggacggcgaggaagtagccactggttataaaaatatgtacagcaccaacattttcaccaagagggctattgcactcattactaatcatccccctgagaaacccctcttcctctatttggccctccaatccgtccatgaacccttgcaagtccccgaggaatatttgaagccctacgactttatacaggacaagaacagacatcactatgccggtatggtgagcctgatggatgaagccgtgggcaatgtgaccgccgctctgaagtcttctgggttgtggaataacacagtgttcatattttctaccgataatggcggccagaccttggccgggggaaataattggcccttgcgcggacgaaaatggtcgctgtgggagggcggcgtgagaggagttgggtttgtagcctcgcctctgctgaagcagaaaggagtcaaaaaccgtgaactgattcacatttcagattggttaccgactctcgtaaaactcgctagggggcacacaaatggaacaaaacccctcgacggtttcgatgtatggaagacgatcagcgaagggtcgccttcccctcgtatagagctcctgcacaatatcgacccaaatttcgtcgactccagcccatgtccccgaaacagtatggctccagcaaaagatgactcttccctcccggaatattcggccttcaatacaagcgttcatgcagcgattagacatggaaattggaaactcctcactggatatcccggctgcggttactggttcccaccccctagccaatacaatgtgtccgaaatcccctctagcgacccacctactaaaacattgtggctcttcgacatcgatagagaccctgaggaaagacacgacctctcaagagagtacccgcatattgtcacaaaattgcttagccgactccagttctatcataagcattccgtgcccgtgtacttccctgcccaggacccacggtgcgaccctaaggcaacaggcgtctgggggccgtggatgtag

SEQ ID NO: 490 - DNA, 1602 bp, Artificial Sequence
  derived and/or modified sequence
atgggcccgcgcggcgcggcatccctcccccggggtcctggccccagaagattactgctgccagtagttcttcctttgctgcttctgttactgctcgcccccccagggagtggggccggtgcatctcgcccaccacatttggtcttcctcctggctgatgacctgggctggaacgacgtgggttttcacggcagccgaatcagaactccacacttggatgctcttgccgctggcggtgtcctcttagataattactatactcaaccgctctgcacaccatcaagatcccagctcctaaccggacggtaccagatccgaactggtctgcagcaccagattatttggccctgtcagccttcctgtgtgccactggatgaaaagctgctcccacagttattgaaagaagcaggctacacaactcatatggtcgggaagtggcacctcggcatgtatcgcaaggaatgcctacccacgcggcgcggattcgacacctacttcggctatctcttggggagcgaagactattactcccacgaacgctgtaccctgatcgatgccctcaacgtgacccgatgtgccttagacttccgcgatggagaagaggttgctaccggctacaaaaatatgtactctaccaatattttcactaaaagagcgatcgcccttatcaccaaccacccacctgagaagcccctcttcctatacctggctctgcaaagcgttcacgaacccttgcaagtaccggaggaatatctgaaaccctacgattttatccaagacaagaacagacaccactacgcagggatggtgagtctgatggatgaagcagtcggcaacgtaacagctgccctcaagagttccggcctatggaacaatacggtgtttattttcagcacagataacggtggccagacacttgctggcggcaataactggccactgaggggacggaagtggtccctgtgggaggggggggtcaggggcgtgggtttcgtggcatctccccttctcaagcaaaagggagtcaagaacagagagttaatacacattagtgattggctgccgacacttgtgaagcttgcgagaggccatactaacggcactaagcctctggacggatttgacgtgtggaagacaatctctgaaggatccccaagcccgcgaatcgaactgctacataacatagaccctaactttgtggactctagcccctgccccaggaactcaatggcgcccgccaaggacgactctagtcttccagaatactctgccttcaacacgagcgtgcacgctgctatcagacacgggaattggaaactactcacagggtatcccggatgtgggtattggttcccacctccaagtcaatacaacgtgagtgaaatccccagctctgatcctcctacgaaaaccctgtggctattcgacatcgaccgtgatccagaggaaagacacgatctgtctcgagaatacccccatattgtaacaaagctactctcaagactacagttctatcacaagcactctgttccagtatattttccagcccaggatcccaggtgtgaccctaaggccacaggtgtatgggggccatggatgtag

SEQ ID NO: 491 - DNA, 1602 bp, Artificial Sequence
  derived and/or modified sequence
atggggccaagaggtgctgccagcctgccccgtggacctggtcctagaaggcttttgcttccagtggtcctgccgctcctgctattgcttctcctagcaccacctgggtctggagccggtgctagtagacctccacacctggttttcctcttagcagacgacttgggctggaacgacgtaggctttcatggtagtcgaatcagaacgccacaccttgacgccttggccgcaggaggggtgctgctcgacaactactacacccaacctctttgcacacctagtaggtcacagctgctcaccggtcgttaccagatcagaacaggcttgcagcaccagattatttggccatgtcagccgtcctgcgttccactggacgagaaattactgccccaactgctgaaggaggccggatacacgactcatatggtgggaaaatggcatttaggcatgtaccgaaaggaatgtctgcccactcgacgcggattcgacacctatttcggatacttgttaggctcagaagattactatagtcatgaacgatgcacccttatagatgcgctcaatgtcacacgttgcgccctggacttcagagacggagaagaagtcgccacaggatataaaaatatgtatagcacaaatatcttcaccaagcgcgccatcgctttaatcacaaatcaccccccagagaaaccccttttcctttacctggcccttcagtcagttcatgagcccttgcaggtccctgaagagtacctgaagccctacgattttattcaggataaaaatagacaccattatgctggaatggtgtccttgatggatgaagcagtgggtaacgttactgcagcgctcaagtccagtggtctctggaataacacagtcttcatctttagcactgataacggaggacagaccctcgccggagggaacaactggcctttaagagggagaaagtggtcactgtgggaaggtggggtgcgcggcgttggctttgtagcttcccccctgctcaaacagaagggtgtgaaaaatagagaacttatccatatcagcgactggctcccaacactcgttaaacttgccaggggtcacactaatggaaccaagcccctggatggcttcgatgtctggaagactatttccgaaggatcgccttccccgagaatcgaactgctgcacaatatagacccgaattttgtggacagcagcccatgcccccgcaactcaatggcacccgcgaaagatgactccagccttcctgaatactcagccttcaatacatcggttcatgctgccattcgacacggcaattggaaattgttgacaggctatcctgggtgtggctactggtttccccctccttcccaatacaatgtgtccgaaatcccttcttcagacccgcctacaaaaactttgtggctttttgatatcgatcgagatcctgaggagagacatgatctgtccagagagtacccgcatatcgttactaagttgctctcaagattgcagttttatcacaagcatagcgtaccagtttattttccagcacaagatcccagatgcgaccccaaagctacaggggtgtgggggccatggatgtag

SEQ ID NO: 492 - DNA, 1602 bp, Artificial Sequence
  derived and/or modified sequence
atgggcccccggggcgccgcctctctcccacggggtcccggaccaaggcgactcctcctgccagtcgttctcccgttgctcttactcctattactggcaccacctggaagcggcgccggcgcatcccgcccaccccatctggtctttttattggcagacgacctgggatggaacgacgtcgggtttcacggctctagaattcggacacctcatttagatgctctagccgcaggcggtgttctactcgataattactatacccagccactatgcacgccatctagatctcagttgttgaccggaagatatcaaatcagaactggactacagcaccaaattatctggccctgccagccatcctgcgtacctttggacgaaaagctgttaccccaactgctcaaagaggccggctataccactcacatggtggggaagtggcatctcggaatgtatcgcaaagaatgtctacccacgagacgcggtttcgacacttattttgggtaccttttaggcagtgaagactattactctcacgaaagatgcacacttatcgatgctctgaatgttacaaggtgtgctctagacttccgggacggtgaggaggttgctaccggctacaaaaatatgtactctaccaatattttcactaaaagagcgatcgcccttatcaccaaccacccacctgagaagcccctcttcctatacctggctctgcaaagcgttcacgaacccttgcaagtaccggaggaatatctgaaaccctacgattttatccaagacaagaacagacaccactacgcagggatggtgagtctgatggatgaagcagtcggcaacgtaacagctgccctcaagagttccggcctatggaacaatacggtgtttattttcagcacagataacggcggacagacgctggcaggtggcaataattggccgctgaggggccgcaaatggagcttgtgggagggaggagtccggggggtgggttttgttgcatctccactgttgaagcagaaaggcgtaaaaaaccgcgaattaattcatatctctgattggctgccaactctcgttaaattggctaggggacatacaaatgggaccaaaccattagatgggtttgatgtttggaaaacaataagcgagggcagcccatctcccagaatcgaactgctgcataatatagatcccaactttgtggattcctcaccctgcccacgtaactccatggctccagcaaaggatgattcctccctccccgaatattccgcctttaacacaagtgtacatgcagccatccgccatgggaattggaagcttctgacgggttatcctgggtgcgggtattggttccctcctccctcacagtataacgtatccgaaatcccaagcagcgatccccccaccaagactttgtggttatttgatattgacagagatcccgaggagaggcacgatttatcccgcgagtatccccacatcgtgacgaaactacttagtagattgcagttttatcataaacacagtgtacccgtctactttcccgcccaggacccaagatgcgacccaaaagcgacgggcgtttggggcccatggatgtag

SEQ ID NO: 493 - DNA, 1599 bp, Artificial Sequence
  derived and/or modified sequence
atgggaccaagaggagcagcatccctccctcgcggaccagggcctagacgacttttgctgcctgtcgtgctcccattgctcctgttgcttcttcttgcacctcctggttccggcgcaggcgcatcccggcccccacacctggtctttttgctcgcagacgacctgggatggaacgacgtgggatttcatggttcgcgcattcgcactcctcatctggacgctctcgcagcaggaggcgtgcttttggataactattacacccaacctctttgtacgccttctcgctcacaactgcttactgggagataccaaattcggactggactccaacaccagataatctggccgtgtcaaccctcgtgtgtgcccctggacgagaaacttcttccccaacttctgaaggaagctggatacactacgcatatggtcggtaagtggcatcttggaatgtataggaaggaatgccttcccacgcggaggggattcgatacttacttcggatacctgcttggatccgaagattactactcccatgagagatgtacccttatcgatgcattgaacgtgactagatgtgcacttgattttcgcgatggggaagaggtggcaaccggttataagaacatgtattcgacgaatatcttcaccaagcgagcaattgcactgatcaccaaccacccacccgaaaagcccctgttcctctaccttgcactgcaatcagtccacgaacctctccaggtgccagaagaatacctcaagccgtacgacttcatccaggataagaaccgacatcactacgcgggaatggtcagccttatggacgaagcggttggaaatgtgacggcggcactgaaaagctctggactgtggaacaacaccgtgtttatcttttcgaccgataacggcggtcagaccctcgcaggcggcaacaattggcctctgcgcgggcgtaagtggtcgctttgggagggaggagttcggggggtgggatttgtggcctcccctctcttgaaacaaaaaggggtgaagaacagagagcttattcacatttcagattggctgcccactctcgtgaagctggcacgtggacatactaatggaactaagcctcttgacggattcgatgtgtggaaaaccatctccgaaggttcgccttcccccagaattgagcttcttcacaatatcgatccgaactttgtggactcaagcccttgtcctagaaactcgatggcacctgcaaaagatgactcctcgctccctgagtactcggcattcaatactagcgtccatgcggcaattaggcacgggaactggaaacttttgactggctacccggggtgcggttactggttcccaccaccctcgcagtacaatgtgtcagaaataccttcatcggatccccccaccaagaccctgtggctttttgacattgaccgggacccagaggaaagacatgatctctctcgcgaatacccccacatcgtgaccaaacttttgagcagacttcaattctaccataagcactcggtccccgtgtacttccctgcacaggacccccgatgtgacccaaaggcgactggtgtctggggtccttggatg

SEQ ID NO: 494 - DNA, 1599 bp, Artificial Sequence
  derived and/or modified sequence
atggggccaagaggggccgcctccttgcctcgcggacccggacccaggcgcttgttgctgccagtggtcctgcctctccttctcctcctgctcctggcacccccagggtctggggccggggcctctcgcccaccccatcttgttttcctcttagctgatgatctagggtggaacgatgtcggatttcatgggagtcgaattaggacacctcatttagacgctctagccgctggaggagtcctgctggataattattatactcagcctctttgtactccctcccgctctcagctccttacagggaggtatcagattcggacagggctccagcatcagataatatggccttgtcagccaagttgcgtgcctctcgatgaaaaactgctcccccagttattaaaagaggccggatatacaactcacatggtagggaagtggcatcttggaatgtatcgcaaagaatgtctccccacaaggaggggattcgatacatatttcgggtacctactcgggtctgaagattattacagtcatgaacgctgtacattaatcgatgcccttaacgtaacaaggtgtgctctggatttccgagatggggaagaagtggccacagggtataagaacatgtattctacaaatatattcactaaacgagcaatcgcactcataactaaccacccccccgagaaacccctcttcctatacctggccctgcagagtgtacatgagcccctccaggtgcctgaagaatacctcaaaccctacgattttatacaggataagaacagacaccactacgctggaatggtgtcgctcatggatgaagccgtggggaatgtgacggccgctctaaaatcttccgggctgtggaacaatacagtcttcatattttctactgataacgggggacagacactcgccggggggaacaattggcctcttaggggacgaaagtggtcattatgggaagggggagtgcgaggagtagggtttgtggcatctccccttctaaaacaaaagggagtcaaaaatcgcgaacttatacacatctccgattggctgccaacactcgtcaaactcgcacgcgggcatactaatgggactaagccactcgatggattcgacgtatggaaaacaatctcagaaggatcccctagtccacgaatcgaactcctccacaacatagatcctaattttgtggattcctcaccatgccctcggaatagtatggctcccgcaaaagatgattcctcgttacccgaatattctgctttcaatacatcagttcacgccgccatcagacatggaaactggaaattgctcacaggatatccagggtgtgggtattggttcccccctccatcacagtacaatgtttctgaaatcccatctagtgatcctcccacaaaaactctctggctctttgacatcgaccgcgatcccgaagaacggcatgatctgtcccgcgaatatccccacatagtgactaaactactgtccaggctgcagttctaccacaaacactccgtacccgtgtattttccagctcaggatccccggtgtgatcccaaagctacaggagtatggggaccctggatg

SEQ ID NO: 495 - DNA, 1599 bp, Artificial Sequence
  derived and/or modified sequence
atggggccaaggggagccgcgtcgctgcctcgcgggccaggacctcgccggcttctgctgccggtggttctgcctctgctgctgctgcttctgctcgcacctccaggcagcggggcgggagcctcccgcccgccgcacctggtgttcctcttggcagacgacttggggtggaacgatgtgggatttcatggctccagaatccgcaccccacacctcgacgcgctggccgcggggggagtgctgctggacaactactacacgcagccgttgtgcactcctagccgaagccagctgctgacgggcagataccagatccgcactgggctgcaacaccaaatcatctggccatgccaacctagctgcgtcccgctggacgaaaagctcctgccccagctgctgaaagaggccggctacacgactcacatggtgggcaagtggcatctgggaatgtaccggaaggaatgccttcctacccgccgcggctttgatacctacttcggatacctgcttggaagcgaagattactatagccacgagcgctgcacgctcatcgatgccttgaacgtgacccggtgcgccctggatttcagagacggggaagaggtggctaccggatacaagaatatgtactcaactaacattttcacgaagagggcgatagcgctcattaccaatcatccgcctgaaaaacctctgttcctttacctcgcactgcagagcgtgcatgagccactgcaagtgccggaggaatacctgaagccgtacgactttatccaagacaagaatcgccatcattacgctggaatggtgtcccttatggacgaggcagtggggaacgtgaccgccgccctgaaatcctctggactttggaacaacactgtgttcatcttctccactgacaacggaggccagaccctggccggcggtaacaactggccattgcggggaagaaagtggtcgctctgggaaggaggagtccgaggtgtgggctttgtagcttccccgctgctcaagcaaaaaggggtgaaaaaccgtgagttgattcacatctccgattggctcccaactttggtcaagctcgcccgaggccataccaacgggaccaaacccctcgacgggttcgatgtgtggaaaactatctcagaagggtcgccttcgccgagaatcgaactcctgcacaacatcgatccaaatttcgtggactcgtcgccgtgtccgcggaactcgatggcgcccgccaaagatgactcctccctgcctgaatactccgcgttcaataccagcgtgcatgctgcaatccggcacgggaactggaagctcctgacgggctacccgggttgcgggtactggttcccccctccgagccaatacaacgtgtcagaaatcccgtcatcggaccccccaactaagaccctgtggctcttcgacattgaccgcgaccctgaggagagacacgacctctcgagagaatacccccacattgtcactaaactgctgtcgcgcctccaattctaccataagcactccgtgccggtgtacttcccagcccaagaccctcggtgcgatccaaaggccaccggagtgtggggaccatggatg

SEQ ID NO: 496 - DNA, 1599 bp, Artificial Sequence
  derived and/or modified sequence
atggggccgcggggagctgcgtccctgccgcggggccctggaccgcggaggctccttctcccagtcgtcctgcctctgctgctgctcctgctgctcgctcccccaggtagcggcgccggagcttccagaccgccgcacttggtgttcctcttggctgatgaccttgggtggaatgacgttgggtttcatggatcccggatccgcaccccacacctggacgctctcgccgctgggggcgtgctcctggacaactactatactcaacccctgtgcactccgtcaaggtcccagctcttgaccggacgctaccagatcaggaccggcctccagcaccagatcatctggccttgccagccgtcgtgtgtgccgctcgacgaaaagttgctgccacaactgctgaaggaggcaggatacaccactcacatggtgggaaagtggcatctgggaatgtaccggaaagagtgcctgcctactcgcagggggttcgatacctattttggatacctcctgggctcagaggactactactcacacgagcgctgtaccctgatcgacgctctgaacgtcactcggtgcgccctggacttccgcgacggggaggaggtcgccactgggtacaaaaacatgtacagcactaacatctttaccaagcgggctattgcgttgatcaccaaccacccacctgaaaagcctctcttcctgtacttggcgctgcagtcagttcacgaaccgcttcaggtgccagaggaatacctcaaaccgtacgactttatccaggataagaacagacatcactacgcggggatggtgagcctgatggacgaggccgtgggaaacgtgactgcagccctgaagagctctggtttgtggaacaataccgtgttcattttctcgaccgataatggtggacagaccctggccggaggtaataactggccgctgcggggacgcaagtggagcctgtgggaggggggagtgcgcggagtcggattcgtcgcatcccctctgctgaagcagaaaggagtcaagaaccgggaactgattcacatcagcgattggctgccgacccttgtgaaactcgctaggggacacacgaatggaaccaagcccctggacggattcgatgtctggaaaaccatctcggaaggatcgccgtcgcctcggatcgaattgttgcacaacatcgacccaaacttcgttgactcttctccttgcccgaggaactcaatggccccggccaaggatgactcgtcgcttccagagtacagcgcctttaacactagcgtgcacgcggcgatccggcacggaaactggaagctgctgactgggtacccgggctgcggatactggttcccaccgccgtcccagtacaatgtgtcagaaatcccgtcctcggatccaccgactaagacgctctggctcttcgatatcgaccgcgacccggaggagcggcatgacctgagccgggaatacccacatattgtcactaagctgctgtcacgcctccagttctaccataagcatagcgttccagtctacttcccggcccaggacccacgctgtgacccaaaagctaccggggtgtggggcccttggatg

SEQ ID NO: 497 - DNA, 1599 bp, Artificial Sequence
  derived and/or modified sequence
atgggacctagaggtgcggcctcactcccgcgaggcccggggccacgcaggctgctgctgcctgtcgtccttccattgctgctcttgttgctgctggcaccccccggaagcggcgccggagcttcgaggccgcctcacctggtgttcctgctggcagacgacttgggatggaatgatgtagggtttcatggaagccgtatccgaacgccccatctcgacgccctggccgccggcggggtgctgttggacaactactatactcagcctctgtgcacgccgagccggagccagcttttgacgggacgctatcaaatccgtaccggactccaacatcaaatcatatggccctgccagcctagctgcgtgccgctcgatgagaagctgcttcctcagctgctgaaagaggcgggatacactactcacatggtggggaagtggcatctgggtatgtacagaaaggaatgcttgccaaccagacgcggattcgacacctactttggatatctgctgggctccgaagattactactcgcacgagcgctgcaccctgatcgacgcactgaacgtgacgagatgtgctttggatttcagagatggcgaagaggtggctaccggatacaaaaacatgtacagtaccaacatcttcaccaaacgggcgatcgcactcatcaccaaccacccccctgagaagccactcttcctctacctggcactgcagtcagtgcacgagccactccaggtcccagaagaatacctgaagccgtacgatttcatccaggacaagaaccgccatcactacgcgggtatggtgtccctcatggacgaagcggttggaaatgtgacggccgcgctcaagagttccggtctgtggaacaacaccgtgttcattttctcaaccgacaatggagggcaaactttggccggaggaaataactggccgcttcgcggccggaagtggtcactttgggaagggggagtgaggggggtcggattcgtggcgtcaccactgctgaagcaaaaaggggtgaaaaatcgggaattgattcacattagcgactggctccctacgctggtgaaacttgcccggggacatactaacgggaccaagcctctggacggcttcgatgtttggaaaactatctcagaaggctccccgagcccgagaatcgaactgctccacaacattgatcctaacttcgtggattcgagcccctgcccgcggaattccatggcgccggctaaagacgattcgtctttgcctgaatactcggcctttaacacttcggtgcacgcggcaatcagacatggcaattggaagctcttgactggatacccaggctgcggctactggtttccgccgccatcccagtacaacgtcagcgaaatcccctcctcggacccgcccactaagaccctctggctgttcgatatcgatcgcgacccagaggagagacatgatctcagcagagagtaccctcacatcgtgactaagctgctgagccgcctgcagttctaccacaaacactccgtgccagtatactttcccgcccaagacccgagatgtgacccgaaggctaccggagtctggggaccgtggatg

SEQ ID NO: 498 - DNA, 1599 bp, Artificial Sequence
  derived and/or modified sequence
atgggaccacgaggcgccgcttcattgccgagaggcccgggtcctaggcgacttctgctgcccgtggtgctgcctctcctgctgctcctgctactcgcccccccaggctccggcgctggcgcaagccgccctccacaccttgtgttcctcctggccgatgacctgggatggaatgacgtcggctttcacggctcccggattaggaccccccaccttgacgctctggcagcagggggggttctgctggacaactattacacacagccactctgcaccccatcaagaagtcagctgttaactggacgatatcagatccggaccgggctccagcaccagattatctggccttgtcagccatcatgcgttcccctggacgagaaactgttgccacagctgctaaaagaagcagggtatactacccacatggtgggcaagtggcacctcgggatgtaccggaaggagtgcctgcctactaggcgcggattcgacacttactttggttatctcctaggatctgaagattactactcgcacgaacgttgcacactgattgacgcgctgaacgtcactcggtgtgccctggactttcgcgacggagaggaggtggctactggttacaagaatatgtatagcaccaacatcttcacgaagcgggctatcgcgttgatcacaaaccatcctcctgaaaagccactttttctgtacttggccctccagtctgtgcacgagccgttgcaggtgcctgaagagtacctgaagccatacgattttatccaggataagaatagacaccattatgcagggatggtgtccctcatggatgaagcagtaggcaacgtgacggctgcattgaagtcatccgggttgtggaataacacggtgtttatcttcagcaccgacaatggaggtcaaaccctcgctggcggcaacaactggcctctccgaggaaggaaatggtcactgtgggaggggggagttcgcggggtagggttcgtggctagtccgctgcttaagcagaagggagtcaaaaatagggaactgatccatatctccgattggcttcctacactcgtgaagctggcgcgcggccacacgaacgggacgaaacccctagatggtttcgacgtatggaagaccatctccgagggttctccctccccacgcattgagctattgcacaacattgaccctaatttcgtggattcgtccccttgtccgcgaaactcgatggcgcctgccaaagacgattcaagcctgccagaatattctgcttttaacacttctgtgcacgccgctatccggcatggtaactggaagctgctgacaggctatcccgggtgtggttactggtttcctcctcctagtcagtataatgtgagtgaaatcccaagcagtgatcctccgacgaagaccctttggttatttgatattgaccgagatcctgaagaacgtcacgatctttcaagggagtacccgcacatagtgacaaaacttctgtctcgcctgcaattttaccacaagcactccgttcccgtctatttccccgctcaggaccccagatgtgaccccaaggcaacaggcgtgtggggtccatggatg

SEQ ID NO: 499 - DNA, 1599 bp, Artificial Sequence
  derived and/or modified sequence
atgggtcctagaggagctgcctccttacctaggggacctggcccaaggagattgttacttccagttgttcttccgctattgttgttgctgcttctagccccccctgggtcaggcgcaggagctagtagaccacctcatttggttttcctcctcgctgacgatcttggatggaacgacgttggttttcatggttctcggatcagaactccacatttggacgcccttgctgctggaggagtattgctggacaactactatactcaacctctttgcactcctagtcgtagtcaactgttgacaggtagataccaaattcgaacgggtcttcagcatcagattatatggccttgtcagcctagttgcgtgcctttggatgagaaacttcttcctcagctgcttaaggaggccggttatactactcatatggtgggaaaatggcatctgggaatgtataggaaagaatgtcttccaacgagacgaggatttgacacttattttgggtatttgcttggctcggaagactactattctcacgaaagatgcaccttgatagacgccttgaacgttactagatgcgctcttgatttccgtgatggagaagaagttgcgacaggttataagaatatgtattcaacgaacatttttactaagcgtgccattgctcttattaccaaccatcctcctgaaaaaccactctttttgtatcttgctctccagtcggttcacgagccactacaggttccggaagagtatcttaaaccatatgactttattcaggataagaacagacatcactacgctggaatggtttctcttatggatgaggctgtcggtaatgttacagcagctcttaaatcaagtggtttatggaataacactgtcttcattttctccactgataacggtggtcagactcttgcaggtggaaataattggccactgaggggaaggaagtggtctctttgggagggaggcgttaggggtgtaggtttcgttgcttctccacttttaaagcagaagggagtcaagaacagagaactgattcatataagcgactggcttccaactctagttaaactggccaggggccacacaaacggaacaaagcctttggacggtttcgatgtgtggaagacaatttccgagggttccccaagccctcgtatcgagcttttgcataacatagatcccaactttgttgacagctcaccatgcccgcgaaactcaatggcccccgctaaggatgattcatcactgccagaatattcagcttttaatacgtcagttcacgccgcaattcgacacggaaattggaagctcttaacaggctatccaggttgcgggtactggttcccacctcctagtcagtataacgtctcggagattccctcgtccgatcctccaaccaagaccctgtggttatttgatatcgatcgtgatcctgaagaacgccatgatctctcaagggaatacccacacatcgtgactaagttgcttagccgtcttcaattttatcacaaacattccgtgccagtgtattttcccgctcaggaccctagatgcgacccaaaggctactggcgtttggggtccctggatg

SEQ ID NO: 500 - DNA, 1599 bp, Artificial Sequence
  derived and/or modified sequence
atgggccctcgaggcgcggcgtcgcttcccaggggcccgggaccgcgccggttgctgctcccggtagttctgccgctgcttcttctccttctcctggccccgccagggtctggagccggggcgtctcgtcctccgcatctcgtttttctgttagccgatgatctaggatggaacgatgtaggcttccatggttctcgtattcgcacgccacatcttgacgccttggccgctggtggcgtcttgctagataattattatacgcagcccctatgtacgccgtcaagatctcaactacttacaggcagatatcaaataagaacaggcctgcagcatcaaattatctggccatgccaaccgtcttgtgtgccgctcgatgagaagttactaccacagttgctgaaagaagccggatacaccacacatatggtagggaagtggcatctcggtatgtacagaaaagaatgcttaccgacgagaagaggatttgacacttacttcgggtacttacttggttccgaagattattattcacacgaacgttgcacgctaattgatgctttaaacgttactcgatgtgcattagattttagggacggcgaagaagtagcgacaggttacaaaaatatgtattcgacaaatattttcacgaaacgtgctatcgcgctgattacgaaccaccccccagaaaagccgttatttctctatcttgcactgcaaagtgttcacgaaccgcttcaagtgccggaagaatatcttaaaccttacgatttcattcaagataaaaaccgtcatcattatgcggggatggtctctttgatggatgaggcggtcggaaatgtcacagcggcactgaaatctagcggtctctggaacaacacagttttcatatttagcacagacaatggaggacaaaccctggccggaggaaacaactggcctttgcgtgggaggaaatggagcctgtgggagggtggcgtacgcggggtcggattcgtagcgagtccattgttgaaacaaaaaggggttaaaaatcgagaacttattcatatcagcgactggcttccgactcttgtaaaacttgcccgtggacatactaacggcacgaaaccgttggatggttttgacgtttggaaaacaatttctgaaggctcgccgagtcctaggattgaactgttgcacaacattgatcctaactttgtcgattcgtctccatgtcctcgcaattccatggctcctgcaaaggatgattccagtctgccagagtactcagcgtttaatacgtctgtgcatgcggcaattcgacatggcaattggaagttgttaacaggctatccgggttgcggatattggtttccaccaccgtcacagtataatgtatcagaaataccgagcagcgatccgccgacaaagacactttggctgtttgacatcgatcgtgatccagaagaaaggcacgacttgtcgcgtgaatatccacacatcgtgacgaaattattaagcagacttcagttttatcacaagcatagcgttcctgtttattttccggcacaggatccgcgctgcgatcctaaagcaaccggtgtctggggtccgtggatg

SEQ ID NO: 501 - DNA, 1599 bp, Artificial Sequence
  derived and/or modified sequence
atgggtccacgcggcgccgccagccttccgagaggaccgggcccacggagactgctgctgccggtcgtcctgccactgcttctcctgctgctcctggcacctccgggctcgggagctggcgcatcccggccaccgcatctcgtctttcttctggctgacgaccttgggtggaacgatgtggggttccatggctcgcggatccgcaccccacatctcgacgcgctggccgcaggaggcgtgcttctcgacaactattacactcagcccttgtgcactccaagccgctctcagttgctcactggacgctaccagatccgcaccggcctgcagcatcagatcatctggccgtgtcagccgtcatgcgtgcctcttgacgagaagctgctgcctcagcttctgaaagaggcaggatacaccacccacatggtgggaaaatggcatctgggaatgtaccgcaaggaatgcttgccgactagacgcggatttgatacctactttggatacctgctcggctcggaggactactacagccacgagcgctgtactctcattgatgcgctgaacgtgacccggtgcgctctggattttcgagatggagaagaggtcgcgaccggatacaaaaacatgtacagcaccaatatcttcaccaagcgcgctatagccctcattactaaccacccaccagagaaaccgctgtttctctacctggcccttcaatcagtccacgagccactccaggtgcccgaagaatacctgaagccgtacgacttcatccaggacaagaatcggcatcactacgcgggaatggtgtctctgatggacgaagccgtgggaaacgtgactgcggcactcaaatcctccggactgtggaacaacaccgttttcatcttcagcactgacaacgggggccaaactcttgccggaggaaacaattggcctctgcggggccggaaatggtccctgtgggagggaggggtgagaggagtggggtttgtggcgtccccactgctgaaacagaagggagtgaaaaacagggaactcatccatattagcgactggctgccaactctggtgaagctcgctagaggacacacgaacgggactaagcctctggacggtttcgacgtgtggaaaaccatctcggagggatccccgagtccgcgaatcgaactgttgcacaacatcgatcccaatttcgtggactcgagcccttgtccgagaaactcgatggctccggccaaggacgattcctcgctcccagaatacagcgcgttcaacacttcggtgcacgcggcgatccgacatggaaactggaagctgctgactgggtaccctggctgcggatactggtttcccccaccgtcccaatacaacgtgagcgagatccccagcagcgacccgccgaccaagaccctgtggctgttcgacatcgaccgcgaccccgaagagcggcacgacttgtcccgcgaatacccacacatcgtgactaagctgctctctcggctgcagttctatcacaagcattcggtgccggtgtactttcccgcacaggatcctcgctgcgaccctaaagctaccggagtgtggggcccatggatg

SEQ ID NO: 502 - DNA, 1599 bp, Artificial Sequence
  derived and/or modified sequence
atgggcccgaggggtgccgcctcactcccacggggccctggacctaggagactcctgctgccagtggtgctgcctctgttgctcttgctcctcctggccccacctggaagcggcgcaggagcgagtagacctccgcatctggtgttcctgttagccgatgatctgggctggaacgatgttggattccatggcagtcgcattcggacaccacatcttgacgcattagccgccggcggggtgcttctggataattattatactcaaccactctgtacacctagtagatcacaactgcttacaggcagatatcaaattaggaccggacttcagcatcagataatttggccttgccagccaagctgcgttccactcgacgaaaagttgctgcctcagctgctgaaggaggctggttataccacacacatggttgggaagtggcacctcggcatgtacaggaaggagtgcctgccgacaaggcggggatttgatacctactttggctatctactggggtccgaagactactatagccatgagagatgcacgttgatcgacgcgctcaacgtgacacgctgcgctctggactttagagacggcgaagaggtcgcaactggctataagaacatgtactccaccaacatatttacaaagagggctatcgccttaattaccaaccacccaccagagaagcccctgttcttgtacctggcactgcagagcgtccacgaaccacttcaggttcccgaagagtacctgaagccttacgattttatacaagataagaatagacaccattatgcaggcatggtctccctcatggatgaggcagtaggcaatgtgacagccgcactgaagtctagcggtctttggaataacaccgtcttcatcttctcaaccgataatggcgggcagacacttgctggcgggaacaattggcccctcaggggtagaaaatggtctctgtgggagggcggggtgaggggagttggattcgtggccagtccccttctaaagcagaagggcgtgaaaaacagagaactgatccatatatccgattggttgcctactctggtcaaactcgccaggggacatacaaacgggactaagccattggatggattcgatgtttggaagacaatctctgaaggctctccttccccaaggattgaactcttgcataatatcgaccccaattttgtcgacagctctccgtgcccaaggaattccatggcaccagccaaagacgacagcagtctccctgagtactctgccttcaatacttcagtgcacgctgcaattcgacacggcaactggaaacttctgaccgggtaccccgggtgcggctattggtttccacccccatcccaatataacgttagcgaaatcccctcctccgacccaccaaccaaaaccctgtggttgtttgatatagatcgcgatcctgaagagaggcacgacttgtctcgcgaatatcctcacattgtcactaaactcctctctcgcctacagttctaccacaagcactccgtgcctgtgtattttccagcacaggaccccaggtgtgatccaaaagcaacaggagtctggggtccatggatg

SEQ ID NO: 503 - DNA, 1599 bp, Artificial Sequence
  derived and/or modified sequence
atgggaccgagaggagcagcctcactgcctagaggaccgggaccgaggagactgctcctgccagtcgtgctgcctctgctgctgctcctcttgctggccccgcccggaagcggagcgggcgcctcgcggcctccacacctggtgttcctgctcgctgacgatctgggctggaacgacgttgggtttcacggaagccgcatccggaccccgcatctcgacgcactggcggcaggcggagtcctgctcgacaactactatactcaaccgctctgtaccccatctcgctcccaactcctgactgggcgttaccaaattagaaccggattgcaacaccagatcatctggccttgtcagccaagctgcgtgccgttggacgaaaagctcctgccacagctgcttaaggaggcgggatacactacgcatatggtgggtaagtggcacctcggaatgtaccggaaggaatgtctcccaactcggcgcgggtttgacacgtacttcggctacctgctggggtcagaagattactactctcacgagcgctgtaccctgattgacgcgcttaacgtgactcgctgcgcgcttgacttcagggatggagaagaagtcgccactggctacaagaatatgtactcgaccaacatcttcactaaacgcgccatcgccctgatcactaatcacccgccggagaaacccctgtttctctacctggcgctgcagtccgtccacgagccactccaggtgccggaagagtacctcaagccatacgactttattcaggacaagaatcggcaccattatgccggaatggtttcgctgatggacgaagctgtcggaaacgtgactgcggctcttaaatctagtggactgtggaacaataccgtctttatcttttcaaccgataatggagggcagaccttggcaggaggcaataactggcctctgagaggcaggaagtggtcgctgtgggaaggaggagtgcggggcgtcggattcgtcgcctcgcccctcttgaaacagaagggggtgaagaacagagagctgatccatatctccgattggctgccgacgctggtcaagctggcacggggacacactaacggcacgaaacccctggatggattcgacgtgtggaaaaccatcagcgagggtagcccatcccctcggatcgaacttctccataacatcgaccccaacttcgtggattcgagcccgtgtccgagaaattccatggcgccggcaaaggatgacagctcactcccggagtatagcgcgtttaacacctcggtgcacgccgcaatccgccacggaaactggaagctgctgactggatatccgggatgcgggtactggttcccgccgccttcacaatacaatgtctccgaaattccctcttcggacccaccgaccaagaccctgtggctcttcgatatcgaccgagatccagaggaacggcatgacctgtcgcgggagtacccgcacatcgtcaccaaactgctgtctcgcctccagttctaccataagcactcggtgccggtgtacttcccagcgcaggacccgcggtgcgatccaaaagcgaccggcgtgtggggcccgtggatg

SEQ ID NO: 504 - DNA, 1599 bp, Artificial Sequence
  derived and/or modified sequence
atgggaccgcggggtgccgcctcgctgccgagaggacctggccctcgccgcctgctcctgcccgtggttcttccgctgctgctgctccttctgctggccccgccaggaagcggcgcgggggcttcccgcccgccacacctggtgttcctcctcgctgacgacttgggatggaacgatgtcggcttccacggatcaagaatccgcactccacatctcgatgccctggcggccgggggagtgttgctcgacaactactatacgcaaccgctttgcactccgtcccggtcccaactgctgaccggacgataccagatcagaaccggcctgcagcaccagatcatctggccctgccagccgtcgtgtgttccgctcgacgaaaagctcttgccgcaacttctgaaggaagccggctacactactcacatggtcggtaagtggcatcttggaatgtaccgcaaggaatgcctgccgactcggaggggcttcgacacctacttcggatacctcttgggttcagaggactattactcgcacgaaagatgtactttgatcgatgctctgaacgtcactcggtgcgccctggattttcgggacggcgaagaggtggcgacgggatacaagaacatgtactcgaccaatatcttcaccaagcgcgcaatcgctctgatcaccaatcacccgccagagaaaccactcttcctctacctcgcactgcagtccgtccacgagcctctgcaggtgccagaggagtacctcaagccttatgattttatccaggataagaacaggcaccattacgccggtatggtgagccttatggatgaagcagtgggcaatgtcaccgcagccctgaaatccagcggactgtggaataacaccgtgttcattttttctactgacaacggcggtcagactctcgcaggagggaacaattggccgctgcggggccggaagtggagcttgtgggaaggaggagtccgtggagtgggattcgtggcctccccgctccttaagcaaaagggggtgaagaatagggaactgatccatatttcggattggctgccgaccctggtgaagctggcgagagggcacacgaacgggaccaaaccgctggatggattcgatgtgtggaaaaccatttcggaaggatccccttcgcctcgcatcgagttgctccacaacattgacccgaatttcgtcgactcatcaccttgcccccggaatagcatggcccccgcgaaggacgattcgtccctgccagaatactctgcctttaacacttcggtgcatgctgcaatcagacacggaaactggaagctcctgaccggctacccgggttgcgggtactggtttcctccgccatcacaatacaacgtgagcgaaatcccctcctcagaccccccaactaaaaccctgtggctcttcgacatcgaccgcgatcctgaagagcgccatgacctgtcgagggagtacccacatatcgtcaccaaactgttgagccggctgcagttctaccataagcacagtgtgcccgtgtacttcccggcgcaagacccacgctgtgacccaaaagcgactggagtgtggggaccgtggatg

SEQ ID NO: 505 - DNA, 1599 bp, Artificial Sequence
  derived and/or modified sequence
atgggaccaaggggagcagctagcctgcctcgggggccgggtcctcgccgacttctactgccagtggttctccccttactgctcctgctcttattagcccctcctggctcaggagccggcgccagcaggccccctcatctggtgtttctcctggccgatgacctgggatggaacgacgtggggttccatggatcccgaatccgaactccgcatctcgatgctctggctgcaggtggcgttctgctggacaattactatactcagccgctgtgtacaccctcccgttctcagctgctgaccggaagatatcaaattaggacggggctgcagcatcaaattatctggccttgccaaccctcttgtgtgcccctggacgaaaaacttttaccccagctgctcaaggaagctggatacacgacccatatggtgggtaagtggcacttagggatgtatcgaaaagaatgcctccccacgaggcgaggcttcgacacttatttcggctacctactgggatccgaagactattactctcatgaaagatgcacgctcatcgatgccctcaatgtgacaagatgcgcactcgacttcagagacggagaggaagttgcgaccgggtataagaacatgtactcaacgaatatcttcacgaagcgtgccatcgcacttattaccaaccaccctccagagaagcctctgtttttgtatctagccttgcagtccgtgcacgagcccctgcaggtgccagaagagtatctgaaaccttatgactttattcaggacaaaaacaggcaccactatgcaggtatggtttccctgatggacgaggcagtggggaacgtaaccgccgctcttaagtcaagtggactgtggaacaataccgtgttcatttttagtacagacaatggtggccagacattggcaggcggcaataactggcctctacgaggccgaaaatggtctctttgggaaggaggcgtgaggggggtcgggtttgtggcttcccctctcctaaaacaaaagggagtcaaaaacagagagctgatccacatctctgactggttaccgactctcgtgaagttggccaggggccataccaatggaacaaaaccccttgacggatttgatgtgtggaagactatcagtgaaggaagcccttctcccagaatcgagctgctacataacattgacccaaactttgtggactcctccccttgcccccgaaacagcatggcccccgcaaaggatgattccagcctccctgagtacagtgcatttaatacatcggtccatgcagcgatccgacatggcaactggaagctgcttactggctatcccggatgcgggtattggttccctccgccatctcagtataacgtgtcggagattccgtcctccgaccctccaacaaaaaccctttggctatttgatattgatagagatcctgaagaacgacacgatctgagccgagaatacccccacatcgtgaccaagttgctcagcaggctccagttctaccacaagcattcggtccccgtttatttccctgcccaggatcccaggtgtgaccccaaggcaactggcgtgtggggaccatggatg

SEQ ID NO: 506 - DNA, 1599 bp, Artificial Sequence
  derived and/or modified sequence
atgggcccacgtggcgctgcttccctacccagaggccccggcccacgacgcttactgcttccagtggtgttacccctactactgctgctgctgctggccccacccggatctggagcaggcgccagcagacccccacacctggtgttcctcctggccgacgaccttggctggaacgacgttgggttccacggcagcagaattcgaactccccatctggatgccctcgccgccggaggtgtgctactggataattactacacccagccactgtgcactcccagccgatctcagctcctgaccggcagataccagatccgcactgggcttcagcaccagattatttggccttgccagcctagctgtgtacctttggacgaaaaactgcttccccagctgctcaaggaagccggctatactactcatatggtgggaaagtggcacctagggatgtacagaaaggaatgcttaccaactagacgcggctttgatacttacttcggctacctgctgggatcagaagattactactctcatgagcgatgtactctgatcgatgctctgaacgtgactaggtgtgccctggattttcgagatggcgaagaggttgctactgggtataagaacatgtatagtaccaatatttttacaaaaagagctatagcattgataaccaaccacccccctgagaagcccctgtttctgtatctggctctgcagagtgtgcatgagcctctgcaggtgcccgaggagtacttgaagccatacgactttattcaggataaaaaccgccatcactatgccggaatggtctctctgatggacgaggcagtgggtaatgtgaccgccgccctcaagtccagtggactgtggaataacaccgtttttattttctccaccgataatgggggccagactctcgccggaggcaacaattggcccctgcgcggccgaaagtggtccctgtgggagggcggcgtgcgcggtgtcggttttgtcgcttcccccctgctgaagcagaagggcgtgaaaaaccgcgagttgatccatattagtgactggctgcctacattagtgaagctggctaggggccatacaaacggcacaaagcccctggacggtttcgacgtttggaaaaccatatccgagggcagcccatctccccgcatagaactgctgcacaatatagaccccaacttcgtggattcttcaccctgccctagaaattctatggcacctgcaaaagacgacagttccctgcccgaatactcagccttcaacacatccgtacacgcagcaatccgccacggtaactggaagctgctgactggctacccaggatgcgggtattggttcccacctcccagtcagtataatgtgtccgaaataccatcctccgacccccccaccaaaacactgtggctgtttgacatcgatcgcgatcccgaagagcggcatgatctgtcccgggagtatccacacatagtcaccaaactactgtccagacttcagttctatcacaagcatagtgtgcctgtgtacttcccagctcaggatccccgatgcgatcccaaagccacaggcgtgtggggcccttggatg

SEQ ID NO: 507 - DNA, 1599 bp, Artificial Sequence
  derived and/or modified sequence
atgggaccaagaggagctgccagcctgccgaggggaccgggaccacggcggctgctcctgccggtcgttctcccgctgctgctgcttctgctgctggcccctcctggatccggcgcgggggcatctcgcccaccacacctggtgttcctgctggcggacgatctcggatggaacgacgtggggtttcatggctcccgcatccgcaccccacatctcgacgccctcgctgcgggaggagtgctgctggataactattacacgcaaccactttgtaccccgtcacggtcgcaactgctcactggtagataccagattaggaccggactgcagcatcaaatcatatggccgtgccagccatcctgcgttccactggatgaaaagctcctgcctcagttgctcaaagaagccggatacactacccatatggttggcaagtggcacctcggaatgtaccggaaggaatgtctgccgaccaggagagggttcgacacgtacttcggatatctgttgggaagcgaagattactacagccacgaacgctgcaccctgatcgacgcccttaacgtgacccgctgtgcgttggatttccgggacggagaggaagtggcgactggatacaagaacatgtacagcaccaatatcttcaccaaaagagcaatcgccctcataaccaaccaccctccggaaaagccgttgttcctttacttggccctgcagtcggtgcacgaacctctccaagtcccggaggagtacctcaagccctacgatttcatccaggacaagaatcggcatcattacgccggcatggtcagccttatggacgaagctgtgggaaatgtgactgccgcacttaaatcgtcaggactctggaataacactgtctttatcttctcgacggacaacggagggcagaccctggccggagggaataactggccgctgagaggacggaagtggtcactgtgggaaggaggtgtgcggggagtcggatttgtcgcgtccccgctccttaagcagaagggagtgaagaaccgcgagctgatccacatctcggattggctccccaccctggtgaagctggctcgcggccacactaacggtaccaagcccctcgatggattcgacgtgtggaaaaccatcagcgagggatcgccgtcaccgagaattgaactgctgcacaacatcgacccaaacttcgtcgatagctcgccctgtccgcggaactcaatggccccggcaaaggacgattcgtccttgcctgagtactccgcgtttaacacctcggtgcatgcagcaatccggcacggcaattggaagctccttactggttacccgggctgcgggtactggttcccaccaccgtcgcaatacaatgtgagcgaaatcccgtcctctgacccgccaaccaagaccctgtggctcttcgacattgaccgggatccggaagagcgccacgacctcagcagggaatacccgcatatcgtgactaagttgctctcaagactccagttttaccataagcattccgtcccagtgtacttccccgctcaggaccctcggtgcgatccgaaagcgactggagtttggggcccttggatg

SEQ ID NO: 508 - DNA, 1599 bp, Artificial Sequence
  derived and/or modified sequence
atgggacccaggggagccgcctcattgcctagggggccagggccccgccggcttttactccctgttgtccttcctctcctgttactccttttacttgccccccctgggtcgggagctggagcttccagacctccacatctcgtttttttacttgctgatgatctcggatggaatgatgtagggtttcacggatctagaatcagaactccccatctagatgccttggccgccgggggggtgcttctagataactactatacacagcccctctgcacaccaagtcggtcacagctgcttacaggacgctatcagattagaacagggctacagcaccagattatttggccatgtcagccttcttgcgtgcccctggatgaaaaactcctgccacagctccttaaagaagcaggatatactactcatatggtggggaaatggcacctcgggatgtatcgcaaagaatgcttaccaactcggcgcgggtttgatacttatttcgggtatcttctcgggtctgaggattattattctcatgagcgctgtacactcatcgatgctcttaatgtgacaagatgtgcactcgacttcagagatggggaagaagtagcaacaggatataagaatatgtattccactaatatctttactaaacgggctatcgctctgataactaaccaccctccagaaaaacccttgtttctatatctggcgctacagtctgtgcatgaacccctccaggtgcccgaagagtatcttaaaccttatgatttcatacaggataaaaatcgtcatcactatgcagggatggtgtccctcatggatgaggcagtcgggaacgtgacagccgctcttaaatcatctggactatggaacaacacagtgtttatattctcgacagataacggagggcagacactggctggaggaaacaattggcccttgagggggcgtaaatggtccctgtgggaagggggggtgaggggggtgggatttgtggcttcccctcttctaaagcagaagggagtaaaaaatcgtgaactgatacacatctctgattggctccctacattagtcaaactggcccgcggacacactaatgggacaaaaccactggatggattcgatgtgtggaagacaattagtgaaggaagtccttcacctcggatcgaactcctacacaacatcgatcccaatttcgtcgattctagtccttgtccacggaactccatggcaccagctaaagatgatagttcgctccccgagtatagtgcattcaacacatcggtacatgcggccatcaggcatgggaactggaagttactcacgggatatccagggtgcgggtactggtttccaccccccagtcaatataacgtatctgagatcccctcatctgatccccccacaaaaactctttggctctttgatatcgatagggatcccgaagagcggcacgacctctctagagaatatcctcacatcgtcactaaactactctcaaggttacagttttaccacaaacattcagtccccgtttatttcccagcccaggaccctcgctgcgatcccaaagccacaggagtatgggggccatggatg

SEQ ID NO: 509 - DNA, 1599 bp, Artificial Sequence
  derived and/or modified sequence
atgggtccgaggggtgcggcttccttgcctcgtggccctggtcctcgacggctgttgttgcctgttgtgcttcctcttcttttgctgctcctgctcgcaccaccgggcagcggcgctggcgcatccagaccaccccatctcgtgttccttcttgcggacgatctggggtggaacgatgtgggctttcatggatcgaggataagaactccgcaccttgacgccctcgcagccggaggagtgctgcttgacaattactacacccaacctctttgtacccctagcagaagccagcttctgaccggacgataccaaatacgcactggtctgcaacatcaaatcatctggccctgtcagccatcgtgtgtgcctcttgatgaaaagctgcttccccaacttctgaaggaagcaggatacactacccacatggtggggaaatggcatcttggaatgtacaggaaggagtgccttcccactagacgcggctttgatacgtactttgggtacctgctgggaagcgaggactactactcgcatgaacgctgtaccctgattgatgcactgaacgtgaccaggtgtgctcttgacttccgcgacggagaagaagtggcaaccggatacaagaatatgtactcgacgaatatctttacgaagcgcgccattgcgctgatcaccaaccatcctccagaaaagcccctgttcctgtaccttgcgttgcagtccgtgcatgaaccacttcaggtgccggaagaatatctgaagccctacgacttcatccaggataagaacaggcaccattacgcaggaatggtgagcctgatggacgaggcagtgggaaacgtcactgcagccctgaaatcgtcgggcctctggaacaacactgtctttatcttttcgactgataacggaggtcagactttggctggcgggaacaattggcctcttagaggacgaaagtggtcgctctgggaaggaggagtgcgtggtgtggggttcgtcgcatcgccactccttaagcaaaagggggtcaagaaccgcgaactcattcatatttcggactggctgccaacccttgtgaagctggctagaggccataccaatggaaccaagcccctggacggattcgacgtctggaaaaccatttcggaaggttcgccaagcccccggatcgaactccttcacaacattgatccgaacttcgtcgatagctcaccttgtcctcgtaactctatggcacctgccaaagatgattcctccctgcctgaatactctgcatttaacacctccgtccatgcagcaattagacatggaaattggaaacttcttaccgggtatccaggatgtggatattggtttcctccgcctagccaatacaatgtgtcggaaataccaagctcagatccccctaccaagaccctttggctttttgatattgaccgggatccagaagagcgccatgacctctcgagggaataccctcatattgtcactaagctgctgagccgcctccagttttaccacaaacattcagtgccagtgtactttcccgcccaggatccccggtgcgatccaaaggccacgggagtgtggggcccgtggatg

SEQ ID NO: 510 - DNA, 1599 bp, Artificial Sequence
  derived and/or modified sequence
atggggcccaggggagctgcctccctgccacgtggacccggaccgcgcagactcttgcttccggtagtgcttccattactcctgctgctgctcctggcacctcctgggtcaggagccggggcctcacgccccccccacctcgtctttcttctcgcggacgacctggggtggaatgatgtcggattccacggatcgcgaattaggacccctcatctggatgccctggctgctggcggcgtgttgctcgataactactatacccagcctctttgcaccccgtccaggtcacagctacttaccgggaggtaccagataagaacgggtctgcagcaccagattatttggccttgccagccctcttgtgttccactggatgagaagctgcttccgcagctcctgaaggaagccgggtacactacacacatggtggggaagtggcatctcgggatgtataggaaggaatgcctgcccacaaggcgggggttcgacacttatttcggctacctgttgggatcagaggactactactcgcacgagaggtgtaccttaatcgatgctctcaacgtcacgcggtgcgcgctagatttccgggatggtgaggaagtggctaccggttacaaaaacatgtacagtacgaatattttcaccaagcgcgcaatagctttgattactaatcatccgcccgaaaaacctttatttctgtatttagccctgcagtcagtgcatgagccccttcaggtgcctgaggaatatctgaaaccgtacgacttcatccaagacaagaatagacaccattacgctgggatggttagcctgatggacgaggccgtgggcaacgttactgcagcgctgaagagctcgggtctgtggaacaataccgtgttcatcttttccacagacaatggtggacaaacgctagctggaggaaataattggcccctgcgtggtcgcaaatggtctctctgggaaggaggagtgcgtggggtgggctttgtagccagccctttgttaaagcaaaagggagtcaaaaatagagagctcatccatataagtgattggctacctactctcgttaagctggcccgggggcataccaacggcacaaaacctctcgacgggtttgacgtgtggaaaactatttcagagggatccccttcacctagaattgagctccttcacaatatcgatcccaatttcgtggattccagtccatgcccccggaattctatggccccagccaaggacgattccagtcttccagagtactctgctttcaacacgagtgtccatgcagctattcgacatggaaattggaagctgcttaccggctaccctggatgtggatactggttcccacctccatcccagtataacgtctccgagattccaagttccgaccccccaaccaagacgctgtggctgtttgacattgatcgcgaccctgaggagcggcacgatctgtccagggaatacccacacatcgtgaccaagctgctctctagattgcagttctaccataagcactctgtgccagtttatttccctgcccaggaccccaggtgcgatccaaaagctaccggcgtgtggggaccgtggatg

SEQ ID NO: 511 - DNA, 1599 bp, Artificial Sequence
  derived and/or modified sequence
atgggtcctcgtggtgctgcaagtcttccccggggccccgggcctcgccgcctgctcttacctgtggtactcccactgcttctccttctcctgctagcgccgcccggtagcggagcgggtgcgtctcgcccaccccatcttgttttcctcttagcggacgacctcggctggaatgatgttggcttccatgggtcgcgtatccgtaccccacacctcgatgctcttgcggcgggtggtgtgctccttgataactattacacccaacccctgtgtaccccgtctcgttctcagttgttgactggacggtaccagatccgtaccggtttgcagcatcagattatctggccgtgccagccctcgtgcgtaccactcgatgaaaagctcctgccacagctgctgaaggaggccggttataccacccacatggtcggtaagtggcacctcggtatgtatcgtaaggaatgtctcccgacccgccggggcttcgatacatacttcggttacctcctgggtagcgaggactactactcccacgagcgctgcacgttgatcgatgcgcttaatgtgacacgctgcgcgctggattttagagatggtgaggaggtggcgacgggctataagaacatgtactccactaacattttcacaaagcgtgccattgcgctgattaccaaccatcctcccgaaaaacccctgttcctctacctggctctccaatccgttcatgaacctctgcaggtccccgaggagtaccttaagccttacgacttcatccaggataagaaccgccaccattacgcgggcatggtctccctgatggatgaggccgtgggtaacgtaaccgccgctctgaaatccagcggactttggaacaacaccgttttcatctttagtacagataacggtggtcagactctggccggtggaaacaattggcccctccggggacgtaagtggtcgctgtgggagggaggagttcgaggtgttggcttcgtcgctagcccccttctcaagcagaagggcgtgaagaacagagagcttattcatatctccgactggcttcccaccttggtcaagctggcgcgtggtcacaccaacgggaccaagcccctcgatggatttgacgtttggaagactatcagcgagggcagcccgagccctcgcatcgagctcctgcataacatcgatccgaacttcgtcgattcgagcccgtgtcctcgtaactcaatggcccctgcgaaagatgactcctctctccccgagtacagcgcctttaacaccagcgttcacgccgcaatccgtcacggcaactggaagcttctgactggataccccggctgcggttactggtttcccccgccctcgcaatataacgtcagtgaaattccctcgagcgacccccctacaaagacgctctggctgttcgatatcgacagagatccagaggagcgacatgatctttcccgggagtacccacacatcgtcacgaagctgttgtctcgtctccagttctaccacaagcacagtgtacccgtctactttcccgcacaggacccacgctgcgatcccaaggcaaccggcgtctggggtccttggatg

SEQ ID NO: 512 - DNA, 1599 bp, Artificial Sequence
  derived and/or modified sequence
atgggtcctagaggcgcagctagccttccaaggggccctggtccacggcgattgctccttcccgtcgttctgcctctgcttcttctgctccttctggccccaccgggaagcggagcaggtgcctccaggcccccgcacctggtgttcctcctcgcagatgacctggggtggaatgatgtgggatttcacggttcccggattaggactccgcatcttgatgcgctcgccgcgggaggagtgctgcttgacaattactacacccaacctctttgcaccccctcgcgttcccaacttcttactggccgttaccagattcgtacgggcttgcaacaccagatcatatggccttgtcagccctcctgcgtgcctcttgatgaaaaactgctcccacagctgctgaaggaggccggttacaccacccatatggtcggaaagtggcaccttggtatgtatagaaaggaatgtctgccaaccagacgaggttttgatacctactttggataccttctgggttccgaggattactactcacatgaacgctgcactctgatagatgccctcaatgtgacccgatgcgccctggatttcagagatggagaagaggtggcaactgggtacaagaacatgtactcaaccaacattttcacgaagcgggccattgccttgatcacgaatcatcctcctgaaaagcctcttttcctgtaccttgcccttcagagcgtgcatgagccgctgcaagtgcccgaagaatatctgaaaccttacgactttattcaagataagaacagacatcattatgcaggaatggtgtcacttatggatgaagcagtggggaatgtcaccgcagctctgaagtcgtccggcctgtggaacaacactgtgttcattttctccactgataatgggggacaaactctggccggtggtaacaattggcctctgagagggaggaagtggtccctgtgggaaggcggtgtgcgaggagtcggcttcgtcgcatctccactgcttaaacaaaaaggagtgaagaatcgagagttgatccatatctcggattggctccctacgcttgtgaaactggcaagaggacacactaatggaaccaagcctctggatggcttcgacgtatggaaaaccatttcggaggggtcaccatcaccacgtattgaactgcttcacaacattgatccaaacttcgttgattcatcgccctgcccccgtaattcgatggcaccagcgaaggacgacagctccttgcccgaatattcagcattcaatactagcgtccatgcggccattcggcatggcaattggaagctccttaccgggtaccctggttgtggatactggttcccaccaccctcccagtacaacgtcagcgaaattccttcctccgatccacccaccaagaccctttggctgtttgatattgatcgggatcctgaagaacgccatgatctttcaagagagtacccccatattgtgactaagctgctttcgagattgcagttctaccacaaacattcagtcccagtgtactttcctgcgcaagatccacggtgtgaccccaaggcaactggcgtgtggggcccgtggatg

SEQ ID NO: 513 - DNA, 1599 bp, Artificial Sequence
  derived and/or modified sequence
atggggcctaggggggctgctagccttccacggggcccaggtccccggcgcctgcttctgcctgttgtgctccccttgcttctcttgctgttgctcgcgcctccgggctctggcgcgggagcgagccgccccccacacctggtttttctgctggcagacgatctcgggtggaacgacgtgggctttcatgggtctagaatacggactccacatctggatgcccttgctgcaggaggagtgcttctcgacaactattacactcagcccctgtgcacaccttctaggagtcagctcttgacagggaggtaccagattaggacaggtctccagcaccagatcatatggccttgccaaccctcttgcgtcccacttgatgagaagctgcttcctcagttgcttaaggaagccggttacactacccacatggtagggaagtggcacctgggcatgtatcggaaggaatgcctgcctacacggcgggggtttgacacctattttggatacctgctgggctccgaagattactactcccatgagagatgcacactgatcgatgccctgaacgtcacacgctgcgcactcgacttcagagatggagaggaggtggccacggggtacaagaacatgtacagtaccaacatctttacgaagagggcaatcgccctcattaccaatcacccccccgaaaagcctctttttctgtacctcgctctgcagtctgtgcacgagcctctccaggtccccgaggaatatctcaagccgtacgactttatccaggataagaacagacaccactatgcgggtatggtctcactcatggatgaggctgttggaaacgtgacggcagccctcaaatcctcaggtctgtggaataatacagttttcatattcagcacagacaatggaggacaaacgctggccggaggaaacaactggcctctgcgcgggagaaagtggagcctgtgggagggaggtgtgcgcggggtaggattcgttgccagccctctcctcaaacagaagggagtgaagaaccgagagctgatccacatctctgattggctcccgacccttgtaaaactggcgagaggccacacgaacggcactaagcctctcgatgggttcgacgtttggaagacgatcagcgagggaagccccagcccacggatcgagctcctgcacaatattgacccaaattttgtggactcttctccctgccctagaaacagcatggccccggctaaggatgattccagtcttcctgagtattctgcattcaacactagcgtgcacgcagcaattcggcacggtaactggaagctcctcaccggttatcctggctgtgggtattggttccctccccctagccagtataacgtctcagagattccttcctctgacccgcccactaaaaccctctggcttttcgacattgaccgggatcccgaggaacggcacgacctgagtagggagtatccgcacatagttactaagctgcttagcagactgcagttttaccacaaacactccgtgcccgtatatttcccagcgcaagatcccaggtgcgatcccaaagccactggtgtctggggcccctggatg

SEQ ID NO: 514 - DNA, 1599 bp, Artificial Sequence
  derived and/or modified sequence
atgggacctcgtggagctgcgtcattgccccgaggaccgggaccccgccgccttctactacccgttgtactgccactcctcttgttgctgttacttgcaccaccaggaagcggagccggtgcaagccgtcccccgcatttagtctttttgttggctgacgatcttggctggaatgatgttggatttcatggtagcagaattagaaccccgcatttggatgcattagccgctggaggagttctacttgataattattatactcagcctttatgtactccatcccgttcacaacttctgactggacgttatcaaattcgtactggactgcaacaccagatcatttggccatgtcaacctagctgcgtgccgctcgatgagaaactcttgcctcaattgctgaaggaggcgggatacactacacatatggtgggtaaatggcacctaggaatgtatagaaaagaatgtttgccaacaagacggggatttgatacctattttggatatttgttaggatccgaagattactacagtcacgaaagatgtactttaatagatgctctgaatgtgacgcggtgtgctcttgattttagagatggagaggaagtggctacaggatataagaacatgtattctacgaatatctttactaaaagagctattgctctgatcacaaaccacccaccggaaaaaccattattcttgtatttggccctgcagtcagttcatgagccactgcaagttcctgaggagtacttaaagccttatgactttatccaagataagaacagacatcactacgctgggatggtttcacttatggatgaggcggttgggaatgttactgccgcacttaagtcatcaggactctggaataatacggtattcattttctcaacagataatggaggacaaactctggctggcggtaataattggccattacgtggtcgtaaatggtccctttgggaaggaggagtacgaggggttgggttcgtcgcaagtccgctgttaaagcagaagggagtgaaaaatagggaacttattcacatctccgattggttgccaactttagttaagttggctagaggtcatactaacggaactaaaccgcttgatggcttcgacgtctggaagactatttccgaaggatcaccctcgccgagaattgaactattgcacaacattgatcctaattttgtagactccagcccttgccctcgaaattcaatggccccagctaaggatgactcatcactcccagaatattcagccttcaatactagcgtgcacgcggcaatccgacatggaaactggaagctgcttactggttacccaggatgcggatattggtttccgccgccgtctcaatataatgtttcagaaatcccgtccagtgatccacctacaaagacactctggcttttcgacatcgatagagatccagaggagagacatgatttgtctcgagaatatccacatattgttacaaaacttctgtcgcgccttcaattttatcataaacattctgtgccagtctatttcccggctcaggatccacgatgtgatcctaaagcaacgggagtttggggaccatggatg

SEQ ID NO: 515 - DNA, 1599 bp, Artificial Sequence
  derived and/or modified sequence
atgggtccgaggggggccgcctccttgccccgcggaccagggcctcgccgccttctgttgccggtagtcctgccactcttgctgctcttattgctcgctccacctgggtcaggagctggagcgtctcgccccccacatctcgttttcttgctggccgatgacttaggctggaatgatgtcggcttccacggaagcagaataaggacccctcacctcgatgcgctcgcagccggcggagtcctgctcgacaactactacactcagcccctttgtactccttctcgatcgcagctgctcacaggaaggtaccagattcgaactggactccagcaccagattatatggccatgccagcctagttgcgttcctctagacgaaaaactgctcccccaattgctgaaagaggccggatataccacccacatggtggggaaatggcatctagggatgtacagaaaagaatgcctgcctactaggcggggatttgatacctattttggctacttacttggctccgaagactactactcccacgagcgttgtacgctgatagatgctttgaatgtgacacgctgtgccctggattttcgggatggcgaagaagttgctaccgggtataaaaatatgtacagcactaacatttttacaaagagggcaattgccctcatcactaatcatcctccagaaaagccactgttcctctacctcgcattgcagtctgttcatgagccactccaggtgcccgaagagtaccttaaaccttatgacttcatccaggacaaaaacaggcaccattacgcagggatggtaagcctcatggatgaagccgtcggaaacgtaaccgcagctctgaagagctctggcctttggaacaatacagtcttcatcttctcaacggacaatggagggcaaacccttgcaggcgggaataactggccccttcgcggcaggaagtggtccctttgggaagggggagtacgaggggtgggctttgtggcttctccactgctcaaacaaaagggggtgaagaaccgcgaacttatacatatatcggattggcttccgactttggtgaaactggcacggggccacaccaacgggactaagcccttggatgggttcgacgtgtggaaaacgatatccgagggaagccccagcccacgcatcgaactgctgcacaacatagacccgaatttcgttgattctagcccttgccccaggaacagcatggctccagcaaaggacgacagctcactaccggaatattcagcctttaatacgtcagtccacgctgcaattcgtcatgggaattggaagctcctaacagggtatccaggatgtggatattggtttcctccaccctctcaatataatgtgagcgaaattccatcttccgatccgccaacaaagacattgtggctcttcgatatcgacagggaccctgaggagagacacgacctgagccgcgaatatccacacatcgtgaccaaacttctctcaagactccagttttaccataagcactcagttccagtgtactttccagctcaggacccccgatgcgacccaaaagccaccggggtttgggggccttggatg

SEQ ID NO: 516 - DNA, 1599 bp, Artificial Sequence
  derived and/or modified sequence
atgggtccaaggggcgctgctagcctgcccagaggaccagggccaagaaggcttctactgccagttgtgctgcctctgctactactgctcctattggccccccccggatcaggcgccggggcaagtcggcctcctcacctcgtctttctacttgccgacgatttggggtggaatgacgtagggttccacgggtcccgcatcaggactccgcaccttgacgcccttgcagcaggcggtgtcctgcttgataattactacacacagcccttatgtaccccctcacgcagtcagctcctgacaggcaggtatcagataaggaccggcctacagcatcagatcatttggccgtgtcagccttcatgtgtgccccttgatgagaagctgcttcctcagttgctgaaagaagccgggtacacgacccacatggtggggaaatggcatctggggatgtataggaaagaatgtctccccactagaagaggatttgacacatactttggatacctcttgggctcagaggattattattcacacgagcgctgcaccctgatcgacgctttgaacgtgacgaggtgtgccctcgatttccgcgacggggaggaggtagcaacgggatacaagaacatgtacagtaccaatatctttacaaagcgggccatcgccttaataaccaaccatccacctgagaagcccttgtttctctatctggcactgcaaagcgtacacgagccattacaggtccctgaggagtatctgaaaccttacgatttcatccaagacaagaacagacatcattacgctggcatggtaagtctcatggacgaggctgtcgggaatgttactgctgccctcaagagcagtggcctttggaacaacactgtgttcatcttctccacagacaacggaggacagactctcgccgggggtaataattggccactcaggggacgtaaatggagcctgtgggaaggcggagtccgcggggtcggattcgtggcatcacccctcctgaagcagaagggcgtaaaaaatcgggagttgattcatatatcagattggctgcccacactggttaaactggccagggggcacaccaacggcacaaagcccctcgatggctttgacgtctggaaaactatctctgagggcagccctagcccaaggattgaattactccataatatcgatccaaacttcgtggactcaagcccatgccccagaaacagcatggctcccgcgaaagacgacagctccctgcctgagtactccgcatttaatacttcagtccacgctgctatcaggcacggtaactggaaactcctcaccggatacccaggatgtggatactggtttcctccaccatcccagtataatgtctctgagatcccttcttcagatcctccgacaaaaacactgtggctcttcgatattgatcgggacccagaggagcggcacgatttgtctcgcgagtacccccacattgtgaccaagctgttgtctcgccttcagttctaccacaagcacagcgtgcccgtttatttccccgctcaggacccgcgctgtgatccaaaggccacgggggtgtggggtccctggatg

SEQ ID NO: 517 - DNA, 1599 bp, Artificial Sequence
  derived and/or modified sequence
atgggtccgaggggtgcggccagcttgccccgaggtccgggcccacgacgccttctactacccgtggttctgcccttactactgttgttactactcgccccaccgggctccggagcgggggcatccagacctccgcaccttgtttttcttctggctgatgacctcggatggaatgatgtcggattccatggaagtcggatacgaaccccgcatctcgacgcccttgctgcgggtggtgttctcctcgataattactatacccagccgctctgcaccccttctagatcccagcttcttacaggcaggtaccaaattcggaccggcctgcagcatcagattatttggccatgccagccctcctgtgttccgttagatgaaaagctcctcccgcaacttcttaaggaggcgggatacactacgcatatggtgggtaagtggcatcttgggatgtaccggaaggaatgtcttccaacgcgtcggggcttcgatacttatttcgggtacttattgggatctgaggactattattctcacgaacgttgcacgctgatcgatgctttgaacgtcactcgttgtgccctggattttcgtgatggtgaggaagtcgcgacaggctataaaaacatgtactctactaatatatttaccaagcgtgcaatcgctctgataacgaaccacccacctgagaagcctctgttcttgtacttggctctgcaatcagtacatgaaccactgcaggtgcccgaggagtatctcaaaccttacgattttatacaagacaaaaatcgacaccattacgcggggatggtatctcttatggatgaggcggtgggaaatgtgacggcggctctcaagagttccgggttgtggaataataccgttttcatttttagtactgacaacggaggtcaaacgctggcaggtggcaacaactggcctcttcgcgggcgaaagtggtcactttgggagggcggtgttcgcggagttggttttgtcgcaagcccactactgaaacaaaagggcgttaaaaaccgtgaacttatacatatatccgattggcttccgactctcgttaagctagccagaggccatactaatggaaccaaacctcttgatggtttcgatgtctggaagacaatcagtgaggggagtccgtctcccaggattgaattgctccataacatcgatccgaactttgtggatagctctccatgtccgaggaactcaatggcgccagcgaaagacgacagttctttgccggaatactcggcatttaacacctctgtgcacgccgccattcgtcatgggaattggaagctactgacaggttaccccggctgtggctactggttcccaccgcccagccagtataatgttagtgagatcccctcaagcgatccaccgacaaagacactgtggctcttcgacatagatagggacccggaggagcgccacgatttgagccgagagtacccgcacatcgttactaagctgctgagtagactccaattttatcacaagcacagcgtgccagtctatttcccggcgcaagatccccgctgtgatcctaaggctacgggtgtgtgggggccgtggatg

SEQ ID NO: 518 - DNA, 1599 bp, Artificial Sequence
  derived and/or modified sequence
atgggccctcggggtgctgcctcactgccgcggggacccgggccccgacgtctgctcttaccagtggtgttgccattgctattgcttcttctgctggccccacccggctctggagccggcgcgagccgccccccacacctagtgtttctgttggctgatgatcttggctggaacgatgtgggctttcacggaagccggatccgcacgccacacctcgacgccttggcagctgggggcgtgctcctcgacaactactacactcaacctctttgcaccccatcgaggtcacagctactcacgggtcgctatcagatcaggacagggcttcagcaccagataatttggccctgtcaaccctcatgcgtgccgctcgatgaaaagttactgccacagctacttaaagaggccggttatactacccacatggtggggaagtggcacctcgggatgtataggaaagaatgtctgccaaccaggcgaggatttgatacatatttcgggtatttgttgggctccgaggactactatagtcatgaacggtgcacattaatcgacgccctgaatgttactcgttgcgctttggattttagagacggggaagaagtcgctactggctacaagaacatgtacagcacaaatatcttcacaaaacgcgccattgccttgataacgaatcaccctcctgagaagcctcttttcttgtatctcgcattgcagtctgtgcatgagccattgcaggttcctgaggaatatctgaagccgtacgactttatccaggataagaatcggcatcattacgccggtatggtgagccttatggatgaggccgttgggaatgtaacagcagccctaaagagttcaggactgtggaataacaccgtgtttattttcagcaccgataatgggggacagacattggctggcggaaataactggcccctgcgcggccgcaaatggtcattatgggaaggtggcgtgaggggagtcggctttgtcgcatctccactcttgaaacagaagggtgtaaagaaccgtgagcttattcatatcagcgactggctcccaaccttggtgaagctggcaaggggccacaccaacgggaccaaaccactggatggtttcgacgtgtggaagacgatttccgagggtagcccatctcctagaatcgaattgctgcataatatagatccaaactttgtcgatagctcaccttgccccaggaattcaatggcaccagccaaggatgactctagcctacccgaatattcagccttcaatacttctgttcacgctgctattcggcatgggaattggaagttgctgaccggctatcctggatgtggatattggtttccaccaccgagtcagtacaacgtcagcgagatcccgtcatcagatcctccaacgaaaacactttggctcttcgacatcgacagagatcctgaggagcggcacgatctatctcgtgaatacccccacatcgttaccaaattgctgtctagactgcaattttaccataagcactcagttcccgtgtactttcccgcacaggatccccgctgtgaccctaaagctaccggagtatgggggccttggatg

SEQ ID NO: 519 - DNA, 1599 bp, Artificial Sequence
  derived and/or modified sequence
atgggtccaagaggtgccgcatcgctccccagaggacctggtccacgcagactgctgcttccggtggtgctgcccctgcttttgctgcttctgttggcaccacccggttccggcgcaggtgcatcgcgcccaccccatctcgtgtttcttctcgcggatgacctgggatggaatgatgtcggatttcacggttcaaggatccgcactcctcatttggatgccctggccgcaggtggagtgttgctggacaactactacacccaacccctgtgtactccatcgaggtcacaactgcttactggcaggtaccaaatacggacgggcttgcagcatcagattatctggccatgccaaccatcatgtgtccctcttgatgaaaagctcctgccccaactgctgaaggaagccgggtatactacccacatggtgggtaagtggcacctgggaatgtaccggaaggaatgtctgccaacgcgacgaggttttgacacttacttcggctacctgctcggctcggaagattactactcacatgagcgctgtacccttatcgacgcactcaacgtcacgcggtgtgcacttgatttcagagacggcgaggaagtggcgaccggatacaagaacatgtacagcaccaacattttcactaagcgggctattgcactcatcaccaaccacccccctgagaagcccctgttcttgtacctggcgctgcaatccgtgcacgaacctctgcaagtgcccgaagaatacctgaagccgtacgatttcattcaagataagaacagacatcattacgccggaatggtgtcgcttatggatgaggcagtcgggaacgttaccgcagcactgaaatcgagcggactttggaacaacaccgtgttcatcttttccactgataatggcggacaaaccctggcaggcggtaacaattggcccttgaggggaagaaagtggtcgctgtgggagggcggtgtgaggggcgtgggttttgtggcatcacctctgttgaagcagaaaggggtgaagaatcgggaacttatacatattagcgattggcttcccacccttgtcaaactggccagaggtcacactaatgggaccaagccgttggatggctttgacgtgtggaaaactatttccgaaggttccccttcacctcgtattgaacttcttcacaacattgatccaaactttgtcgattcatccccttgtccaagaaactccatggcccctgcaaaagatgattcctcactccccgaatactcggcatttaacacttccgtgcatgcagcaattaggcatggtaactggaaacttttgactgggtaccccggatgtggatactggtttcctcctccatcgcagtacaacgtgtcggagatcccatcctccgatccccccaccaaaactctttggctgtttgacatcgatcgcgaccctgaagaacgccatgacctgagccgggaatatcctcatattgtgacgaaacttctgtcgcggctccagttttaccataagcattccgtgcccgtctattttcctgcacaagacccaagatgtgaccctaaagctactggagtctggggtccatggatg

SEQ ID NO: 520 - DNA, 1599 bp, Artificial Sequence
  derived and/or modified sequence
atggggccccgcggcgctgcatcccttcccagaggaccaggcccacggagactactgctgcccgtggtgttgcctttgctccttctgttgctcctcgctccgccaggaagtggggcaggagcctcccgaccgccgcaccttgtgttcttgctggctgacgatctggggtggaacgacgtggggttccacggatcacgaatccgtacaccccacctagacgccctcgcggccggaggggtgttactggacaattattacacccagccactgtgcacgccctcaaggtcccagctgttgaccggcagataccagatccggacgggcttacaacaccaaatcatatggccctgccagccttcttgcgttccgctggacgagaagttattgcctcagctgttgaaagaggccgggtatactacacatatggtggggaagtggcatctgggaatgtaccgcaaagagtgccttcccactcgaagggggttcgacacctactttggatacctcctgggtagtgaagattactattctcacgaacgatgcacgttgattgacgctctgaacgtgacacggtgtgctctggacttcagggacggggaggaggtcgctaccggttacaagaacatgtatagtactaatatcttcacaaaacgagctattgctctgataaccaaccatccacccgagaaaccccttttcctttatctggccctgcagtccgtgcacgaaccattgcaagttcccgaggaatatctcaagccatatgacttcatacaggacaagaacagacaccactacgccggaatggtgtcgctcatggatgaagctgtgggcaacgtgactgctgctctgaagagctctggcttgtggaataatacagtatttatattctccaccgataatggtggccagactctcgccgggggaaataactggccattgagggggcggaagtggagcctgtgggagggaggggttcggggcgtgggtttcgtagccagtccccttctgaagcagaagggtgtcaaaaaccgtgaactaattcatatcagcgactggttgcccaccctcgtcaaactagctcgtggccacactaacgggaccaagcctctggatggattcgacgtgtggaagacgatctcagagggatctcccagtcccaggatcgagctcctccataacatagacccaaactttgtggatagtagcccgtgtccacggaattctatggctcccgctaaggatgatagttcactgccagaatacagtgcctttaataccagcgtgcacgccgctattcgacacggaaattggaagctgcttaccgggtaccctgggtgcggctactggttccctcccccttctcaatataacgtatcagaaatccccagctctgaccctcccacaaagacactgtggctattcgatatagaccgcgatcccgaagaacgccacgacctatcacgagagtacccacacatcgtgaccaagctactgagccgccttcagttttaccataagcacagcgtgccagtatatttccctgcccaggacccgcggtgtgaccccaaagccaccggtgtgtggggcccctggatg

SEQ ID NO: 521 - DNA, 1599 bp, Artificial Sequence
  derived and/or modified sequence
atgggcccccggggcgcagcttcactgcctaggggtccagggccccgacgcttactactgccagttgtacttcctctcctgttgctcctgctgctcgccccgcctggctctggcgctggagccagtagacctccgcatctggtgttcctcctggcggatgacttgggctggaatgacgtaggattccatgggtctcggattcgcactccccatctcgacgcgctcgctgctggtggcgtgctgctggacaattactacacacagccgctatgcaccccttcaaggtctcaattgctcaccggacgctatcaaatccggaccggactccagcatcagatcatatggccatgtcagccgagctgcgttcctttggatgagaagctcttaccccagctgctcaaggaagccggatacacgacacacatggtcgggaaatggcaccttggcatgtaccggaaagaatgccttcctactaggaggggattcgatacatatttcggatatctgttaggatccgaagattattatagtcatgaacgctgcactctgatcgatgctctgaatgtgacccggtgcgctcttgatttccgagacggtgaggaggtagccaccggttataagaacatgtactccactaacatatttactaaacgcgccatcgcactcataacaaaccacccccccgaaaagcctctttttctgtacctggcattgcagtctgtgcacgaacccctgcaggtacctgaggaatatctgaaaccttatgacttcattcaggacaagaatagacaccactacgctggaatggtgagtttgatggatgaggccgtgggtaatgtgacagcagccttgaagtcgagtggtctctggaacaacaccgtgtttatattctccaccgacaatgggggtcagactttggcaggggggaacaactggccactgagagggcgaaaatggagcttgtgggaagggggcgtccgaggcgttggatttgtggcgtccccactcctaaagcagaaaggggtgaagaatcgcgagctgatccacatctccgactggttgcccactctggtgaagctagcgagaggtcacactaatggcacgaagccactggatggctttgacgtatggaagacaatcagcgagggctctcccagccctcggattgagctgctgcacaacatcgaccccaatttcgtagattcaagtccatgtccccgcaattctatggcccctgcaaaggatgattcctcactgcccgaatactccgcgttcaataccagtgtccacgccgccattcgacacggcaactggaagctcctgactggctacccaggatgcggctactggtttccaccccctagccagtacaacgtgtcagagattccttcgtcagatccccctacaaaaacactctggctattcgatatcgacagagatccagaagaaagacacgatctctctagagagtatccccacatcgttacaaaactgctatcaaggttgcagttctaccataagcattcggtccctgtgtatttcccagctcaggaccctaggtgtgacccaaaggccacaggagtgtggggcccgtggatg

SEQ ID NO: 522 - DNA, 1599 bp, Artificial Sequence
  derived and/or modified sequence
atgggtccccggggagctgcatctttgccgcgaggcccaggacccagacggttgctcctcccagtcgtcctgccactcttgctgctcctgttgcttgcaccccccggatctggagctggggcctctcgcccacctcatctggtctttttgctggccgatgatctcggctggaacgatgtgggcttccacggctcccgtatcaggaccccccatctggatgcgctcgccgccggtggagtcttgctggataattactatactcaaccgctttgcacgccatctaggagtcaattactaactggacggtaccaaatccgtactggcctgcaacatcagatcatttggccctgtcagccttcgtgcgtgccactggacgagaagctgctcccacagctcctgaaggaagccggatatacgacacatatggtcgggaagtggcatcttgggatgtacaggaaagaatgtctccctaccagacgggggttcgacacctacttcggatatctattgggtagtgaggactactacagtcatgaaaggtgcactctgatcgacgccctgaatgtgacacggtgcgcactcgacttcagagacggagaagaggtcgctacaggctacaaaaatatgtactccaccaatatttttaccaagcgggccatcgcactgattactaaccacccgcccgagaaacctctctttctgtacctggccctgcaaagtgtgcatgaaccactacaagtgccggaagagtatctaaaaccctatgactttatacaggataagaaccgacaccactatgcaggcatggtctcgttaatggacgaagcagtgggcaacgttactgcggctctgaaaagctccggtctatggaataatactgtcttcattttctctactgataatggagggcagacacttgcaggcggaaacaattggcccctgagggggagaaagtggtccttgtgggagggcggcgttaggggagtggggttcgtcgcatccccactcctcaaacaaaaaggagttaaaaaccgggagctgatccatatttcggactggctccctaccctggtgaagttagctcgcggacacaccaacggcacgaagccgctggatggattcgatgtctggaagactatcagcgagggctccccttcaccccgcatcgagctcctccacaacatcgatccaaacttcgttgatagctccccatgtccaaggaactcaatggctccagcaaaagacgatagctcccttcccgagtactccgcctttaacacatccgttcacgctgcaattagacatggaaactggaagcttctgaccggctaccctggctgtggctactggtttccgccaccgagccagtacaatgtgtccgagatcccatcttctgatccccctaccaagacgctctggctgttcgatatcgatagggatccggaagagaggcacgacttatctagggagtatccccacattgtcacaaaactgctgtcccgtcttcagttttaccacaaacatagtgtccccgtatattttcccgctcaagaccctcgttgtgatccaaaagctaccggggtgtggggcccatggatg

SEQ ID NO: 523 - DNA, 1599 bp, Artificial Sequence
  derived and/or modified sequence
atgggaccccgcggagccgcgagcctgccgcgcggacccggaccaagacgtctgctgctcccggtcgtgctccccctcctgctgttgctcctgctggcaccgccgggtagcggagccggagcctcccgcccgccccatttggtgttcctgctggctgatgatctgggatggaacgacgtgggtttccatggatcgaggatcagaaccccgcacctggacgccctcgcagccgggggagtgctgttggataactattacacccaaccgctctgcaccccttcccgctcccagctccttaccggacgctatcagatccggaccggtctgcagcaccagatcatttggccgtgccagccgagctgcgtgccgctcgacgagaagctgctgcctcaattgctgaaggaagccggctatacgacccacatggtgggcaagtggcacctcggcatgtacaggaaggaatgtctccccacccgtcgagggttcgatacctacttcggatacctcctcggttcggaggactactattcacacgaacggtgtaccctgattgatgcacttaatgtcacccggtgcgcgctggatttccgcgatggggaagaggtggccacggggtacaaaaacatgtactccaccaacatctttaccaagcgcgctatcgctctgattactaaccacccacctgagaagcccttgttcctgtacctcgcactccaaagcgtgcacgagccgctgcaggtgccagaagagtaccttaagccgtacgactttatccaggacaagaatcgccatcactacgcgggcatggtatctctcatggacgaagctgtgggcaacgtgactgccgctttgaagtcaagcgggctctggaacaatacggtgttcatattctcgactgacaacggcggacagactttggctggagggaacaattggccgctccgcggacggaagtggtcgctgtgggaaggcggagtgcgaggcgtcgggttcgttgcctcgcctcttctgaaacagaaaggcgtgaagaatagagaattgatccacatctccgactggttgcctacgctcgtgaagctggctcggggtcacactaacgggactaagcctctggatggatttgacgtctggaaaactatcagcgagggatctccgtcgcctcgaatagaactgctgcacaatatcgacccgaacttcgtcgatagcagtccgtgccctcgcaactcgatggcgcccgctaaagacgactcgtccctgccagaatacagcgctttcaatactagcgtccatgcggcgatcagacatggaaattggaagctcctgactggataccctggatgcggttactggttcccgccgccatcacagtacaacgtctcagagatcccatcgagcgacccaccgaccaagacgctctggctgtttgacatcgatcgcgatcctgaagagaggcacgacctcagccgggaatatccacacatcgtcactaaactgctgtcacggctccagttctaccacaagcactcagtcccagtctactttcccgctcaagatccaagatgtgatccaaaagctactggtgtttggggaccgtggatg

SEQ ID NO: 524 - DNA, 1599 bp, Artificial Sequence
  derived and/or modified sequence
atgggcccgagaggtgccgcatccctgcctcgtggacctggccctaggcgactccttttgcccgttgtgcttcccctgttgctactgctccttctagcgcctcctggaagcggtgcgggagcaagtcgtcccccccatttagtgttcctccttgccgatgatttaggctggaacgatgtgggatttcacggttctaggatacgcaccccccacctggatgccctggcagccggcggcgtccttctggacaactactatacccagccactgtgtacaccaagcagaagccagctcctgaccggcagatatcagattcgcacgggactgcagcatcagattatctggccctgtcaaccctcatgcgtgccactggatgagaaacttcttccacagctgttgaaggaagcaggctataccacacatatggttggcaagtggcacctgggtatgtaccgcaaggagtgtctcccgacaaggagaggcttcgatacttactttgggtacttactcgggtcagaggattattacagccacgagcgctgcaccttgattgacgccctcaatgtcacacgatgcgcgcttgatttccgagatggcgaagaggtcgctactgggtacaagaatatgtattcaacgaatatatttactaaacgtgccatcgcgctaatcaccaaccatcctcccgagaaacctctattcctatacctagccctccagtcagtgcatgaacctcttcaggttcccgaagagtatttgaagccctacgacttcatccaggacaaaaataggcatcactacgctggcatggtgagcctgatggatgaggcagtaggtaacgtgaccgccgcgctgaaatctagcgggctgtggaacaataccgtatttatattctctaccgacaatgggggacagacattggctggcggcaacaactggccacttagagggcggaaatggtccttgtgggaaggaggagtgaggggagtgggcttcgtcgcctcaccactcctgaagcagaaaggggttaagaacagggaactgattcacatctctgattggctcccgacccttgtgaagctggcacggggtcacactaacggcaccaaacctctggatgggttcgacgtttggaaaacgataagtgaagggtccccaagccccagaattgagttgctccacaacattgaccctaacttcgtggactcgtctccgtgcccccggaattccatggcgccagccaaagatgacagcagcctgccggagtatagcgcctttaacacatcggtgcacgcagccatcaggcacggcaattggaagctcctgacaggttatcccggctgcggatactggtttccgccgcccagccagtataatgtaagcgagattccttcctccgatccgcctactaaaactctgtggttgtttgacattgatcgcgacccagaggaaaggcatgacttatcccgagaataccctcacatagtgacgaagctcctgtcacgcctgcaattctaccacaaacactctgtgcctgtgtactttcccgctcaagaccctcgttgcgatccaaaggcgactggggtatggggaccatggatg

SEQ ID NO: 525 - DNA, 1599 bp, Artificial Sequence
  derived and/or modified sequence
atgggaccacgcggggcggcgagcctgcccaggggccctgggcccagacgtcttctcttgcccgtagtcctgccactactgttattattgctcctagcaccgcccggctccggcgccggcgctagccgaccacctcatctagttttcctgcttgccgatgacctgggatggaatgacgtcggcttccatggatctcgtatccgtacacctcaccttgatgcattggcagcaggcggggttctgctcgataattactatactcaacctctgtgcacgccttctcggagccagctgttgacaggccgataccaaatccgcactgggctgcagcaccagattatttggccatgccagccaagctgcgtccccctggacgaaaaactgctgcctcagttgcttaaagaggccggatatacgacccatatggtggggaaatggcacctgggtatgtatcggaaggaatgccttcccactaggcgcggattcgatacatactttggttacctgttgggttcggaggactactactctcacgaacgatgtacattgatcgatgctctgaacgtgacccggtgtgctctcgactttcgcgacggtgaggaggtagcaacaggatataagaatatgtacagcacaaatatctttacaaaacgagcaatagctcttatcactaaccaccctccggagaagccactgttcttataccttgccttgcagagcgtgcatgagcctctgcaagtgcccgaggagtacctgaaaccgtacgactttatacaagacaagaacagacaccactatgccgggatggtgagcttaatggacgaggcggtgggcaatgtgactgcagctctcaagtcctcaggcctatggaacaataccgtgttcatattcagtactgacaacgggggccagaccctcgcgggtgggaacaattggcccttacggggaagaaagtggagcttgtgggaggggggagtacgcggtgtgggctttgttgcttctccgctactcaaacaaaagggcgttaagaaccgggagctcatccatatctcggactggttaccgactttggtgaaactagccagaggccacactaatggtaccaaaccactggatggatttgatgtgtggaagacaatctcagaggggtcacctagcccccgaatcgagctgttgcacaacattgaccctaattttgttgattcaagtccctgtcctcggaacagcatggcccccgctaaggacgatagctcacttccagagtatagcgctttcaatacatccgtacatgcagccattcgccacgggaactggaagctgctgaccggatatcctggttgtggatattggttcccaccaccttcccagtataacgtatctgagattccttctagtgatcctccaacaaaaacactatggctgtttgacatcgacagagaccccgaagagcgccacgacttgtctcgagagtacccacacattgtaaccaaactgctgagccgactacaattttatcataaacatagcgtgcccgtgtatttccccgcacaggacccgcgatgtgaccctaaagcaactggcgtgtggggaccttggatg

SEQ ID NO: 526 - DNA, 1599 bp, Artificial Sequence
  derived and/or modified sequence
atgggccctaggggtgccgcgtcactcccccgcggccccggcccccgccggctcctcctgcccgtggtgctgccgctcttgctactgttgctgctggccccccccgggagcggggccggagccagtaggccccctcatctcgtgtttctgttggcagacgatctcggatggaacgatgtcggcttccacggttcccggatccgaacacctcacctggacgcattagccgccgggggggtgctgctcgataactattacacccagccactgtgtacaccgtcaaggtcgcagttactgaccgggagataccagattcggacaggcctgcagcaccagatcatctggccgtgtcagccctcatgcgtccctttagatgaaaagttgctaccgcagctgttaaaggaggccggttacactacacacatggtgggaaaatggcatttggggatgtatagaaaggaatgcttgccaacacggcggggctttgatacttatttcgggtatcttctcggtagtgaagattactactcacatgagagatgtactctcatagacgccctgaatgttactcgatgcgccttggactttagggatggagaggaggtggccaccggctataaaaatatgtattctaccaacatcttcaccaagagggccatcgctctcattacaaaccaccccccggagaagcccctgttcctgtaccttgccctccaatctgttcatgagccactgcaggttcctgaagaatatctgaagccatatgactttatccaggacaagaatcgccatcactacgcaggcatggtctccctaatggacgaggctgtgggtaatgtgacggctgccctgaagtccagcggcctctggaacaacactgtattcatcttctcgaccgataacggcggacaaactttggccggtggcaacaattggcctctgcgcgggcggaaatggtcattgtgggagggcggtgtacgaggggtgggtttcgtggcatcgcccctgctgaaacagaagggagtgaaaaacagagaactgattcacatctctgattggcttcccaccttggtgaagttagcaaggggccacaccaacggcactaaacccttggatgggtttgatgtttggaagacaatcagcgagggcagcccttctcctcggatcgaactgctgcacaatatagacccaaactttgttgacagtagcccatgcccgaggaacagcatggcccccgccaaggacgacagcagcctgccagagtatagcgccttcaatacgtccgtccatgccgcgatcagacatggtaattggaaactcttgaccggatatcccggctgcggatattggttcccccctccatcacaatataacgtaagcgaaattccaagcagcgacccgccaacgaagaccctttggttgttcgatatcgaccgggacccggaagagagacacgacctgtcgagggaatacccacacatcgtcacaaagttactctcgcgattgcagttttatcataaacattccgtcccagtctactttcccgcccaggacccaagatgcgaccccaaggctacgggggtgtggggcccttggatg

SEQ ID NO: 527 - DNA, 1599 bp, Artificial Sequence
  derived and/or modified sequence
atgggcccccggggggcggccagcctgccgcggggaccgggccctcgccgcctgctgctgccggtggtgctcccgcttctcctgttgcttttgcttgccccaccgggaagtggcgctggagcctcgcgccctccgcatctggtgttccttctggccgacgacctcggctggaatgatgtggggtttcacggaagccgtatccggactccgcatcttgacgcgctcgccgccggcggtgtcctcctggacaactactacacccagccactgtgcaccccttccagatcccagctgctcactggacggtaccaaatcagaaccggactgcagcaccagattatctggccatgtcaaccgtcctgcgtcccactggatgagaaactcctcccgcagctgttgaaagaggccggttacacgacccatatggtgggtaagtggcacctgggtatgtaccggaaggaatgcctgccgactagacgcggatttgacacctacttcggatatctcctcggctcagaggactactactcccacgagcgctgtaccctgatcgatgcactgaatgtgactcggtgtgcgctggattttagagacggagaagaagtggccaccggatacaagaacatgtactcgacgaatatctttacgaagcgggcaatcgcgctcattactaatcacccgccggaaaagccactgttcctgtacctggccctccagagcgtgcacgaaccgctccaggtgcccgaggagtacctgaaaccgtacgacttcatacaggacaagaatcggcaccattacgcgggcatggtgtcactcatggatgaggcggtcggcaacgtgactgcggcgctgaagagctcgggactgtggaacaacactgttttcatcttctcgaccgacaacgggggacagactctggcaggcgggaacaattggccgctgagaggccggaagtggtccctgtgggaaggaggagtgcggggagtcggattcgtggcttccccacttctgaagcaaaagggggtcaagaatcgcgagttgatccacatttccgattggctgcctaccctggtgaagctggcacggggccacaccaacggaactaaaccgcttgacggatttgacgtgtggaaaacgatctcagagggctcccctagcccgaggatcgagctgctgcacaatatcgatcccaacttcgtggattcatctccgtgcccgcggaacagcatggcaccggcgaaggacgattcctcacttccagagtactccgcgtttaacaccagcgtgcatgcggcaatcaggcacggaaattggaagttgctcactggatacccaggctgtggctactggtttccaccaccatcgcaatacaatgtgtcagaaatcccaagctcagacccgccaaccaagaccctctggctgtttgacattgatcgagatccggaagagcggcacgacttgagccgggaatacccgcacatcgtcactaaacttctgtctcgcctccagttctaccacaagcactcggtgcctgtttacttcccagcccaggatccacgatgtgatcccaaagccacgggggtgtggggaccatggatg

SEQ ID NO: 528 - DNA, 1599 bp, Artificial Sequence
  derived and/or modified sequence
atgggaccgcgaggagccgcctcgctcccacgcggaccgggaccccgcagactcctgctgcccgtggtgctccctctcctgttgctgttgcttctggctccaccgggaagcggtgccggagcctcacggcctccgcaccttgtctttctgctggctgacgacctgggatggaacgatgtgggcttccacggatcgcgcatccggacccctcatctcgacgcgctggctgcaggaggtgtgctgctcgacaactactacactcagcctctgtgcactccatcgcgatcccaattgctcactggaagataccaaatcagaaccggcctccagcatcaaatcatttggccttgccagccgtcgtgcgtcccactcgatgagaagctgcttccacagctgctgaaggaagcaggatacaccacccacatggtgggaaagtggcatctcggtatgtacaggaaggaatgcctgcctactcgtcgcgggtttgatacttacttcggctacctgctgggctcggaggactattactcgcatgagaggtgcacgctgatcgatgccctgaacgtgactagatgcgcgctggatttcagggacggagaagaggtcgccaccggatacaagaatatgtattcaaccaacatcttcactaagagggcaatcgcgctgattaccaaccacccaccagagaagcctttgtttctctaccttgcactgcaatcagtgcatgaaccgctgcaggtgccggaagaatacctgaaaccgtacgatttcatccaggacaagaatcgccatcattacgcgggaatggtgagcctgatggacgaggcagtgggaaatgtgactgcggcactcaagtccagtggactgtggaataacactgttttcatcttctcaaccgacaacggggggcagaccctggcgggaggcaacaactggccgttgagaggacggaagtggtcgctctgggaaggaggagtccgcggtgtgggatttgtggcgtcgccactgcttaagcaaaagggcgtgaagaaccgcgagctgatccatatttccgactggctgcccaccttggtgaagctcgcgagggggcataccaatggaactaagccgctcgacggattcgatgtctggaaaaccatttccgaaggctccccgtcgccacggatcgaactgctccataacatcgacccgaatttcgtggactcgtccccctgccctcggaacagcatggcaccggccaaagatgactccagcctcccagagtactccgccttcaacacgtccgtgcatgccgcgatcagacatggcaattggaaactgttgactggctacccaggctgcggttactggttcccgcctccgtcccagtacaatgtgagcgaaatcccttccagcgatccgcctactaagactctttggttgttcgacatcgaccgagatccagaggaacggcatgacctctcacgcgagtacccccacattgtcaccaagttgctgagccgcctgcagttctatcacaaacacagcgtgcctgtgtatttcccagctcaggatccaagatgcgatcctaaggccacgggcgtttgggggccttggatg

SEQ ID NO: 529 - DNA, 1599 bp, Artificial Sequence
  derived and/or modified sequence
atgggacctcgaggtgcagcaagcttacctagggggcctggtcccagaagactgttgctaccggtggtactcccattgctgctcctgcttcttttggcccctccagggtcgggcgccggagcaagcagacctcctcacctcgtgtttctgttggcagacgacctcggctggaatgacgtgggtttccatggctctcgtatccgaactccacacttggatgccctggcagcagggggggtcctgctggataactattatactcagccactgtgtaccccatcccgatcccagctgcttacagggagatatcagatccgcactgggctgcaacatcagataatttggccatgccagccctcttgtgtgcccctcgatgaaaagctcctcccccagctgctgaaggaggcaggctacacaactcacatggtgggtaaatggcatctcgggatgtacaggaaggagtgcttgcccactcgtagagggttcgacacttactttgggtatctgcttggcagcgaagattattactctcatgagaggtgtaccctaatcgatgccttgaatgtcaccagatgtgcccttgacttcagagatggggaagaggtcgctactggatataagaacatgtactccacgaacattttcactaaacgggccatagcgctgattacaaaccaccctcctgaaaagcccctctttctatatctagccctgcagtccgtgcatgaaccactgcaagttccagaggagtacctgaagccctacgattttatacaggacaaaaacaggcatcactacgcgggcatggtttctctgatggacgaggcagtagggaacgttactgctgcccttaaaagctcgggcctctggaataacactgtgttcatttttagtacagacaacggaggccagactcttgcaggtggaaataattggcccctaaggggcaggaagtggagcctctgggagggtggtgttcgcggtgtgggattcgtcgcttcaccactactcaaacaaaagggagtgaaaaacagagagctgatccacatatcggattggcttcctacacttgtaaagctcgcccggggacacaccaacggtacaaaaccgctagacggcttcgatgtctggaaaacaatcagtgaagggtctcccagccctagaatagaactcctccataatattgaccctaacttcgtcgactcaagcccctgtcccagaaatagcatggctcctgcaaaggatgactctagtctgccggaatatagtgctttcaatacatccgtccacgcggcgatcagacacggcaactggaaattgctgacaggctatccaggctgcggctattggtttcctcccccttcacaatacaatgtgagtgagattccttcctcggaccctcctaccaaaacactatggctgttcgacatcgaccgagatccagaagaaaggcacgacctgtctcgggaatacccacacattgtaaccaagctactgtcccgtctgcagttttaccacaagcattcagtgccggtgtactttcctgcgcaggatcccaggtgcgatcctaaggccaccggcgtatggggtccatggatg

SEQ ID NO: 530 - DNA, 1599 bp, Artificial Sequence
  derived and/or modified sequence
atgggcccacggggcgcagcctctcttcctcggggaccggggccaagaagactgctccttcctgtagtgcttccattgttgcttttgctcttgctggccccaccagggtcaggcgcaggagctagccgccccccacatctggtgttccttctcgcggacgacctgggctggaatgacgtgggattccacggctcacgcatccgcactcctcacctggatgccctggccgcaggcggggtgctgctggataactattatacacaaccactgtgcacaccttcccgcagccaacttctcaccggccggtaccagattcgaacggggttgcagcaccaaatcatttggccatgtcagccttcctgtgtgcccctggacgaaaaactgctcccccaactcctcaaggaggctggatacacaacacatatggtgggaaaatggcatctgggaatgtatcgaaaggaatgtctgcctacccggagaggcttcgatacctactttggttaccttctgggcagcgaagactattatagccatgagcggtgcaccctgatcgacgccctgaacgtcactcgatgtgcactggactttcgcgacggagaggaggtcgctacaggatacaagaacatgtacagcacgaacatcttcacaaaacgcgcgatagcgcttataaccaatcaccccccagagaaaccgctgtttctctacctcgccctgcaaagtgtgcatgagccattgcaggtcccagaggagtatctgaagccatacgactttatccaggacaagaatagacaccattacgcgggcatggtgagcctgatggatgaagccgtcggaaacgttacggccgctcttaagtctagtggtttgtggaataatacagtgtttatcttttctactgacaacggtggccagaccttggctggcggtaacaattggcccctgcgcgggcggaagtggtccctgtgggaaggaggggtccggggtgtcggttttgtggctagcccacttctgaagcagaaaggagttaaaaacagggagcttatccacatctcagattggttgccaaccttggtcaaactggctcgggggcacactaatggcactaagccactggacggctttgatgtatggaagaccataagcgaaggttctcctagcccccgaatcgagcttctgcataatattgatcctaattttgtggacagttcaccctgcccgcgaaactcaatggctcccgccaaagacgactcaagtcttcccgagtattcagcgttcaatacaagcgtacacgccgctatccggcacggcaactggaagcttctcactggctatccgggctgtgggtactggtttccaccaccaagtcagtataacgtttctgagataccatccagcgatccccctacgaaaaccctgtggctgttcgacatcgaccgcgatcctgaggagagacacgacctgagtcgagagtacccccatatcgttacaaagcttctgtctcgccttcagttttatcacaaacacagtgtgcccgtgtattttcctgctcaagaccctcggtgtgatcccaaagcaaccggagtatggggaccctggatg

SEQ ID NO: 531 - DNA, 1599 bp, Artificial Sequence
  derived and/or modified sequence
atgggacctcgcggcgcagcatcgctccctcggggacctggcccacgtcggctccttttgcctgtcgtgcttcctctgcttcttctgctgctgcttgcaccgcccggaagcggcgcgggtgcctcaagaccacctcaccttgtgtttctccttgcagatgatctcggatggaatgacgtcggatttcatggatcccgcattagaaccccacatcttgatgccctggcggccggcggtgtgcttctggacaactactacactcaaccactctgcaccccctcccgctcccagctccttacgggtcggtaccaaattcggactggtctgcaacaccaaatcatatggccatgtcagccttcctgtgtccctcttgatgagaagttgcttccccagcttctcaaagaagcaggttacactacccatatggtgggtaagtggcatctgggaatgtaccgtaaggaatgccttccgactaggcgcggatttgacacctattttggttaccttctcggatcggaagattactactcgcatgaacgctgcaccctcattgatgcacttaatgtcaccaggtgtgccctcgacttcagagatggggaggaggtggcaactgggtacaagaacatgtactcgaccaacattttcaccaagagggccattgcactgattactaatcatcctccggaaaagcccttgttcctgtacctcgcactccaaagtgtgcatgaacctctccaagtgcctgaggaatacctcaagccatacgatttcatacaagacaagaacaggcatcactacgcaggaatggtatcccttatggacgaagctgtcgggaatgttacggcggcacttaagtccagcggcctgtggaataacaccgtctttatcttttcgaccgacaatggtggtcagaccctggcaggcggaaataactggcctcttcgcgggagaaaatggtcgctctgggaggggggagtgcggggcgtgggattcgtagcttcaccactcttgaaacaaaagggggttaagaaccgtgaacttatccacatctcggattggcttccgaccctcgtcaagctcgcacggggtcatactaacggcaccaaacctctcgatggttttgatgtctggaaaactatcagcgaaggatcaccttcaccaagaattgaacttctgcataacattgatcccaactttgtggatagctcgccctgtcctcgtaactcgatggcacccgccaaagacgattcgagtctgcccgaatattcagcatttaacactagcgtccatgccgctattaggcacgggaattggaaactgttgactggataccctggatgtggatactggttccctccaccatctcaatacaatgtgtcagaaattccatcctctgaccctccaaccaagactctgtggctcttcgatattgaccgggaccctgaagagcggcacgacctgtcccgcgaatatcctcacatcgtgactaaacttcttagccgactccagttctaccataagcactctgttcccgtgtactttcccgcgcaggatccgagatgcgatcccaaggcaactggtgtgtggggaccgtggatg

SEQ ID NO: 532 - DNA, 1599 bp, Artificial Sequence
  derived and/or modified sequence
atgggtccgcgaggagcggcctcacttcctcggggacccggcccacggcgattgctgttgccggtggtgcttccgctcctcctgttgttgctcctcgccccgccaggatcaggagctggggctagtagaccgccgcacctcgtgttcttgctggctgatgatttgggatggaacgacgtcggcttccatggctcgcggatccgcactccgcatctggacgcgctcgccgcgggaggagtcttgctggataactactacacccagccgctgtgcacgccgagcagatcacagctccttaccggtcgttaccaaatcagaactggactccagcaccagatcatttggccatgtcaaccgagctgcgtgccactggacgaaaagctccttccacagctcctgaaggaagctgggtacaccacccacatggtgggtaagtggcatctgggcatgtaccgcaaggaatgccttccgaccaggagaggcttcgacacttacttcggctacctgctcggaagcgaggattactactcccatgaacggtgcactctgatcgacgcgctgaacgtgacccggtgcgcattggatttccgggatggcgaggaagtggcaaccggatacaagaacatgtactcgaccaacattttcacgaagcgcgcaatcgccctgatcaccaaccacccgcctgaaaagcctttgttcctctacttggctctccagagcgtgcacgagccgctccaggtgccggaagagtacctcaagccgtacgatttcatccaagataagaatcgccatcactacgcggggatggtgtcactgatggacgaagccgtgggaaatgtgacggcagccctgaaatccagcggactgtggaacaacaccgtgttcatcttctcgaccgacaatgggggccagaccctcgctggaggcaacaattggcccctgcgcggacggaaatggtcgctctgggaaggaggagtgagaggagtgggcttcgtggcctcaccactgctcaagcagaaaggagtgaagaaccgggaactgatccacatctcggactggctgcctaccctggtcaagctggctagaggacacaccaacggaactaagcccctggatgggttcgacgtctggaaaactatctccgaaggctcgccatcgcctcgtattgagctgctgcataacatcgacccgaatttcgtcgattccagcccttgcccaagaaactcaatggcaccggccaaagatgattcgagcctgccggaatactcggccttcaatacgtcagttcacgccgcgatcagacatggcaattggaagctgcttaccggctatcctggttgcggatactggttcccgcctccgtcccaatacaatgtctcggagatcccttccagcgacccgccaacgaaaaccctgtggctgttcgacattgatcgggacccagaagaacgccacgacctctcacgagaatacccacatatcgtgaccaagctcctgagccgcctgcagttctaccacaagcactcagtcccagtgtactttcccgcgcaagacccccgctgcgacccaaaggctaccggggtgtggggtccatggatg

SEQ ID NO: 533 - DNA, 1599 bp, Artificial Sequence
  derived and/or modified sequence
atgggacctcgcggcgctgcgtcgctccccagaggacctggacctcgaaggcttttgctgcccgttgttctgcctctcctgctgctgttgctgctggcgccaccgggatctggggctggggcctccagaccaccccatctcgtgtttctgctggcagatgacctggggtggaatgatgtgggattccacggctcgcggatcaggacccctcaccttgacgcgctcgctgctggtggcgtactgctggataattactacacacagcctttgtgtaccccctccaggtcccagctgttgacaggaaggtaccaaattcgcacagggttgcagcatcagatcatttggccctgccagccctcttgcgtgcccctggatgaaaagctcctcccgcagctacttaaagaggcaggttacactacacacatggtaggcaaatggcatctgggaatgtatagaaaggagtgtttacccaccagaagggggttcgacacctatttcggctatttactgggctcggaggactactactctcacgagagatgcacactgattgatgcattaaacgtcactcgctgcgccctcgattttcgggacggggaagaggttgctaccggatataaaaacatgtatagtaccaacatcttcacgaaacgcgccattgcacttatcacaaatcatcctcccgagaaacctttattcctttacctggctctgcagagtgtgcatgaacccttgcaggtccctgaggaatacttgaagccctacgacttcattcaagataaaaatagacatcactatgccggaatggtttctttaatggacgaggctgtcgggaacgtgacagctgctctgaagagctctgggctctggaataacaccgtttttatcttcagtacagacaacggaggtcaaacactggctggtgggaataactggcccctgcgaggcagaaaatggtcactgtgggaaggtggcgtgaggggagtggggttcgtagcctcgcctctactgaaacagaagggcgtgaaaaatcgcgagcttatccatattagcgactggctcccgacattagtaaaactggcgagaggacataccaacggcaccaagcctctggacgggttcgacgtgtggaagacaatctccgaagggtccccaagtcctagaatcgaactgttgcataacatagaccccaatttcgtggactcttcaccatgcccacgaaattccatggctcccgctaaagatgactccagtctacctgaatactctgcatttaatacatcagtgcatgctgcgatccggcacgggaattggaagctgctgactggctatcccggatgcggctactggttcccgcctccatcgcaatacaatgtgagcgagatacccagttccgatccgccaacgaagactctttggcttttcgatattgacagagatcctgaagagagacatgacctgagcagagagtatccgcatatcgtgacaaagttgttgagtcgactacagttctatcacaaacactccgtcccagtctatttccctgcacaggacccaaggtgcgacccaaaggcgactggggtttgggggccttggatg

SEQ ID NO: 534 - DNA, 1599 bp, Artificial Sequence
  derived and/or modified sequence
atgggaccgcgcggagcggcgagcctgccgagaggacctggccctcgcaggctgctgcttcctgtggtgctgccgttgctgctgctcctcctgctggcccctccaggatccggagccggtgcctcgcggcccccacacctggttttcctgctcgccgacgacctggggtggaatgatgtcggattccacggttctcggatccggaccccccatctggacgccctcgcggccggcggagtgctgctggacaattactacactcaaccgctctgcactccgtcccgcagccagctgctgaccggtcgctaccaaatccgaaccggcctccagcatcagatcatatggccttgccagccatcgtgcgtcccactggacgagaagttgttgccacagttgctcaaagaggcgggatacaccacccacatggtcggaaagtggcatctggggatgtacaggaaggagtgtctgccgacccggaggggtttcgacacttacttcgggtatctcctgggatccgaagattactactcacatgaacgctgcaccctgatcgacgccctgaatgtgactagatgcgcactcgatttcagagacggagaagaagtggctactggatacaagaacatgtactccaccaacattttcaccaaaagagctatcgcgctcattacgaatcaccctccagagaaacccctcttcctgtacctcgcgctgcaaagcgtccacgagccgctgcaggtgcctgaagagtacctgaaaccttacgatttcatccaggataagaacagacaccattacgcgggaatggtttcgttgatggacgaagctgttggcaatgtgaccgccgccctgaagagttcgggcctgtggaataacaccgtgttcatcttctcaaccgataatggcggacaaacgctggccggaggaaacaattggccactccggggccggaagtggagtctttgggagggaggggttcggggggtgggttttgtggcatcccccctgctgaagcagaagggtgttaagaacagagaattgattcatatctctgactggctgccgactcttgtgaagctcgctcggggacacaccaatggtactaaaccgctggacggcttcgatgtgtggaaaactatttcagaaggttcgccgtcaccgcggatcgagctgctccataacatcgacccaaacttcgtggactcatcaccgtgtcctagaaactccatggcccctgccaaggatgattcctcactgccagagtactcggcattcaacacctccgtgcacgctgccatccgtcacggtaactggaaactcctcactgggtaccccggatgcggctactggttcccgccaccgtcacaatacaacgtgtctgagatcccgagctcggatccacccactaagaccctttggctgttcgacatcgatcgggaccctgaagaaaggcacgatctgtcgcgggagtaccctcacatcgtgactaagctgctgtcccggctgcaattctaccacaagcattcagtgccagtgtactttccggctcaggacccgcgctgtgacccgaaggcgactggagtgtggggaccgtggatg

SEQ ID NO: 535 - DNA, 1599 bp, Artificial Sequence
  derived and/or modified sequence
atgggacctcggggggccgccagcctgccccggggcccgggaccccgtaggctgcttctgcccgtcgtcctgccactgctactgttattattgcttgctcctcctggctcgggagccggtgctagccgtccaccccatctggtgttcctcctcgccgacgatctcggttggaatgatgtcggtttccatggctctaggattaggacaccccatctggacgcacttgccgctggaggcgtgctgctggataattactacacccagcccttgtgtacccccagcagaagccagctactgaccggaaggtaccaaattcggaccggcctgcagcatcagattatctggccctgtcagcctagctgcgtaccactggatgaaaaactcctgcctcagctgctaaaggaagcaggctacactactcatatggttggcaagtggcacttggggatgtacaggaaagagtgtttgcctacccgccgtggttttgatacatactttgggtacctgctgggatcggaagactactactcccatgagcgatgcactttaatagacgccctcaacgtgaccaggtgtgcactcgacttccgcgatggtgaagaggtggcgactggatacaagaatatgtactccaccaacatatttaccaagcgtgctatcgccctgatcacgaatcacccacccgagaaacctttgtttctttatctggcactgcagagcgtccatgaacctctccaggtccctgaggaataccttaaaccctatgactttatacaggataaaaatagacaccattatgctggtatggtgtctctgatggatgaggctgtgggcaatgtgacagccgccctcaagtctagcggcctctggaataacactgtgttcatcttttcaacagataatgggggccagactctcgctgggggaaataattggccacttcgcggcaggaaatggagtctttgggaagggggggtgaggggcgtgggattcgtggctagtccgctcctcaaacagaaaggtgtcaagaaccgggaactaattcatatatctgactggctgcccacactggttaaactcgcccggggccatacaaatggcaccaagcctctggatggatttgatgtttggaagaccatctctgaggggtcgccatctccccgtattgaactgctgcacaatattgatcctaattttgtagactcatccccatgtccacggaattctatggcccctgccaaagacgattcttccttgccagaatatagcgcattcaatacaagcgtgcacgccgctatcaggcacgggaactggaagctgctaacagggtacccaggctgtggctattggttccctcctccctcgcagtacaacgttagtgagatcccctcttcagaccccccaacaaagaccctttggctgttcgacatcgaccgggaccctgaagaacgacacgacctcagtcgtgagtatccccacattgtgacgaaactgttgagtaggctacagttttaccataagcactcagtgcctgtatactttcccgcgcaggatcctaggtgcgacccaaaggccacaggggtgtggggcccttggatg

SEQ ID NO: 536 - DNA, 1599 bp, Artificial Sequence
  derived and/or modified sequence
atgggtcctcgcggcgcggcatccctgccacgcgggccagggcctagacgtctgctgctgccggtggtcttgccacttctgcttcttctgcttctggcaccaccggggtcaggcgctggcgcatctcggcctccacatctggtgttccttcttgcagatgatctgggatggaacgacgtgggctttcatggatcacggattcgaaccccacatctggacgcacttgccgccgggggtgtgctccttgataactattacactcaacccctttgtactcctagccggtcgcagctcctcaccggaaggtaccaaattagaaccggccttcaacatcagatcatttggccatgtcaaccttcgtgtgtgccccttgatgagaaacttttgccacaactcctgaaagaagccggatacaccactcacatggtcggtaagtggcatctgggtatgtaccgaaaagaatgcctgcctacccgccgaggctttgatacgtactttggttaccttcttggtagcgaggactactactcacatgagcgctgtaccttgattgatgccctgaatgttacgagatgtgcacttgattttcgagatggcgaggaagttgccactgggtacaagaatatgtactccactaacatctttactaagcgcgcaatcgcacttattacgaaccatccccctgagaagcctcttttcctgtacttggccctgcaatccgtgcatgagccactgcaggttccagaggaatacctgaagccttatgactttatccaagataagaatcgacaccattatgcagggatggtcagcctgatggatgaggccgtgggaaacgtcaccgcagcccttaaatcttccggcctttggaacaataccgttttcatcttttccactgataacggtggccagaccttggcaggaggaaacaattggccacttaggggacgcaaatggagcctgtgggaaggaggagtgcgaggtgtgggttttgtggcttcgcctcttctcaaacagaagggggttaagaatcgcgaactgattcatatttccgattggctgccaactctggtcaaactggcaagaggacatactaacgggactaagccactcgatggtttcgatgtgtggaaaacgatttccgaaggaagcccttcgcctagaattgaacttcttcacaacattgacccaaactttgtggattcaagcccctgccctcggaactcgatggcaccagctaaggacgattcgtccctgccggagtactcagcttttaacacttccgtccacgcggcaatccgccatggtaattggaaacttctcactggttaccctggttgtgggtactggtttccccctccatcccagtacaacgtgagcgaaatcccgagctccgatcctccgactaagacgctttggctgtttgacattgaccgtgatcccgaggagaggcatgacctgagccgtgaataccctcatatcgtgactaagctcctctcgagactccagttttaccataagcattcggtgcctgtgtatttccccgcacaagacccgaggtgtgacccaaaggcaactggagtgtggggaccttggatg

SEQ ID NO: 537 - DNA, 1599 bp, Artificial Sequence
  derived and/or modified sequence
atgggtccgcggggtgcagcatctctcccacgggggccaggcccgcggcggttgctgcttcccgtcgtgctaccattgttactgttgctgctgctggctccacccggctcgggggcgggggcatccagacctccccaccttgtttttctgctggccgacgacctcgggtggaatgatgtggggttccacggaagcaggatacgcactccccacctggatgcacttgccgcagggggcgtgttgctggacaactattacacacaacctctgtgtacaccttctaggtctcaacttcttactggccgctaccagattaggacaggcctgcagcaccagatcatttggccgtgtcaaccctcctgcgtgcccctcgacgagaagttgctgcctcagctgctaaaggaggccgggtatacgactcacatggtaggcaagtggcacctaggcatgtacaggaaggagtgtttgcctacccgcagggggttcgacacttacttcggatacctattagggtctgaggactactatagtcatgaaaggtgcacgctcatagacgctctgaatgtgacgagatgtgcccttgatttccgcgacggtgaggaggtggctaccggctacaagaacatgtattctactaacatctttacgaagagggccattgccctgattacgaaccatccccctgagaagccactgttcctgtatctcgccctgcagtcggtccatgaaccactccaagtcccggaggaatacctaaaaccatacgatttcattcaagacaaaaataggcaccactatgccgggatggtgtcattgatggacgaagctgtcggtaatgttaccgccgctctgaagtctagcggcctgtggaataataccgtattcatcttttctacggacaacggcgggcagactttagctggaggcaacaattggccattgcgtggtcgcaagtggtccttatgggaaggaggtgttaggggggtggggttcgtggcctcacccctcctcaaacagaaaggcgtgaagaatcgtgagctaattcacatctcagactggcttccgactctggtgaagctcgctcgtgggcacactaatggcactaagcccctggatggcttcgacgtttggaagaccatcagcgaaggatcccctagtccccgcatcgagctactccataatattgaccccaactttgtggacagtagcccttgtccgcggaactccatggcccccgctaaagacgacagcagtctgccagagtactcagcgttcaacacttcggtgcacgcagccatccgccacggcaattggaagttactcaccggctatcctggctgcggttattggttccctccgccaagccagtacaacgtgagcgagattccaagtagtgatcctccgacgaagacgttgtggctgttcgatattgatagggaccccgaggagagacacgatctgagtagggagtatccacatatcgttaccaagctgctgtcaaggctgcagttttatcacaaacactctgtccctgtgtacttcccagcacaagatccgcggtgcgatccgaaagccaccggcgtctggggcccgtggatg

SEQ ID NO: 538 - DNA, 1599 bp, Artificial Sequence
  derived and/or modified sequence
atgggcccgcgcggagcagcgagcctcccacgggggcctggacctcgcagacttctgctgccggttgtgcttccgctcctcctcctgctcctcctggcgccgcctggtagcggagccggagcctcgcgcccgccacacctcgtctttctgctggcggacgacctcggctggaatgacgtgggatttcatgggtccagaatccgcaccccacacctcgatgccctggctgcgggaggagtgctgctggacaactactatacccagccgctctgcactccttcgcgcagccagcttttgactggacggtaccagatcagaaccgggcttcagcaccaaatcatttggccttgccagccgagctgcgttccactcgatgaaaaactcttgcctcaactcctgaaggaggctggctacaccactcatatggtggggaaatggcatctcggaatgtaccgcaaagaatgcctcccgacccgccgaggtttcgacacttacttcggataccttttgggatccgaggactactactcccacgaacgctgcactctgattgatgctctcaatgtgacgcgctgtgcgctcgactttcgcgatggtgaggaggtggcaacgggatataagaacatgtactccaccaatatcttcaccaagcgggccatcgccctgatcacgaaccacccaccagaaaagccgctgttcctgtacctcgcactgcagtcggtgcacgagcccctgcaggtgcctgaggaatatctgaagccgtacgatttcattcaggataagaaccggcaccattatgcgggcatggtgtctctgatggacgaagccgtggggaacgtgactgccgcactgaaatcatcaggattgtggaacaataccgtgtttatcttcagcaccgacaacggaggccagactctcgctgggggaaataactggccgctgcggggcagaaagtggtccctgtgggagggcggagtgcgcggggtgggattcgtggcttcccctctgctcaagcagaagggcgtgaaaaacagggagctgatccatatctccgactggttgcccaccttggtgaaacttgcccggggacataccaacggaaccaagccgctggatggctttgacgtgtggaaaactatctccgaagggtcaccgtcaccgcggatcgaactgctgcacaatatcgacccaaacttcgtggactcatcgccatgcccacgcaattcaatggctcccgccaaggacgattcttcgctgccagagtactccgccttcaacacgtccgtgcacgccgcaatcagacatggaaattggaagctgcttaccgggtaccctgggtgcggatactggttcccaccgccgtcccagtacaacgtcagcgagatcccgagctccgatccaccgaccaagaccctgtggctgttcgacatcgacagggaccctgaggaaaggcatgacctgtcccgggaatacccccacattgtgactaagctgttgtcacggcttcagttctaccataagcattccgtcccggtctacttccccgcccaggacccccgttgcgatcctaaggccactggagtgtggggaccatggatg

SEQ ID NO: 539 - DNA, 1599 bp, Artificial Sequence
  derived and/or modified sequence
atggggcctcggggtgcagcatccctgcctcggggacccgggccaagacgcctcctgctccctgtggtgttgccgctcctcctccttcttctgcttgcaccaccaggttcaggtgcaggggcctcccgacctccccacttggtgttcctgctggcagacgatctgggctggaacgatgtgggatttcatggcagccgcattagaaccccccatctcgacgcactggcagcaggaggtgtgcttctggataactactacacccaacccctgtgtacccctagccggtcgcagcttctgactggacggtaccaaattcgcactggactgcagcaccagataatctggccatgtcaaccatcgtgtgtccctcttgacgaaaagttgctgcctcagctgctgaaagaagccggttacacgactcacatggtgggaaagtggcaccttggaatgtacagaaaggagtgccttcctactcgcagaggttttgacacctacttcggttaccttctcggatcggaggactactacagccatgaaaggtgcacccttatagatgcgctgaatgtgaccaggtgcgcactcgattttcgggatggggaagaagtggcaactggctacaagaacatgtactccacgaacatcttcaccaagcgagcgattgcccttattaccaatcatcccccggaaaaacccctttttctgtacctggctcttcagtccgtccacgagcctctccaggtgcctgaagaatacctgaagccctacgatttcattcaggacaaaaacagacatcattacgcaggaatggtgagcttgatggatgaagccgtcgggaacgtgaccgcagccctgaagagctcaggtctgtggaataacaccgtgttcatattctccaccgataacggcggacaaactctcgcaggtggaaataactggccacttcggggcagaaagtggtcgttgtgggagggcggcgtgcggggagtcggtttcgtggcctcgcctctccttaagcagaagggagttaagaaccgcgaactgattcatatctccgactggctgccaaccctggtcaagttggcccggggtcataccaatggtaccaagccactggacggtttcgatgtttggaaaacgatcagcgagggcagcccatcccctagaattgagctgctgcataacatcgacccaaactttgtcgactccagcccctgtccacggaattccatggctccagcaaaggatgactctagcctgcctgaatattcggcttttaacacttcagtgcacgctgccattcggcacggaaactggaagctgttgaccggatacccgggttgtggatattggtttccacctccctcgcaatacaacgtgtccgaaataccatcgtccgatccaccgaccaaaactctgtggctgtttgatatagaccgcgaccctgaggagaggcacgacctgtcccgagagtacccacacatcgtcaccaaacttctgtcacggcttcagttttaccacaaacattccgtcccggtctacttccccgcacaagatccacgctgtgaccccaaagccaccggagtctggggcccatggatg

SEQ ID NO: 540 - DNA, 1599 bp, Artificial Sequence
  derived and/or modified sequence
atgggaccacggggagccgccagcctgccacggggaccgggaccacgccgccttctgttgccagtggtcctccctcttctgcttctgctgcttcttgcacctcctggttcaggggcaggtgcgagcagaccacctcatctcgtctttctgctggcggacgacctgggttggaacgacgtcggatttcatggaagcaggataagaactcctcaccttgatgcgctcgcagcaggaggagtgcttttggataactactatactcagcccttgtgcactccgtcgaggtcccagcttctgaccggaagataccaaattcgcactggattgcagcatcagatcatatggccctgtcaaccttcgtgcgtgcccctcgatgagaagctcctcccgcagctgcttaaggaggcaggctacaccacccacatggtcggaaaatggcacttgggcatgtaccggaaggagtgtctgcccacccgccgaggttttgacacgtacttcggatacctgctgggtagcgaagattactactcccatgagcgttgcactcttatcgatgccctgaatgtgactcgatgtgcattggattttagggacggtgaggaagtcgctaccggttacaagaacatgtactcgacgaacattttcaccaagcgggcaattgctctgatcaccaatcatcctcctgaaaagccacttttcctttacctggccctgcagtccgtccatgaaccactgcaggtgcccgaagaatatctcaagccgtacgactttatccaggacaagaatcggcaccactacgccggaatggtgtccttgatggatgaagcagtgggcaatgtgactgcagcgttgaagagcagcggcctgtggaacaacactgtattcatattctcgacggataacggtggacaaactttggccggagggaacaactggcctttgagggggagaaagtggtcgctttgggaggggggcgtcaggggtgtgggttttgtggcctccccactgctgaagcagaaaggtgtcaagaatagagaactgattcatatctcagattggctcccaacgctcgtgaaacttgcacggggtcataccaacggcactaagcctctcgatggatttgacgtctggaaaaccataagcgaaggaagcccttctccacgtatcgaattgcttcataacatcgacccaaactttgttgattcctcgccctgtcctcgaaactccatggcgcccgcaaaggacgactcatcgcttcccgagtacagcgcgttcaatacttcggttcacgcagcaatcaggcatggaaattggaagctgcttaccggatacccaggatgtggctactggtttccgcctcccagccagtataatgtgtccgagataccaagtagcgatcctccaaccaagaccctttggctttttgatattgatagagatccggaggaaagacacgacctctcacgggaatacccccatattgtgaccaaactgctttcacgcttgcagttctaccataaacattcagtccccgtgtactttcctgcccaggatccccggtgtgacccgaaggcaactggtgtgtggggtccttggatg

SEQ ID NO: 541 - DNA, 1599 bp, Artificial Sequence
  derived and/or modified sequence
atgggtccgcggggcgccgcctcgctgcctcgaggtccaggcccacgcaggcttcttctccctgtggttctgcctcttctgctgcttctgctgctcgcccctccaggctcgggtgccggagcatctcggcctccccatctggttttccttctggcagatgatcttggttggaacgacgtgggttttcacggctcgagaatccgcaccccgcatctcgacgctttggccgccggaggtgtgctgctggataactactacacgcagccactctgtactccaagccgtagccagcttctgactggcagataccaaattcgcactggacttcagcatcagatcatttggccgtgccagcctagctgtgtgcctctggatgagaagctcctgcctcagcttctgaaggaagcgggctacacgacccacatggtcggaaagtggcatctgggtatgtaccggaaggaatgcctgccaacgagaaggggatttgatacttacttcggctacctcctgggttcagaggattactactcacatgaaaggtgtaccctgattgacgcactcaacgtgactcggtgtgcactggatttcagagatggggaagaagtggcaactggttacaagaacatgtactcaaccaacattttcactaagcgcgccatcgcacttattaccaaccatcctccagaaaagccactttttctttacctggccctccaaagcgtccacgagccacttcaagtaccagaagagtatcttaagccgtacgactttatccaagataagaaccgtcatcactacgctggtatggtgtcattgatggacgaagccgtgggaaatgtgaccgcggcacttaagtcgagcggactgtggaacaacaccgtgtttatcttttcgaccgacaacggaggtcaaactctggcaggagggaacaactggcccttgcggggaagaaagtggagcctgtgggagggaggtgtgcggggtgtgggattcgtggcaagcccgcttctgaaacagaagggggtgaaaaacagagaacttatccatatttccgactggcttccaacgcttgtgaagctcgcaaggggacacaccaatggaaccaagcccctggacgggttcgatgtgtggaaaactatttccgaagggagcccttccccacgaattgaactgctgcacaacattgaccccaactttgtcgattcatccccatgtccacgaaactcgatggcgccagcaaaggatgattcgagcctgcctgaatactccgcattcaacacgagcgtgcatgcagcaattcggcatgggaactggaaactgctcactggatacccaggctgtggctactggtttccaccaccatcgcaatacaatgtgtcggagatcccttcgagcgatccacctactaagactctgtggctgtttgatatcgatcgagatcccgaagaacgacatgatctgtcccgcgaatacccccatatcgtgactaaacttctgtcccggcttcagttttatcataagcattccgtgcctgtgtacttcccagctcaagatcctagatgtgatcctaaagccaccggagtctggggtccatggatg

SEQ ID NO: 542 - DNA, 1599 bp, Artificial Sequence
  derived and/or modified sequence
atgggcccgcggggagcggcctcgctcccgcgcggacctggaccgcgccggctgctgctgccagtggtgctccccctgctgctgctgcttctgctggctccgccgggaagcggagcgggagccagccgaccgcctcacctggtctttctcctggcagacgatttgggatggaacgacgtgggtttccatggttcccggatccggactcctcatctcgacgcgctggccgcgggcggagtgctgctggacaactattacactcagccgctttgcaccccttccagaagccaacttctcactggaaggtaccagatccggacggggctccagcatcaaatcatctggccatgccagccatcctgcgttcctctggatgagaagctgctgccgcaattgttgaaagaagcaggatacaccacccatatggtgggaaaatggcacctcggaatgtacagaaaggaatgcttgcctactcgcagagggtttgatacctactttggatacctgctgggatccgaggactattactcccatgaacgctgcacgctcattgacgcacttaatgtgactcgatgtgcacttgacttcagggacggagaagaggttgcgactggttacaagaacatgtactcaaccaacatcttcaccaaaagagcaatagcccttattactaaccacccccctgagaaaccactcttcctctacctcgccttgcagtcagtccacgagccactgcaagtgcccgaagagtacctgaagccttacgacttcattcaggataagaacagacaccactacgcgggtatggtgtcactgatggacgaagcagtgggaaacgtcactgccgcccttaagagctcggggctgtggaataacactgtgttcatcttttccaccgacaacggaggacagaccctggctggaggcaacaactggccgcttcggggacggaagtggtcactgtgggaaggaggagtgcggggagtgggctttgtcgcctcaccacttctgaagcagaagggagtgaagaacagagagctgatacatatctccgattggctgccaaccttggtcaaactggccagaggccacaccaacggaactaaacctctggacggcttcgacgtctggaaaaccatttcagaaggctcaccttcaccccgcatcgagctcctgcacaatatcgacccgaatttcgtggactcgtcgccgtgcccgcgcaactccatggcaccggcaaaggacgactcgtccctgcccgaatactccgccttcaatacctccgtgcacgccgcaattcggcatgggaactggaagctgctcactggctaccctgggtgcggatactggtttccaccaccaagccagtataatgtgtcagagatcccgtcatccgatccaccgacgaaaactctttggcttttcgatattgaccgggaccctgaggaaagacacgacctctcgcgggagtacccgcacattgtgactaagctcctctcgcgcctccaattctaccacaaacactcggtcccagtgtacttcccggcccaggatcccaggtgcgatcccaaggcgactggggtctggggcccctggatg

SEQ ID NO: 543 - DNA, 1599 bp, Artificial Sequence
  derived and/or modified sequence
atgggacctcgaggagcagcatcgctccccagagggcctggtccacggcggcttctgctaccagttgttctcccactgctgctgctccttctgttggccccaccgggcagcggcgccggcgccagcaggccaccccacttggtgttcttgctggctgacgatctcggctggaacgacgtgggcttccacgggtcaaggatacgtacaccgcacctcgacgcactagctgccggcggagtgctgctggacaactactacacccagcccctctgtacaccaagcagatcccagctcctgactggacgataccagattcggactgggcttcagcaccagataatttggccttgtcaacctagctgtgtgccactggacgagaaactactgcctcagctcctgaaagaagcaggatacactacacacatggtcgggaagtggcacctgggtatgtacagaaaggaatgtctccccacaagacgtgggtttgatacgtatttcggctatctgttagggtccgaggactattacagccacgagcgatgtactctcattgacgcgctgaacgtcactagatgtgccttagattttcgagatggcgaggaagttgcaaccggttataagaacatgtatagcaccaatatctttacaaagcgggccatagctctcataacaaatcaccctccagagaagccgcttttcctgtaccttgcgttgcagagcgtccacgagccccttcaggtgcctgaggaatatctgaagccatacgactttatacaggacaaaaacagacaccattacgcaggcatggtgtctctcatggatgaggcagtgggaaacgtcacagctgcactgaagagttcgggactatggaataataccgtcttcatatttagtacagataatgggggccagactctcgccggcggcaataattggcctcttagaggacgcaaatggagtctttgggaagggggcgtgcgcggggtgggcttcgtagcctcccccctccttaagcagaagggggtgaaaaaccgcgaactcatccacatcagtgattggttaccaaccttggtgaaacttgcaagaggacataccaacggtaccaaacccctcgatggtttcgatgtctggaagacgatcagcgaggggagcccctcacctcgaatagaactgctccacaatatagatccaaatttcgtcgacagttcaccttgccccagaaacagtatggctcccgccaaagacgactcctccttgcccgagtatagtgcgttcaacacgtcagtccacgcagcgatacgacacgggaattggaagctgttaacaggatacccgggctgcgggtactggtttcctccaccaagccagtacaatgtttcggagattcccagctctgatccaccaacaaagacgctttggctttttgatattgacagagaccccgaagaaagacatgatctatcaagggagtaccctcacatcgtaaccaaactgctctctcggctgcaattctaccacaagcactccgtgcccgtctactttcctgcccaggaccctaggtgtgatccaaaagccaccggagtctggggcccatggatg

SEQ ID NO: 544 - DNA, 1599 bp, Artificial Sequence
  derived and/or modified sequence
atgggtccaagaggagcagcatctttaccaagaggaccaggacctcgaagattgttacttcctgttgtcttaccattacttttacttttattacttgctcctccaggttctggtgcaggagcttcaagacctcctcatcttgtttttttattagcagacgatttaggatggaatgatgttggattccatggttcacgtattagaacaccacatcttgatgcattagctgcaggtggtgttttattagataactactatacacaaccattatgtactccatcaaggtctcaattattgacaggaagataccaaattcgaacaggtttacaacatcaaattatttggccttgtcaaccatcatgtgtacctttagatgaaaaacttttaccacaattattaaaggaagcaggttatactactcatatggtaggaaaatggcatttaggaatgtatcgtaaagaatgtttaccaactagaagaggatttgatacttattttggatatttgcttggaagtgaagactattactcacatgaaagatgtaccttaattgatgccttaaacgtaacaagatgtgcattggatttccgtgatggagaagaagttgctacaggatataaaaacatgtattcaactaatatttttactaaacgtgcaatagcacttataactaatcatccacctgaaaaaccactttttttatatttagctttacaatctgttcatgaaccacttcaagttccagaagaatatttaaaaccatatgactttatccaagataaaaatagacatcactatgcaggtatggtttcattaatggatgaagcagttggaaatgttacagctgctcttaaatcatctggactttggaataatactgttttcatcttttcaacagataatggaggtcaaactcttgcaggagggaataactggccacttagaggacgtaaatggtctttatgggagggaggtgttcgtggagtaggattcgttgcatctccattattaaaacaaaaaggagttaaaaacagagagttaatacatataagtgattggttaccaacacttgttaaactagctcgaggacatacaaacggtacaaaaccattagatggttttgatgtttggaaaacaatatctgaaggaagtccatctccaagaattgagttacttcataatattgatccaaattttgttgattcatcaccttgtcctagaaactctatggcaccagctaaagatgatagtagtctacctgaatattctgcatttaacaccagtgttcacgcagcaattcgacatggaaattggaagttactaacaggttatccaggatgtggatattggtttccaccaccatcacaatataatgtttcagagattccatcatccgatcctccaacaaagaccctatggttatttgatatcgatcgagatccagaagaaagacatgatctcagtagagagtatccacacattgttacaaaattgttgtctagacttcaattttatcataaacattcagttcctgtatatttcccagctcaagatccaagatgtgatccaaaagctactggggtttggggaccatggatg

SEQ ID NO: 545 - DNA, 1599 bp, Artificial Sequence
  derived and/or modified sequence
atgggacctcgcggtgcggcctccttgcctcgcggaccaggaccacgccgccttctgctgccggtggtcttgccactgctcctgcttttgctgctggcgccaccgggatcaggagctggagcgagccgccctccccatctcgtctttctgctggccgatgacttgggctggaacgacgtaggattccacgggtcgcggatccgcactccacatctggatgccctggcagccggtggagttctgctggacaactattacacccagccgctctgcactccgagcagatcgcaactgctcaccgggcggtaccagatccgcacgggcctgcagcatcaaatcatttggccgtgccagccctcgtgcgtgccgctggatgagaaattgctgcctcagctgctgaaggaagctggttataccacccacatggtcggaaagtggcacctcggaatgtacagaaaggaatgtctgcctactcgccggggtttcgatacttactttggttacctgctcggctcggaagattactactcccacgaacggtgcaccctgattgatgcgctcaacgtgactcgctgcgccctggacttccgggacggtgaggaggtggccacgggctacaagaatatgtactcgaccaacatcttcaccaaacgcgccatcgcgctcatcaccaatcacccgccagaaaagccgctcttcctgtaccttgccctccagtcagtccatgagccgttgcaagtgccagaggaatacttgaaaccatacgactttatccaggacaaaaatcgccaccactacgccgggatggtgtccctgatggacgaagccgtggggaacgtgactgcagccctcaagtctagcggactctggaataacaccgtctttatcttctctacggataatggagggcagaccctggctggtggcaataactggccgcttcgcggtcgtaagtggtcactctgggaagggggagtgcgcggggttggttttgtcgcatcccccctgcttaagcaaaagggcgtgaaaaaccgggagctcatccatatctcagattggctgccgaccctggtgaaactggcaaggggccatacgaacggcaccaaaccactggatggtttcgacgtttggaaaaccatctcagaaggaagcccaagtccgcgcatcgaactcctccataacatcgatccgaattttgtcgactcgtctccgtgtcctcggaactcgatggcacctgccaaagacgactctagcctgccagaatactcagccttcaacactagcgtgcacgcggcgatcaggcacggcaactggaagttgctcactggctacccgggctgtgggtactggttccctcccccatcgcagtacaacgtgtccgagatcccatcctcggatccacccactaagacgctctggctgtttgacatagacagagatcctgaagaacgccatgatctctcccgggaatacccccatatcgtcaccaagctcctgtcgaggctgcagttttaccataagcactcagtcccggtgtacttcccagctcaagaccctcgctgtgaccctaaggcaaccggagtctgggggccgtggatg

SEQ ID NO: 546 - DNA, 1599 bp, Artificial Sequence
  derived and/or modified sequence
atgggtcctaggggtgcagcatcactgccccggggacctggaccaaggagactcctgcttcctgtggtgcttccgctgctccttttgcttcttctggcaccgcctgggtcgggtgcaggtgcgagtcgacctccacacctggtgttcttgcttgccgatgatcttgggtggaacgatgttgggttccatggttcccgcattcgcaccccacacctcgatgcactggcagcagggggagtgcttttggacaattactatactcaacctctttgtaccccaagcaggtcgcaactgcttaccggacgctaccagatccggaccggactgcagcaccagatcatctggccgtgccaaccctcgtgtgttccccttgacgagaaattgcttcctcagttgctgaaagaggccggatacactactcatatggtcggcaagtggcatttgggaatgtacagaaaggagtgtctcccaaccagacgtggattcgacacttacttcgggtacctccttggatccgaggattactactcgcatgaaagatgcactctgattgatgcactgaacgtgacgaggtgcgccttggactttcgggacggggaagaagtggctactggatacaaaaacatgtactcgaccaacattttcacgaagcgggctatcgcactgataactaaccaccctccagaaaagccactctttctttaccttgcactgcagtcggtacatgaaccccttcaagtacccgaggagtatctgaaaccctacgacttcattcaagacaaaaatcgccatcattacgccggaatggtgtcgcttatggacgaagcagtcggcaacgttaccgcggcactcaagagctcaggtctttggaacaacaccgtgtttatctttagcactgataatggtggacaaacccttgccggtggaaacaactggccactgaggggacgcaagtggtcactgtgggagggaggcgtccgcggagtgggatttgtcgcgtcgcctttgctgaagcagaagggagtgaagaacagggaactgattcatattagcgattggctgccgactctggtcaagctggcaagaggacacaccaatggtaccaagcccctggatggttttgatgtgtggaaaactattagcgaaggcagcccttccccccgaattgaacttttgcataacattgatccaaactttgtcgatagctccccctgtccgcggaacagcatggccccagcgaaagatgactcttcgttgcccgaatactccgcgtttaacacctcggtccacgcagcgataaggcacggtaattggaagctgcttacggggtacccagggtgtggatactggttcccacctccctcgcaatacaacgtctcagagataccttccagcgatcctccgaccaaaaccctgtggctgttcgatatcgatagagatccagaggaaagacatgacctgagccgtgaataccctcatattgtcaccaagctgctgtcacgcctgcagttctaccataaacattcggtgcctgtgtactttccagcccaagatccgagatgtgacccaaaggcaacgggcgtgtggggtccttggatg

SEQ ID NO: 547 - DNA, 1599 bp, Artificial Sequence
  derived and/or modified sequence
atgggcccacgcggtgcggcttctcttcctcgggggccaggaccacgacgcctcctgcttccagtggtgctcccgctgctgctcctgctgttactggcccctcccggtagcggcgccggtgctagtagaccgcctcacttggtgttcctgttagcggacgatctggggtggaacgatgtaggattccacggctctcgcatccgcactccccatctcgatgccttggccgccgggggcgtacttctggataattattacactcaaccgttgtgcacgccctctcggagtcagctgttgacaggccgctatcagattagaacaggattgcagcatcagattatctggccttgtcagccctcgtgtgtgccactcgacgagaagctactgccccagctgctcaaggaagctggatataccactcacatggtcgggaagtggcacctgggcatgtaccggaaggagtgcctgccaactagacggggatttgacacctattttggctatctcctcggtagtgaggattactactcacacgagcgctgtacccttattgatgccttgaatgtgacccggtgcgcacttgatttccgtgacggagaggaagtcgcaactgggtataagaatatgtatagtaccaatatctttaccaagcgggccattgccctgattaccaatcatccccccgagaagcctctctttttatatcttgcccttcagagtgttcatgagcctctgcaggtgcctgaagaatacttgaaaccctatgattttatccaggacaagaataggcaccattatgcgggaatggtgtctttgatggatgaagcggttggtaatgtgactgctgcccttaagagctccgggctctggaacaatactgtattcatattttccactgacaacggcgggcaaactttagccggtggaaataattggcctcttcggggaaggaaatggagcttgtgggagggcggggtcaggggcgtgggttttgtcgcctccccgcttctgaaacagaaaggagtcaaaaaccgagagctaatccacatttccgactggctgcccacgctggtgaaattagcccgcgggcataccaacggcactaagcctcttgacgggtttgacgtgtggaagactattagcgaaggctctccgtcaccacgcatcgagctcctacataatatcgacccaaatttcgtggacagctcaccttgcccccgcaattcgatggcgccggctaaggacgacagctcacttcctgaatactcagcctttaataccagcgtgcacgcagctatccgccatggcaactggaagctcctcactggctaccctggctgcggttattggttcccaccccccagtcagtataacgtttccgagattccgagtagcgacccccctaccaagactttgtggctttttgacattgatagggaccctgaagaacgtcacgatctgtccagagagtatccgcatattgtcaccaagctcctttctaggctgcaattctaccataaacatagcgtgccagtgtattttcctgcgcaagaccctcgttgcgacccaaaggctactggcgtttggggtccatggatg

SEQ ID NO: 548 - DNA, 1599 bp, Artificial Sequence
  derived and/or modified sequence
atgggaccaagaggggcagcaagcctgcctcgcggaccaggtccacggcggttgctgcttccagtcgtgttgcctctgctgctgcttttgctccttgccccacctggatccggtgcaggcgccagcagaccgccacatctggttttccttctggcagatgatcttggttggaacgatgtgggatttcacgggagccgaattcggaccccgcacctcgatgcacttgcggccggtggcgttctgctggacaattactacactcaaccactttgtaccccgtcaagatcacaactgttgaccggtcgataccaaattagaactgggcttcagcatcaaatcatttggccgtgccaaccttcatgtgtgccactcgacgaaaaactcctgccacagctccttaaagaagcaggttacacgactcatatggtgggaaagtggcacctcgggatgtaccggaaagaatgtctgccaacgagacgtggattcgacacctacttcggttacctgctgggatcagaagattactactcgcatgaacgttgcactttgattgacgcacttaacgtcacgcgctgtgcactggattttcgggatggggaggaggtggcaactggatacaagaatatgtactccaccaacattttcacgaagagggccatagctctgatcactaatcaccctcccgaaaagcctctgttcctttacctcgcgctccaatccgtgcacgagccactgcaagtgcctgaagagtaccttaaaccttacgactttattcaggacaagaaccgccatcactacgcgggcatggtttcccttatggatgaagccgtgggaaatgtcaccgcagcactgaagtcctccggcctgtggaacaatactgtgtttatcttttccacggacaacggtggacagaccctggcagggggtaataactggcccctgcgagggcgcaaatggagcttgtgggaaggaggtgtgcggggtgttggatttgtggcatcacctcttctcaagcaaaaaggcgtgaaaaacagagagctgattcacatttcggactggctgcccacgctggtcaagttggcacgggggcatactaacggaactaagcctcttgatggctttgacgtgtggaaaaccatctccgaaggttcgccatctcctaggatcgaactcctgcataacattgatcctaactttgtcgactcatccccctgccctagaaattcaatggcaccagccaaagatgattcctcccttcctgaatactccgccttcaatacctcagtccatgcggccatccgccatggaaactggaaactgctcactggctaccccggctgtggatactggtttccccctccatcccagtacaatgtgtcagagatacctagctcagatcctccaaccaagactctttggttgtttgatattgatagggatccggaggagcggcacgatctgtcccgtgagtacccacatatagtgaccaagctccttagtagacttcaattctatcataagcattcagtgccagtgtacttcccagcacaagatccaagatgcgacccaaaggcaactggagtgtggggtccatggatg

SEQ ID NO: 549 - DNA, 1599 bp, Artificial Sequence
  derived and/or modified sequence
atgggtcctcggggagccgctagcctcccgcgggggcccgggccccgtagactgcttttacctgtggttctgcccctgctgcttttgttgttgttagcacctccagggtctggggccggggcatcaaggccgccacacctcgtgttcctactggccgatgacttaggctggaacgacgtggggtttcatggaagtaggattcgcaccccgcacctggacgcactggcagccgggggagttctgctggacaattactatacccagccactgtgcactccaagcagaagtcaactgctaacagggcgataccagatcaggactggtctccaacatcagatcatctggccttgccagccgagctgtgtccccctggatgaaaagctgctgccgcagctgcttaaagaagccggttacacgacccatatggttggaaagtggcatctgggtatgtataggaaagagtgtttgcctacacggagaggcttcgatacttattttgggtaccttctgggatctgaggattattattcacacgagcgatgtacactaattgacgctctgaacgttacacggtgcgcactggattttagggatggcgaggaggtggcgaccggctacaagaatatgtacagcacaaacatcttcactaaacgggccattgctcttattacgaaccacccaccagagaaacccctgttcctctacctggccctgcaatccgtccatgagcccttacaggtacctgaggagtaccttaagccctacgacttcatccaggacaagaacaggcaccattacgctggtatggtgagtcttatggatgaggccgtgggcaacgtcacagccgcacttaaatcttctggcctgtggaataatacagttttcattttttcgaccgacaacggcggacagacactcgccggaggaaataattggccccttcggggtaggaaatggagtctgtgggagggaggcgtcagaggggttgggttcgtggctagccctctactcaagcagaaaggagtcaaaaacagagagctgatccatattagcgattggctgccgacactggttaaattagcgagaggacacaccaatggaactaaaccgttagacggctttgatgtttggaagactatttctgagggttcccccagtccgcggatcgagctgctgcacaatattgaccccaacttcgttgactcatcaccttgcccgcgaaattccatggcccccgctaaagatgactccagtcttccagaatattccgcattcaatacgtccgtccacgctgccatcaggcatggcaactggaagctcttgaccggctaccctggctgtggctactggttccctccaccctcgcagtataacgtttccgaaattcccagctcagatcctcccactaaaaccttgtggctattcgatatcgacagggacccggaggaacgtcacgacctgtcacgggaatacccacacatagtgactaaactgctgagtcgactgcaattctaccacaaacactctgtccctgtgtactttccagcgcaagatcccaggtgcgacccaaaggctacaggagtgtgggggccctggatg

SEQ ID NO: 550 - DNA, 1599 bp, Artificial Sequence
  derived and/or modified sequence
atggggcctaggggcgcagcctcactgccacgaggccccggacctcggcgcctgctgctgccggtcgttctgccattgctgctgcttcttctccttgctccaccaggctctggggctggcgcttctcgcccaccacatcttgtgtttcttctggctgacgacctgggctggaacgacgtgggattccacggcagtagaataagaacacctcacctggacgcactggcagcgggtggagttctgctcgacaactactatacacagcccctgtgtactcccagccggagtcagctgctcactgggaggtaccaaatccgcaccggattgcaacaccaaataatttggccttgtcaaccttcttgcgtgcctctggacgaaaagctgcttccacagctcctgaaggaggccggctacacaacacatatggtgggtaagtggcacctgggaatgtaccggaaggaatgcctcccaacccggaggggttttgatacatacttcggatatcttctgggttcagaagattactattcacatgagaggtgcaccctcatcgatgcactgaacgttacccggtgcgcccttgactttcgggacggagaagaggtggccaccggctacaaaaacatgtactctacgaacatcttcaccaaacgcgctattgctcttataaccaatcacccccctgagaagcctctgttcttgtacctggctctccagtcagttcacgaacctttgcaggtgccagaagagtatctgaagccctatgattttatccaagacaagaacaggcaccattatgcgggcatggtctccctgatggacgaggctgtcgggaatgtcacagccgcattgaagagttccgggttgtggaacaatacagtttttatcttcagtaccgacaatggcggccagactttggctggggggaataactggcctctgcggggccggaagtggagcctctgggaagggggtgtcagaggagtgggtttcgtggcctcccccctgctgaaacagaagggtgtgaagaatcgcgagctgatccatatttccgactggctcccgacactggtgaagctcgcccgagggcatacgaacggtacaaagccccttgatggatttgacgtgtggaagacaatcagtgaagggagtccatctcctcgcatagagcttctgcacaacattgaccccaatttcgtcgactcttccccctgcccccggaactcaatggctcctgccaaggacgatagctccctgcctgaatactcagcgttcaacaccagcgtgcacgctgcgattcgccatggtaactggaagttgctgaccggttacccaggatgtgggtattggtttcccccacctagccaatacaatgtgagcgaaatcccatcatctgatccaccaacaaagactctctggttgttcgacattgacagggatccagaggagcgacacgacctttcacgggagtacccacacatcgtaacaaagttgctgtcccgactgcagttttatcacaagcactcagttcctgtgtacttccccgctcaggatcctcgatgtgatcccaaagccaccggagtgtgggggccctggatg

SEQ ID NO: 551 - DNA, 1599 bp, Artificial Sequence
  derived and/or modified sequence
atgggccctaggggagcagcatccctcccccgagggcctggcccaagacgactgcttcttcctgtggtgctccctctgctgttgctgctgttgcttgcaccgcctggttcaggtgccggagcgtcgcgacctccccatctggtgtttcttctggcagacgatcttggttggaatgatgtgggctttcacggatcgcgcatccgtactccacatcttgatgctctggcagccggtggcgtgctcctggacaattactacacccaacccctgtgcactccatcccgctcacagctcctgactggtagataccagatccggactggactccaacatcagattatctggccttgccagcctagctgtgttcctcttgatgagaagctcctgccacaactgcttaaagaagcaggatacaccacccacatggtgggaaagtggcatctgggaatgtacagaaaggaatgtctgccaacccgcagagggtttgacacgtacttcggttaccttcttggttcagaggattactattcccacgaacgatgtaccctgatcgatgcgcttaacgtgactagatgtgctctggattttagagacggggaggaagtggccaccggatataagaatatgtacagcaccaacattttcactaagagagctatagccctgattactaatcacccaccagagaagcctctttttctttacctggcactgcaaagcgtgcacgagccactccaggttccagaagaatacctgaagccctacgacttcatacaagataagaatcggcaccactacgcaggcatggtgtcgctgatggatgaagcagtgggaaatgtcacggcagcacttaagtcgtcggggctttggaacaacactgtgtttatctttagcaccgataacggcggccaaactctggcaggtggtaacaattggcctctgcgcggcaggaaatggtccctttgggaaggaggggtgagaggcgtcggttttgttgcaagccctcttctcaaacaaaagggcgtgaaaaacagagaattgatacatatctcagattggcttcctacgctcgtgaagctcgcccgtggtcacaccaacggaactaaaccgcttgatggctttgatgtttggaaaacgatttcagaagggtcaccttctcctaggattgagcttctccataacatcgatccaaacttcgtggattcatcaccctgcccccggaactcaatggcgccagcaaaggacgattcctcattgcctgaatattccgcttttaacaccagcgttcatgcagccatccggcatgggaactggaaactgttgaccggctacccaggatgtggatactggttcccgcccccttcgcagtacaatgtgtcggagattccgtcctccgacccacccactaagaccctgtggctttttgatatagaccgggacccagaagagagacatgacctgtcgagagagtacccgcatattgtgaccaaacttctgtccaggctgcaattctaccataaacatagcgtgcccgtttacttccccgcacaagacccgcgctgtgatcctaaggcaaccggagtgtggggtccttggatg

SEQ ID NO: 552 - DNA, 1599 bp, Artificial Sequence
  derived and/or modified sequence
atggggcccagaggtgctgccagcctcccacgtggccctgggccacggcgcctcctcctccccgttgtcctccctcttctattgctgctactgttagctccacctggcagcggtgccggcgcctctcggcccccgcatctggtttttctgctcgctgatgatctgggatggaatgacgtcggctttcacggcagtcggattaggacaccacatctggacgctctggcagccgggggggtgctgctggacaattattacacacagcccttgtgcacgccatcacgctcccaactgctgaccggaaggtaccagattcgcaccggtctccagcaccaaatcatctggccatgccagccatcctgtgtgccgttggatgaaaagctgctgccacagctgcttaaagaggctggttatacgacgcacatggtcggaaaatggcatctaggcatgtatcgcaaagagtgcttaccaacccgccgcgggttcgacacatactttggctacctgctgggttcagaggactactattcccacgaacgatgtactctgatcgacgccctgaacgtcacccgctgtgccctggatttccgggatggcgaagaggtcgctactggatataagaacatgtattcaactaacatcttcacaaagagagctatcgcactgatcactaatcatccccccgagaaacctctgtttctgtatcttgccctgcagtccgtccatgaaccccttcaggtgcctgaggaatacctgaaaccatacgatttcatacaggacaagaatagacatcactacgcagggatggtgtcattaatggacgaagccgtgggcaacgtcactgcggcccttaagtcctccgggttgtggaataacacagtgttcatctttagtactgacaatggagggcagacactggctggcggaaataactggccgctgcgtggtcgaaagtggtctttatgggagggcggcgtgcgaggcgtaggctttgtggcgtctccccttttaaagcagaaaggcgttaagaacagggagcttattcatatctcagattggctccccacccttgtgaagctggctcgaggccatactaatgggacgaaacctttagacgggttcgacgtttggaagacaatctccgaaggtagtcccagccctagaatcgagctcctgcataacattgacccaaactttgtcgacagctcaccatgtccaaggaactctatggctccagctaaggatgactctagtctgccagaatattcagccttcaatacaagcgtgcatgccgcgatcaggcatggaaattggaagctcctgaccggttatccagggtgtgggtattggttcccccctccatctcaatataacgtttcagaaattccatcttcagatcccccaaccaagacgctctggctgttcgatattgaccgagatccagaggagagacacgatttgagccgggagtaccctcacattgtcaccaaactgctcagtcgattgcagttttatcataaacatagcgtacctgtgtacttccccgcccaggatcctcggtgtgatcccaaggctaccggagtttggggaccctggatg

SEQ ID NO: 553 - DNA, 1599 bp, Artificial Sequence
  derived and/or modified sequence
atgggccccagaggcgcagcaagcctgccccgtggtcccggccctagacgactgctcctgccggtcgtcctgcctttgcttctcctcctgcttctggcgcctcctggatccggagcaggtgcgtcaagacccccacacttggtgttccttctggctgacgatctggggtggaacgatgtgggatttcatggaagccggattagaaccccccatctcgatgcgctggcagctggaggtgtgctgctggacaattactacacccaacctctgtgtactccatctcgatcacagttgttgaccggcagataccagatacgcacgggacttcaacaccagataatctggccatgtcagccaagctgtgtgccccttgacgagaaacttttgccgcagctgcttaaggaggcggggtataccactcatatggttggaaagtggcacctggggatgtaccggaaggagtgtctccctactagaagaggatttgatacttactttgggtacctcctcgggtcagaggattactattcacatgagcggtgcaccttgattgacgcgcttaatgtgacgaggtgtgcactggacttcagagatggagaggaggtggctaccggctacaagaatatgtattcaactaacatctttaccaaaagagccattgcacttattaccaaccatccacctgaaaaaccactcttcctctatcttgcacttcaaagcgtccatgaacctcttcaagtccctgaagagtaccttaagccgtatgacttcatccaagacaagaaccggcatcattacgcagggatggtgtcgttgatggacgaagcagtcggaaatgtgaccgccgcgcttaagtcaagcggactttggaacaacaccgttttcatattctcgacggataatggtggtcaaactcttgcaggcggaaacaactggccactgagaggtagaaagtggtccctgtgggaaggaggcgtgaggggcgtggggttcgtcgcctcgccccttcttaaacagaagggagtcaagaatcgcgaacttattcacatctccgactggctccctaccctggtgaagctggcaagaggacacacgaacgggaccaagcctctggatggatttgatgtgtggaaaaccatctcggaaggtagtccaagtccccgcatcgagctccttcataacattgatcccaattttgtggatagctcaccatgtccccggaactccatggcacctgcaaaagacgattcaagcctcccagaatacagcgcatttaacacctcggtgcatgcagcgatccgacacggaaactggaaactgctgaccggataccccggatgcgggtactggtttccaccaccttcccagtacaacgtgtccgaaattccttcgtcggacccaccaactaaaaccctctggctctttgacatcgaccgtgatccagaagaaagacatgatctgtcacgcgaataccctcatattgtgaccaagctgctgtcgaggcttcaattctaccacaagcatagtgtgccagtgtactttcccgcacaagacccccgatgcgatcctaaggcgaccggtgtctggggaccttggatg

SEQ ID NO: 554 - DNA, 1599 bp, Artificial Sequence
  derived and/or modified sequence
atgggtccccgtggggcagcgtctctgccccgcggcccgggaccaaggcgcttactcctgcctgtcgtgcttccattactgctgctgctgctgttagcgccaccgggcagcggggcaggcgccagccgaccacctcacttggtgtttctgctggcggacgatctgggctggaatgatgtcggttttcatggctcacgcatccgcacgcctcatctggacgcgctggcggctggtggagtgctgttggataactactatactcaacctctgtgtaccccaagccgtagccagctgttgacgggtcgataccaaattcgaacaggactgcagcaccagattatttggccatgccaacccagctgtgttccactggacgagaagttgttaccgcagctgctgaaagaggcaggctataccactcatatggttggaaagtggcatctagggatgtaccgcaaggaatgcctaccgactcgccggggcttcgacacgtatttcggctatctgttaggaagtgaggactattattcccacgaacgctgcaccctgattgatgctctgaacgtgacgcgctgtgcattggatttccgcgacggtgaagaggttgctaccgggtataagaacatgtatagcactaacatcttcacgaaacgtgccattgcacttattacgaaccatccgcctgagaagcctctgttcctgtatctcgcgctgcagagcgtccatgagccactgcaagtaccagaagagtacctaaaaccgtacgatttcatccaggacaaaaaccgccatcactacgcggggatggtgagcttaatggatgaggcggttggtaacgtgaccgcggcgttgaagtcatccggtctctggaacaataccgtattcatctttagcactgacaacggcggccaaacactggcgggcggcaacaactggccgctacgcggacgcaagtggagcctgtgggagggcggagtgaggggtgttggtttcgtcgcaagccccctgctgaagcagaagggagtgaaaaacagagagctgattcacatctccgactggctgccgacgttggtgaaactggcgcgcggccatacaaacgggacgaaaccgctggatgggtttgacgtatggaaaaccattagcgaagggagcccaagcccgcgcatcgaactgctgcacaatatcgatccaaattttgtcgactcaagcccgtgccctcgcaactcgatggcccccgcaaaagacgattcttcactgccggagtactccgcatttaacacttccgtgcacgcggcaattcgccacggcaattggaagctgctgacgggttatccagggtgtggctactggttcccgccaccgagccagtataatgttagcgaaattcctagctcggatcctccaacgaaaaccctgtggctgttcgatattgaccgcgatccggaggaacgccacgatctgagcagggaatatccacacatagtgactaaattgctctcccggctgcaattctaccacaaacacagcgtgccggtttatttccctgcccaagatcctagatgtgacccgaaggcgaccggagtttggggtccgtggatg

SEQ ID NO: 555 - DNA, 1599 bp, Artificial Sequence
  derived and/or modified sequence
atgggtcctagaggggctgcgagcctgcctcgagggccaggaccccgacggctgctgctcccagttgtgctgcccctgttactcctcctcctattagcccctccgggatctggagccggcgcaagtaggcctcctcacttagtcttccttctggcggatgatctgggatggaacgacgtggggtttcacggctctcggatccggacgccacaccttgatgcgctcgcagccggtggcgttctcctagacaactattatacgcagccactgtgcactccatcaaggtcccaactgctgacaggcaggtaccaaattcgtacagggctgcagcatcagattatctggccatgccagccaagctgcgtcccactggacgaaaagctgctgccacagcttctgaaggaggcaggttacactacgcacatggtgggtaagtggcatctcgggatgtaccggaaagaatgtttgcccacccggcgtggttttgatacctacttcggatatctgctcggctccgaagattactactcacacgagcggtgcacactcatcgacgcgctgaacgttacaaggtgcgcgctggattttcgggacggagaggaggtcgccactgggtataagaacatgtatagtacaaacatcttcacaaaacgtgcgattgctctcatcactaaccacccacccgagaaacccctcttcttgtatctggccttacagtccgtgcacgaacctctgcaggtgcccgaggagtacttgaagccctacgattttatccaggataaaaatcgccatcactatgcaggtatggttagcctaatggacgaggcagtgggcaatgtgactgccgccctgaaatcatctggcttgtggaataatactgtgttcattttttccacagacaacggcggccagaccttggcgggagggaataattggcccctccgggggagaaagtggtcattatgggaagggggcgtgaggggcgtgggattcgtagcgtcgcccttacttaagcaaaaaggagtgaaaaatagagaacttatacacatttctgactggctgccaactctcgtcaagctggcgcggggccacacaaacgggaccaaaccattggacggttttgacgtgtggaagaccatttccgaggggtctcctagccctcgcatagaacttcttcacaacattgaccctaatttcgtggattcatccccctgcccgcgaaacagcatggcacccgccaaggacgacagttctttgcccgaatactccgcttttaatactagcgtccacgctgcaatcaggcatggaaattggaaattactgaccggttacccaggctgcggctactggtttccaccaccgtcccagtataacgttagcgaaatcccgtcctccgatccaccgacaaaaacactctggctgttcgacatcgatcgggacccagaagagcggcatgacctctctagagagtaccctcacattgtgactaagttgctgagccgactgcaattctatcacaaacatagtgtgccagtttactttccagcacaggacccccggtgtgaccctaaagccaccggagtgtggggcccgtggatg

SEQ ID NO: 556 - DNA, 1599 bp, Artificial Sequence
  derived and/or modified sequence
atgggcccaaggggcgctgctagtttgccacgagggcctgggccaagaaggctgctgctccctgtggtgttgccactcttgctccttctcctactcgccccgcctggctctggagccggtgcttcccgccctcctcatttagtcttcctactcgcagacgacctgggctggaacgatgtcggatttcatggatcaaggatccgcaccccacacctagacgcgctcgcagctgggggagtccttctcgataactattacacgcaacctctgtgcaccccctctagaagccagttgctaacgggacggtaccagatccggaccggccttcagcaccagattatttggccatgccagcctagctgtgtgcccctggatgagaagctcctgccacagctcctgaaggaagcaggatacaccacacacatggtcgggaaatggcacctgggcatgtaccggaaggagtgcctgcctaccaggcgtggctttgacacgtatttcggttacctgttggggtcggaagactactatagccatgaacgatgcacactgatagatgccctgaacgtgacacggtgtgccttggactttcgtgacggtgaggaggttgcaacggggtacaagaatatgtactccaccaacatctttacgaaaagagccattgctctcatcaccaaccatccaccggaaaaaccactcttcctgtacctggcactacagtccgtccatgaacctttgcaggtccctgaggagtatcttaagccatatgacttcatccaggataagaaccggcatcattacgcgggcatggtgtcccttatggacgaggctgtggggaacgtgacagctgctttgaagtcatctggtctgtggaataataccgtgttcatctttagtacggacaatggcggacagaccctggcagggggtaacaactggcctctgagaggtcgaaagtggtccttatgggaaggaggagttaggggagtaggatttgttgcttctcccctcctcaagcagaagggtgtgaagaatcgcgaactcatccacataagcgattggctgcctaccctggttaagttggctcgcggtcatactaacggaaccaaacctctggacgggttcgacgtttggaagacaatttcagagggctccccgagtccacggatcgagctgctgcataacatcgatcctaacttcgtggatagctctccttgccctaggaattccatggcgccggctaaggatgattcttctttacctgagtactctgcgtttaacaccagcgttcatgccgcgatccgccatggcaattggaaattgctgaccgggtacccaggctgtggatactggttccctcctcccagccagtataacgtgtccgagataccatccagcgatcccccgacaaaaacattgtggctgtttgatatagatagggatcccgaggagcgacatgatctgtccagagagtacccccatatcgtaaccaaactactgtcgagactgcagttctaccacaagcacagcgttcccgtatacttccctgcccaagacccacgatgcgatccaaaagcaaccggagtgtggggaccttggatg

SEQ ID NO: 557 - DNA, 1599 bp, Artificial Sequence
  derived and/or modified sequence
atgggcccaaggggagcagcatcactccctagaggtcccggaccacggcggctcctccttcctgtggtcttgccactgttgctgctcctgctgcttgcacctcctgggtcgggggccggtgcgtcaagaccccctcatttggtgttccttctggcggatgacttgggttggaacgacgtgggctttcatggctcgcgaattaggaccccacatttggacgcactcgcagcgggtggtgtcctcctggataactattacactcaaccactttgtaccccgagccgctcccaacttcttactggacggtaccaaatccgcaccggactccagcaccagatcatttggccatgccagccttcgtgtgtgccactggatgagaagctgctcccgcagctgctgaaggaggcaggatacaccacccacatggtgggaaagtggcatcttggtatgtacagaaaggaatgccttcctactaggagaggatttgatacctacttcggttaccttctcggttcggaagattactactcccatgagagatgcactctgattgacgcactgaacgtgacgcgatgtgcgcttgactttcgagacggcgaagaggttgccactggatacaagaacatgtacagtacgaatatctttaccaagcgtgcaatcgcactcattactaaccacccgcccgagaagccactttttctctacctggccctgcaaagcgtgcatgaaccactgcaagtgcctgaggaatacctgaaaccatacgatttcatccaagacaagaaccggcatcactacgcaggaatggtgagtctgatggacgaagccgttgggaatgtcaccgcagcacttaagtccagcggactttggaacaatactgtgtttatcttctccaccgacaacgggggtcagaccctcgcaggagggaacaattggcctctgcggggaagaaagtggtcgctctgggaaggaggggttcgcggagtgggtttcgtggcaagcccgcttcttaaacaaaagggtgtgaaaaatcgcgaactcatccatattagcgattggcttcccactcttgtcaaactggcacggggacataccaacggtacgaagccactcgatggtttcgatgtttggaaaacgatctcggaaggctccccctcgccgcggatcgagcttctccataacatcgacccgaattttgtggatagcagcccgtgtcctagaaactcaatggcgccagcgaaggatgattcatcccttcccgaatattccgccttcaatacgtccgtccacgcagcaattaggcatggaaactggaagctgcttaccggttatccgggatgcggatactggttccccccgccgtctcaatacaacgtgagcgagatcccatcatcagatcctcctactaagaccctgtggctttttgacatagatcgggaccctgaagaacggcatgacctgtcccgcgaatacccccatatcgtcaccaagctgctgtccaggctgcagttttaccacaaacatagcgtgcctgtctactttccagcgcaggatcccaggtgtgatcctaaagccaccggggtgtgggggccatggatg

SEQ ID NO: 558 - DNA, 1599 bp, Artificial Sequence
  derived and/or modified sequence
atgggtcctaggggagcagcaagtcttcctagaggtccaggcccgcgccgcttgttgctgccggtagtgctgccattgctgctgctcttgttgttggcaccccctggttccggtgctggcgcttcccgcccgccccacttggtgttcctgcttgccgacgacctcggctggaacgacgtaggttttcacggttcccgcatacgcaccccgcatctggacgctcttgcggccggcggcgtccttctggacaactactacactcagccactctgtaccccgagtagaagtcagctgctgaccggccgctatcaaattcgcactggcctgcagcaccaaatcatctggccatgtcaaccgtcttgtgtcccactggacgagaagctgcttcctcagctgttgaaggaagcgggatacaccacccatatggtaggtaagtggcatctgggaatgtatagaaaagagtgtctcccaacgagaaggggttttgacacttattttggctaccttctcggcagtgaggattactacagccacgagaggtgcacgctcattgatgcgctcaacgtgactaggtgtgcgctggatttccgcgacggcgaagaagtggccactggttacaagaatatgtattctacaaacatatttacaaaaagggcaattgccctgattacgaaccaccctcctgaaaagcccttgttcctctatctggctcttcagagcgtccacgaaccactgcaggtccctgaggagtatttgaagccctatgacttcatccaagacaaaaacagacaccactatgccggcatggtgtcccttatggacgaagcagtgggtaacgtcacggcggccctgaagagctctggtctgtggaacaacacagtcttcattttcagcactgacaacggaggccagaccttggcaggtggaaataactggcctctgagaggtcgcaaatggagtttgtgggagggtggcgtacgcggagtgggtttcgtcgcctcccccctgctgaagcagaagggtgtcaagaatagagagttgattcacataagtgattggttgcccaccctggtgaaactggcccgcggccacactaacggaaccaagcctctggatggcttcgacgtttggaaaacgatatcagagggtagccccagtccgcgcattgagctgctgcacaatattgacccgaactttgtagacagctccccctgtcccagaaattctatggcgcctgcaaaagatgattcctctctgcctgagtactccgcgttcaatacttcagtgcacgccgccattaggcatggaaactggaagttgctgaccggctacccaggatgcggatactggttccctccaccctcccagtataatgtatctgagatcccctccagcgacccgccaaccaaaactttgtggctctttgatattgacagagaccctgaagagcgccacgatctgagtagagagtacccacacatagtgactaaactgctgtcaagactccagttctaccataagcactccgtacccgtttactttcccgcgcaagacccacgctgcgaccctaaagctaccggtgtgtggggaccgtggatg

SEQ ID NO: 559 - DNA, 1599 bp, Artificial Sequence
  derived and/or modified sequence
atggggcctcggggagcagcaagtctgcctagggggcctggaccccggcgtctactgctccccgttgttctaccactgcttctgcttctgctcttagctccacctggaagtggtgctggcgcctctcgtccccctcacctagtcttcttattggccgacgaccttgggtggaatgacgtagggtttcatggaagtaggataagaaccccccacctggatgcattagccgcagggggcgtccttctcgacaactattacacccagcccctgtgtaccccatcacggagccagcttctgactggaaggtaccagattcgaaccggtctgcagcatcagatcatctggccctgccaaccatcttgcgtgccactggacgaaaaactcctgccgcagctcctgaaagaggcgggttacacaacacacatggttggaaagtggcatcttggcatgtatagaaaggagtgtctcccaacacgccggggatttgacacttacttcggttatctgctgggaagtgaggactactattcccacgaacggtgtacgctcatagacgccttgaacgtgacaagatgcgccttggacttccgagacggagaggaggtggccacaggttacaagaatatgtatagcacaaatatatttactaagcgggcaattgccctgataactaaccacccccccgaaaagccgctgtttctttatttggcgcttcagtccgtgcacgaaccgcttcaggtccccgaggaatacctaaagccttatgacttcattcaggataagaaccgacaccattatgctgggatggtgagtctgatggatgaagccgtcgggaatgttacggccgctttgaaatcctccggcctctggaataacacggtgttcattttctccaccgacaacggcgggcagacactcgctggaggcaataactggcctctaaggggccgtaagtggagtctttgggaggggggtgttaggggcgttggcttcgtggctagcccactcctaaaacagaagggggtaaagaatagagaattaattcacatctctgattggctccccactctggttaaacttgccaggggccacaccaacggcacaaagcctctggacggatttgatgtctggaagaccatcagtgagggcagtccttccccgcgcatcgaattgctgcataacattgatcccaactttgtagactcatccccctgcccccgcaatagtatggctccggcaaaagatgattcttcgctgccggaatattccgcttttaatacctctgttcatgctgccatccgccacgggaattggaaacttctgactggttatccaggatgtggctattggtttccccccccctcacagtacaacgtaagtgaaatcccttccagcgatccgcccactaagactttgtggctgttcgacattgaccgagatccagaagagcgccacgacctgagtagagaatacccacacatcgtcacaaaacttctgagccggctgcagttctaccacaaacactccgtgcccgtctacttccctgcacaagaccccaggtgcgaccccaaggccacaggcgtttggggaccatggatg

SEQ ID NO: 560 - DNA, 1599 bp, Artificial Sequence
  derived and/or modified sequence
atgggcccccgaggcgcagcaagcctgccccgcgggcctggaccccgccgactgctgctgcccgtagtcctgccactgctcctactcctattgctcgctccaccaggcagcggtgcgggggcttctagaccacctcacttagtctttctgctcgccgacgacctgggctggaatgatgtagggttccacggctctcgcatccggactccacaccttgatgcgcttgcagccggaggggtgctgctggataactactacacccagcccctgtgtacacccagcagatcccagttactcactggacggtatcaaatccgcactggtctgcagcaccaaatcatatggccttgccagccctcttgcgtacctctggacgagaagttgctaccccaactgttgaaagaagcagggtacacaactcacatggtaggcaagtggcatctaggaatgtatcggaaagagtgcctcccaacccgtcggggattcgacacatacttcggataccttctgggaagtgaagactactattcgcatgagcggtgcacactcatcgacgcattgaatgtgacaaggtgcgcgttagacttcagggatggtgaggaggtagcaacaggttacaagaatatgtattctaccaacatcttcaccaagcgagctatcgctctgattaccaaccaccctcccgagaagccattatttctttatctggcgctccagagcgtccatgagcccttgcaggttccggaggaatatctcaagccctatgacttcatccaggacaagaatagacaccattacgcaggtatggtatctctgatggacgaggccgtgggcaacgttacagccgcattgaaatcaagcgggctgtggaacaacaccgtcttcatattctctacggataacggcgggcagacactggcgggggggaataactggccactcagggggcggaagtggtccctttgggagggcggagttcggggtgtgggctttgtggctagccccctcctgaagcagaaaggcgttaagaaccgagagctcatccacatctctgattggctacccacattggtgaagctggctagaggccacaccaatgggactaagcccttggatggatttgatgtgtggaaaaccatctctgaagggtctccaagtccacggattgaactgctgcataatattgatcctaatttcgtcgactcttccccttgcccacgcaattcgatggcgccggctaaagacgacagttctctaccggagtacagtgcattcaacacttcagtccacgctgcaattcgtcatgggaattggaaactgctcactggatacccggggtgtgggtattggtttcctcccccctcccaatacaatgtgtcggaaatcccctcctccgatccgcccacgaagacactctggctgttcgacattgaccgggatcccgaggagaggcatgatctgagtcgcgaatatccccatatcgtaaccaagctcctgagccgcctgcagttctatcataaacatagcgtacctgtctattttcctgcacaggatcctagatgcgaccctaaggctaccggcgtgtgggggccatggatg

SEQ ID NO: 561 - DNA, 1599 bp, Artificial Sequence
  derived and/or modified sequence
atgggacccagaggagccgctagcctgcccagaggccccggaccccgcaggctgctgttgcctgtcgttctccccctgctgcttcttctgctcctggctccacccggtagcggtgctggagccagtcgtcctcctcacctggtgtttctgttggctgatgacttgggctggaacgacgttggcttccacggcagcaggattagaaccccccacctggatgcattggccgctggcggtgtcctgctggacaactattacacccagccactgtgtactcccagtcgcagccaacttctcaccggcagataccagattcgtaccggcctgcagcaccagatcatctggccatgccagccctcctgcgtccccctggacgaaaaactgttgccccagcttctgaaggaggctggctacacaactcatatggtgggaaagtggcatctgggaatgtaccgcaaagagtgcctgcctacccgccgcggtttcgatacatatttcggttacctcttgggttccgaggactactattcacatgaacgttgtacactgatcgatgctctcaatgttacccgttgcgctcttgactttcgcgacggcgaggaggtagctactggctataagaacatgtactctacaaatattttcaccaagagagccatcgctctcatcacaaaccacccccccgagaagccactgtttttgtaccttgccctccaatccgtgcacgagccccttcaggtgcccgaggagtatctcaaaccatacgatttcatccaggacaagaacagacaccattacgctggtatggtctctctgatggacgaggctgtgggtaacgtcactgccgccctgaagtccagtggattgtggaataatacagtattcatcttctctaccgataacggcggacagactcttgcaggtggtaacaactggcctctgcgcggtcgcaagtggtctctttgggaaggaggcgtcaggggagtgggatttgtagctagtcccttgctgaagcagaagggtgttaagaaccgcgaactcatccacatctctgattggcttcccacactggtcaagctcgctagaggacacaccaatggcaccaaaccactcgatggcttcgatgtctggaagaccatttctgagggatcaccttccccccgcatcgaattgctccacaacattgatcccaactttgttgattcttccccttgccctagaaactccatggctcctgctaaggacgatagttctctgcctgagtacagtgcctttaacaccagcgtccatgcagccatcaggcatggaaactggaaactcctgacaggctaccctggctgcggttactggtttccccccccatctcagtacaatgtctctgagatcccctccagcgatccacccaccaagaccctgtggctcttcgatattgacagggatcctgaggaaagacacgacctctccagagagtaccctcacatcgtgacaaagttgctctctcgtctccagttctaccacaagcattccgtaccagtttacttcccagctcaggatcctcgctgcgatccaaaagccactggagtctggggtccatggatg

SEQ ID NO: 562 - DNA, 1599 bp, Artificial Sequence
  derived and/or modified sequence
atgggccccagaggagctgcttcactccccagaggcccggggcctaggagactattactccctgttgtcctccctctcctcctcttgcttttgctggcccccccaggaagcggggctggagcctctcggccacctcacctagttttcctgcttgccgatgatctggggtggaacgacgtgggattccacgggtcacggatccgaacccctcatctggatgctttggctgccggcggcgtcttactcgataattactacactcagcctctgtgcacgccatccagaagccagctcctaactggccggtaccagattcgcactggcctgcaacaccagatcatttggccctgtcaaccctcctgtgttcctctggacgaaaaactgctcccgcagctgttaaaagaggctgggtacacaacccacatggtggggaagtggcatcttgggatgtaccgcaaagagtgcttgcccacacggagaggattcgacacctatttcgggtatctcttagggagcgaagactattacagccatgagcggtgcactctgatcgacgctcttaatgtgacccgatgtgccctcgatttccgagatggagaggaggtggctacagggtacaaaaatatgtacagtaccaatatctttactaagagggcgatcgccctgattaccaaccatccgcctgaaaaaccactatttctgtaccttgccctccaatccgttcatgaacccctgcaagtacccgaagagtacttgaagccttacgactttatacaagacaaaaacagacaccattacgccggcatggtttcgcttatggatgaagctgtgggcaatgttaccgccgctctaaagagtagtggactgtggaacaatactgtcttcattttcagtaccgacaacggaggacagacattggcgggcggtaataactggcccttgaggggtagaaagtggagtctgtgggaggggggagttagaggtgtcggattcgtagcaagtccactattgaaacagaagggggtgaagaatcgcgaactgattcatataagcgattggctccctacattggtaaagctggctcgcggccacacaaatggaactaaaccccttgatggcttcgacgtctggaagactattagtgaaggttcacccagcccgcgaattgagctgctccataacatcgacccaaatttcgtggattcttccccttgcccaaggaactcaatggcgcccgccaaggatgattccagcctgccggaatatagcgcatttaacacgtccgtccacgccgcgattcgccacggcaactggaaactgctgactgggtatcccggttgcgggtactggtttcctcctccttcccagtacaatgtttccgagataccctccagcgaccctcccaccaaaacactttggttgtttgacatcgatcgggatcccgaggagcgccatgacctgtcaagggagtatccccacattgtcactaagctgctcagcagacttcaattttaccataaacatagcgtaccagtttacttccctgcccaggaccccaggtgtgatcctaaggcaacgggcgtgtggggcccttggatg

SEQ ID NO: 563 - DNA, 1599 bp, Artificial Sequence
  derived and/or modified sequence
atgggtccgcgtggtgcggcgtcgttaccgcgtggtccgggtccgcgtcgattattactaccggttgttttaccgctattactactattattattagcgccgccgggttcgggtgcgggtgcgtcgcgtccgccgcatttagtatttctattagcggatgatttaggttggaatgatgtaggttttcatggttcgcgtatacgaacgccgcatttagatgcgctagcggcgggtggtgtattattagataattattatacgcaaccgttatgtacgccgtcgcgttcgcaactattaacgggtcgatatcaaatacgaacgggtttacaacatcaaataatatggccgtgtcaaccgtcgtgtgttccgttagatgaaaaattattaccgcaattattaaaagaagcgggttatacgacgcatatggtaggtaaatggcatctaggtatgtatcgaaaagaatgtctaccgacgcgtcgaggttttgatacgtattttggttatttactaggttcggaagattattattcgcatgaacgatgtacgctaatagatgcgttaaatgtaacgcgttgtgcgttagattttcgtgatggtgaagaagtagcgacgggttataaaaatatgtattcgacgaatatatttacgaaacgtgcgatagcgctaataacgaatcatccgccggaaaaaccgctatttttatatctagcgttacaatcggttcatgaaccgctacaagtaccggaagaatatttaaaaccgtatgattttatacaagataaaaatcgtcatcattatgcgggtatggtatcgttaatggatgaagcggtaggtaatgtaacggcggcgttaaaatcgtcgggtctatggaataatacggtatttatattttcgacggataatggtggtcaaacgctagcgggtggtaataattggccgctacgtggtcgtaaatggtcgttatgggaaggtggtgttcgtggtgtaggttttgtagcgtcgccgctactaaaacaaaaaggtgtaaaaaatcgtgaattaatacatatatcggattggctaccgacgctagttaaattagcgcgaggtcatacgaatggtacgaaaccgttagatggttttgatgtttggaaaacgatatcggaaggttcgccgtcgccgcgtatagaattattacataatatagatccgaattttgttgattcgtcgccgtgtccgcgaaattcgatggcgccggcgaaagatgattcgtcgttaccggaatattcggcgtttaatacgtcggtacatgcggcgatacgacatggtaattggaaattattaacgggttatccgggttgtggttattggtttccgccgccgtcgcaatataatgtatcggaaataccgtcgtcggatccgccgacgaaaacgctatggttatttgatatagatcgtgatccggaagaacgacatgatttatcgcgtgaatatccgcatatagttacgaaattattatcgcgactacaattttatcataaacattcggtaccggtatattttccggcgcaagatccgcgatgtgatccgaaagcgacgggtgtatggggtccgtggatg

SEQ ID NO: 564 - DNA, 1599 bp, Artificial Sequence
  derived and/or modified sequence
atgggcccgcgcggcgccgcctccctgccccgtggtcccgggccccgccgactgctgctgccggtggtcctgcccctgctgctgctcttactgcttgcccctcctggctccggcgccggcgcctctaggcctccccatctcgtgttcctgctggcggatgacctggggtggaacgacgtgggttttcacggctcgcggatacgaacgccccacctcgacgcgcttgccgcgggcggagtcctcctggataactactacacacagccactatgtactcccagccggagccaactgctgacaggacgataccagattagaacgggtctacaacaccagattatctggccctgtcagccatcttgcgtccccttggatgagaagctgctccctcagcttctcaaggaagccggatacaccacgcacatggtcggaaagtggcatctcggcatgtaccggaaggagtgcctcccgacgaggcgaggttttgatacgtacttcggatacctgctaggatccgaggattactactcgcacgagcggtgcacgctaatcgatgctctgaatgtgacccgctgcgcactggatttccgggatggtgaggaagtggcgaccggatacaagaatatgtactcaaccaacattttcaccaagcgggcaatagcactaatcactaatcatcctcctgaaaagccgctgtttctgtatttggcactgcagagcgtgcatgagcctttacaggtgccggaagagtacctcaagccgtatgatttcatccaggataagaaccggcaccattatgcaggaatggtctccctgatggacgaggccgtcggtaacgtcaccgccgcgttgaaatcgtcgggtttgtggaacaacacagtgtttattttctcaacggataacggcggccaaaccctggctggaggtaataactggcctctgagggggcgtaagtggagcctttgggagggaggcgtccgaggggtgggctttgtagcaagtcccctattgaagcagaagggagttaagaaccgcgagctgatccacatctcggattggctgccgaccttggttaagttggcaaggggccacaccaatggtacaaagcccctcgatggtttcgacgtatggaagacgatttcggagggcagcccaagccctaggattgagctgttgcacaacatcgatcctaactttgtcgattcgagtccctgcccccggaattcgatggctcccgctaaggacgattccagtcttcccgaatactcggcattcaacaccagtgtccacgccgctatccgccacggaaactggaaactgctgactggctatcccggctgcggttattggttcccgcctccctctcagtacaatgtctctgagattcccagctccgatccgcccactaaaaccttgtggttgtttgatattgatcgagatcccgaggagaggcatgatctcagccgcgagtacccgcatattgtgactaagctactgtcccgcctgcagttctaccacaagcattcggtgccagtctacttccctgcccaggacccgaggtgcgacccgaaggccacaggagtgtggggcccttggatg

SEQ ID NO: 565 - DNA, 1599 bp, Artificial Sequence
  derived and/or modified sequence
atgggcccgcggggagcggcgtctctcccgcgaggcccgggcccgcggcgcttgctgctgcctgtcgtgctcccgctcctccttctgctgcttctggcgccgccgggtagcggagcaggagcgtccagaccaccgcacttggtgttcctgctcgctgatgatctgggctggaacgatgtcgggtttcacggctcacggatccgcactccgcacctggacgctctggccgccggtggggtcctgctggataactactacactcaaccgctttgcaccccatcccgctcacaactcctcaccggaagataccaaatccggacgggactgcaacaccagatcatttggccgtgccagccttcatgcgtcccgctggacgaaaaacttctgccgcaactccttaaagaagccggatacaccactcacatggtgggcaagtggcacctcggcatgtaccgcaaggagtgcctccctacgcggcgcgggttcgacacctatttcggatacctgcttgggtcagaagattactactcccacgaacgttgcaccctgatcgatgccctcaatgtgacgcgttgcgccctggacttcagagacggggaagaggtggctactggatacaagaatatgtacagcactaatatctttaccaaaagagcgattgcgctgatcaccaatcatccgccggaaaagccactgtttctgtaccttgcactgcagtccgtgcacgaaccacttcaggtgccggaagagtatctcaagccgtacgatttcatccaagacaagaaccgccatcattatgctggaatggtgtccctgatggatgaggcggtgggaaacgttactgcagccctgaagtcgagcggactgtggaacaataccgtctttatcttcagcactgataacggtggacagacgttggccggcggcaacaattggccattgcgggggaggaagtggtccctctgggagggaggggtccgaggcgtgggcttcgtggcctcccccctgctgaagcagaagggtgtgaagaacagagaactgatccacatctcggactggttgcccaccctcgtcaagctggcgcgaggacataccaatggaaccaagccactggacggattcgacgtgtggaaaaccatctcagagggatcgccaagcccgaggattgagctcctccataacatcgaccctaactttgtggattcgtcaccttgcccgcgcaactcaatggcacccgctaaggatgactcaagcctcccagagtacagcgccttcaatacctcggtccacgccgcgatccgccacggtaactggaaactgctgacggggtacccaggttgtgggtattggtttcccccaccatctcagtacaacgtgtcggaaatcccttcctcagatcctcccaccaagaccctgtggctcttcgacatcgaccgtgaccccgaggaacgccatgacttgtcgcgcgaatacccacacattgtgaccaagctgctgtcgcgcctgcagttctatcacaaacattcggtgccagtttacttcccagcacaggacccacgctgcgacccgaaagctaccggagtgtggggtccttggatg

SEQ ID NO: 566 - DNA, 1599 bp, Artificial Sequence
  derived and/or modified sequence
atgggacccagaggagccgctagcctgccgcgcggccctggaccaaggcgtctgctgctcccagtggtgcttccgctgctgctcctgctgctgcttgcgccgccgggatccggtgcaggagcctcacgcccaccgcatcttgtttttctcctcgcagacgacctgggatggaacgatgtgggcttccacgggtcgcggatccggacccctcacctcgacgccctggccgccggaggagtgctcctggataactactacacccagccgctgtgtactccgtcaagatcccagctgctgactggccggtaccaaattaggaccggattgcagcatcaaatcatctggccgtgtcagccgtcgtgcgtgccgctggatgagaagctcttgccgcaacttctgaaagaggcaggatacactacccacatggtggggaagtggcatctcggcatgtaccgcaaagaatgcttgcccactagaaggggatttgacacctacttcggctatctgctcggttccgaggattactactcacacgagcggtgcacgttgattgatgctttgaatgtgactagatgcgcgctcgacttccgcgacggcgaagaggtggctactggatacaagaacatgtactcgaccaacattttcactaaacgcgcgatagcgctgatcacgaatcatccaccagaaaaaccacttttcctttacctggccctccaatccgtgcatgagccgctgcaggtgccagaagaatacctgaaaccctatgacttcatccaggataagaatcggcaccattacgccggaatggtgtccttgatggacgaggccgtcggtaatgtcactgcagcgctgaagtcatcggggctgtggaacaatactgtgttcatcttttcgactgacaatggaggacagaccctggccggaggtaacaactggccactccgcggaagaaagtggagcctctgggagggtggcgtgcggggtgtggggttcgtggcaagtccgttgctgaaacagaaaggagtcaagaatcgcgaactgatccatatctccgactggctgccgaccctggtgaagttggcccggggacacactaacggaaccaagcctctggacggatttgacgtgtggaaaacgatctcggagggatcgcctagcccgagaatcgaactgcttcataacatcgaccctaactttgtagactcgtccccctgcccgcgcaatagtatggcaccagccaaggatgactcatccctcccagaatactcagcgttcaacacttcggttcacgcagcgattcggcatggaaactggaagctcctcactggatacccgggttgcggctactggttccctccgccgtcccagtataacgtgtcggaaattccgagttcggacccaccgactaagactctgtggctgttcgacatcgaccgggacccagaagagcgccacgacttgagccgcgagtacccgcacatcgtgaccaagctgctgtctcggctccagttctatcacaagcactcagtgcctgtttacttcccggctcaggatccccgctgcgatccgaaggcgactggcgtctggggtccctggatg

SEQ ID NO: 567 - DNA, 1599 bp, Artificial Sequence
  derived and/or modified sequence
atggggccccggggagcggcgagcctgccaagaggcccaggacctcggcggctgctgcttccagtcgtgttgcctcttcttttgcttctccttcttgccccaccaggatcaggtgcaggtgcatcccgacctccgcacctcgtgtttcttctggcggatgatctcgggtggaatgacgtcggcttccacggctcgcgaatccggaccccccatctggatgcacttgcagcaggaggtgtcctgcttgataactactacacccaacctctgtgtactcctagtagatcccagcttctgactggcaggtaccaaatcagaaccggactgcaacaccaaatcatttggccctgtcagccgtcatgtgtgcctcttgacgagaaattgctgcctcaacttcttaaagaagccggctacactacgcatatggtggggaagtggcatctgggaatgtaccggaaggaatgcctgccgacccgtagaggttttgacacctactttggataccttttggggtcggaggactattactcgcatgaacgatgcaccctcatcgatgcacttaatgtgactagatgcgcacttgattttcgtgatggagaagaagtcgcaactggttacaagaacatgtacagcactaacattttcactaagcgagcaattgcccttattactaaccaccctcctgagaagccgcttttcctgtatcttgcgctgcagtccgtccatgagcctctccaagtgcctgaggagtaccttaaaccttacgactttatacaggacaagaaccgacatcattacgcaggtatggtgagccttatggatgaagcagtggggaatgtgactgcagcgctcaagtcaagcggcctttggaacaacacggtgttcatattctcgacggataatgggggccaaaccctggcaggggggaataactggccgctgagaggtagaaagtggtcgctttgggagggcggagtacggggtgtgggttttgtggcgtcacctttgctgaaacagaagggagtgaaaaaccgcgaacttatccatatttcagattggcttcccacgcttgttaagttggcacgcggccacaccaacgggacgaagccactggacggctttgatgtgtggaaaaccatctcggagggatccccttcgcccagaatagagcttctgcacaatattgaccctaactttgtcgattcatcgccctgtccgagaaacagcatggccccagcgaaggacgatagctcacttcctgaatactctgccttcaataccagcgtgcatgcagcaattaggcacggcaattggaagctgcttacgggttacccaggatgtggctactggttcccacctccttcgcaatacaacgtgtcagagattccaagcagcgatccgcctactaagaccctgtggctttttgatatcgaccgggacccagaagaacgccatgatctgtccagagaatacccacatattgtgactaagctcctttcgcggcttcagttttaccataagcattcagttccagtctacttccctgcacaggatccccgttgtgatccaaaggctaccggtgtgtggggaccctggatg

SEQ ID NO: 568 - DNA, 1599 bp, Artificial Sequence
  derived and/or modified sequence
atgggaccaaggggggcagcgtccctgccacgggggccggggccccgcagattactgctgcctgtggtgctacccctgctgctacttctgctgctggccccaccgggcagcggcgccggcgcaagtagacctccccacctagtgtttctgctagcagatgatctggggtggaacgacgtgggcttccacggctccagaatacgaaccccccacctggacgccctggctgcgggcggtgtgctcctagataactactacactcagcctctgtgcacaccttcccgaagccagctgctaacaggaagatatcagatacggaccgggctgcagcatcagatcatctggccttgccagccttcatgtgtacccttggacgagaaactcctgccgcagttgctgaaggaagcagggtacactacccacatggtaggaaagtggcacttggggatgtacaggaaggagtgcctgcctacaagacgggggtttgacacatatttcggctatttgttgggctctgaggactactattctcacgagcgctgcaccctcatcgacgccctgaacgtgaccagatgcgcccttgacttccgcgatggcgaagaagtggccacagggtataagaatatgtactccaccaatattttcacaaagcgggctatcgctctcattactaatcatccacctgaaaagccgctgtttctgtacctcgctctccagagcgtccatgagccactccaagtgcctgaagagtacctgaaaccatacgactttatacaggacaagaaccggcaccattacgcagggatggtttccctcatggacgaagccgtgggaaatgtgactgctgccttgaagtctagcggtctttggaacaacactgtcttcatcttctccacagataacggaggccaaaccctagctggaggtaacaactggcccctaagagggcgcaagtggtcattatgggaaggtggcgtgagaggagtcggttttgttgcaagccccctattaaaacagaaaggggtcaaaaatcgagaactgatccatatatcagattggcttcctaccctcgtcaaacttgcaagaggacatactaatggtacaaagccactggatggattcgacgtgtggaagacaatatctgagggctcaccctcaccaagaatcgagctgctccacaatattgatccaaacttcgtggatagttccccgtgcccacgtaattccatggcacctgccaaggacgatagtagtctcccagaatactccgcttttaacacctcggttcatgccgccatccggcatggaaattggaaacttctcaccggctaccccggatgtggctattggttcccaccccctagccagtacaacgtcagcgagattccttccagcgatcccccaacgaaaacactctggctcttcgacatcgatagagaccctgaggagaggcatgacctgagccgcgagtatcctcatatcgtaaccaagctgctcagtagactgcagttttaccacaaacactcagtgccagtatacttcccagctcaggatccccggtgcgaccccaaggccacgggtgtttggggtccatggatg

SEQ ID NO: 569 - DNA, 1599 bp, Artificial Sequence
  derived and/or modified sequence
atgggtccaaggggggccgcctcactgccgaggggcccaggccccagacgcctgctgctccctgtagtgctcccacttctgctgctgttactgctggcaccacccggctctggagccggtgcctcacgccctcctcacttggtgtttttgttggccgatgacttaggatggaacgacgtcgggtttcacggctcacggattaggaccccacacttggatgcactggctgcaggcggcgtgctgttagacaactattacacccagccgctttgcactcctagtcgctcacagctactgactgggcggtatcagattcggaccggtttacagcaccagattatctggccatgccagcctagctgtgttcctctggacgagaaactcctgccccaactgctcaaggaagctgggtacaccacacatatggttggaaagtggcatctcggtatgtaccgtaaagagtgtttgcccacacggcgagggttcgatacttacttcggatacctattgggctctgaggactattactcacacgagcgttgcaccctcatcgatgctttgaacgttactagatgtgccctcgacttccgggatggtgaggaggtcgccacaggctacaagaacatgtattcaaccaacatcttcaccaaaagagctatcgctttgattacaaaccacccccccgaaaagcccctgttcctttatttggctctgcagtctgtgcatgagccgctgcaggtgcctgaggaatatctgaagccttacgacttcatccaggacaagaataggcatcactacgcgggtatggtgtccctgatggacgaggcagtgggaaatgtgaccgcggcgctgaagtcaagtggcctttggaataatacggtgttcatcttcagcacagataacggtggccaaaccctggccgggggcaacaattggcccctcaggggacgcaagtggtccttatgggaggggggcgtgaggggggtgggctttgtggcctcccccctgcttaaacagaagggcgtcaagaaccgggagcttatacacatcagtgactggctcccaacattggtgaagttggcacgtggtcacacgaatggaactaaacccttggatggcttcgacgtgtggaaaacgatctccgagggaagtcccagtcccaggatcgagctgctccataatatcgaccccaactttgtagatagttccccgtgcccccgcaatagtatggcccccgctaaggatgattcatcactaccagagtactccgctttcaacaccagcgtccacgcggccatcaggcacggaaattggaaattgctgactggctatcccgggtgtggctactggtttccacctccatcacagtataatgtcagcgaaataccaagctccgatcctcccacaaagacactctggttgttcgatatcgacagggatccagaggaacggcatgacttaagtcgagagtatcctcacattgtcaccaaattgctttcccgccttcagttctatcataagcacagcgtgcccgtgtatttcccggctcaggatcctaggtgcgatccaaaagccacaggcgtatggggcccatggatg

SEQ ID NO: 570 - DNA, 1599 bp, Artificial Sequence
  derived and/or modified sequence
atgggtccccgcggggccgcaagcctccctcggggtcctggccctagacgtctgctgcttcctgtcgtgctgccactgctgctcctgctgctccttgcacccccaggaagcggtgcaggggcatccaggccgccccatttggtctttttgctggcagatgatctgggttggaacgatgtcggattccacgggtcccgcattcggaccccccatcttgatgcacttgcggccggaggcgtgcttctggacaattactacacccagccactgtgtactccctcgagaagccagcttctcacgggtcgataccagatccgaaccggtttgcagcatcagatcatctggccatgtcagccttcatgcgtgcctctggacgaaaagctgcttccccaacttcttaaagaggccggctacactactcatatggtcggtaagtggcatcttggcatgtaccgtaaagagtgccttccaactcgccggggctttgatacttacttcgggtaccttctcggttcagaggactactactcccatgagcgttgcactctgattgatgcacttaatgtcacccgttgtgccctggatttccgggatggtgaagaggtggccaccggatacaaaaacatgtattcgaccaacatcttcactaagcgcgcaattgccctgattactaatcacccaccagaaaagccactgtttctctacttggccctccaatcagtccatgaaccactgcaggttccggaagaatatcttaagccttacgactttatacaggataagaatagacatcactatgcaggaatggtgagcctgatggatgaagcagtcgggaatgtcaccgccgcattgaagagctcggggctctggaataacactgttttcattttcagtacggataacggaggacaaacgctggcaggcggaaacaactggcccctgcgcggccgtaagtggagcctgtgggagggaggcgtgcggggagtgggattcgtggcgtccccactgctgaagcagaagggagtgaagaaccgcgagctgattcacatttcggattggctgcccactctcgtcaagctcgcaaggggtcacaccaacggtaccaagccgctggatggatttgatgtgtggaaaaccataagcgagggaagcccttcgccccggatagaactgcttcataacattgatccaaactttgtggactcttccccctgtcctcgcaactccatggcccctgccaaggacgatagctccttgcctgaatactcagcctttaacacctccgtccatgccgcgatccggcatggtaactggaagctgcttaccggatacccaggttgtgggtactggttcccgccaccatcgcagtacaatgtgtcagaaattcctagctcagatcctccgaccaaaacgctgtggctctttgatattgacagggatccggaagagcgacatgacctgtccagggaataccctcatattgtcacgaaactcctctcacgcctccaattctatcacaaacactcggttccggtctacttccctgcacaagatcctagatgtgatccaaaagccactggagtctggggaccttggatg

SEQ ID NO: 571 - DNA, 1599 bp, Artificial Sequence
  derived and/or modified sequence
atgggacctagaggagcagcctcactgccccgcggaccggggccacgcagattgctgctcccagtcgtcctgccattgctccttttgttgctgctggctcctccgggatccggtgccggagctagccgaccgcctcatttggtgttcctgctggccgacgatctcggatggaatgacgtggggttccacggaagcagaatcagaacgccgcacctggacgccctggccgccggaggggtgctgctggacaactactacacccaacctctgtgcaccccctctcgatcccaactcctgaccggccggtaccaaatccggactggactccagcaccaaatcatctggccgtgtcaaccgtcttgtgtgccactggacgaaaagctgttgccccagctgctgaaggaagctgggtacactactcacatggttggaaagtggcacctgggaatgtacagaaaggagtgcctgccgacccggagggggtttgatacctactttggatatcttctggggagcgaggactattactcgcatgaacggtgcaccctgatcgatgcgctgaacgtgacccgatgcgcacttgacttcagagatggagaggaagtggcgactggatacaagaatatgtactcaaccaacatctttactaagcgggctatcgccttgatcaccaaccatccgcccgaaaagccgctcttcctgtacctggccctccaaagcgtgcacgaaccgctgcaggtgccggaggagtacctgaagccgtacgacttcatccaggacaagaaccgccatcactacgccgggatggttagcctgatggacgaagccgtcggcaacgtgaccgccgccctgaagtcgtccggactctggaataacaccgtctttatcttttcaactgacaatgggggacaaacccttgctggcggcaataactggcctctcaggggccggaagtggtcgctctgggagggtggagtacgcggggtgggattcgtggcgtccccgttgctcaaacagaagggcgttaagaaccgcgaactcatccacatctcggattggctgccgaccctggtgaagctggcacgcggccacactaatggaaccaagcccttggacggattcgacgtgtggaaaactatttcggagggatcgccatctccacgcattgagttgctccataacatagacccgaacttcgtggacagctcgccatgtccgcgcaattcgatggcgccagccaaagatgactcctcactccccgagtactccgcgttcaatacttcagtgcacgccgcgatccgccatggcaactggaaactgttgaccggctacccaggatgcggttactggttcccgccgccctcccagtataatgtgtcggaaatcccatcgtccgatccaccgaccaagacgttgtggctcttcgatatcgaccgcgaccctgaggaaagacacgacttgtcccgcgaatacccgcacattgtgacgaagctcctctcccgcctgcaattctatcacaagcactccgtgccggtgtacttcccagcccaggatccgagatgcgatcctaaggcgacgggagtgtgggggccatggatg

SEQ ID NO: 572 - DNA, 1599 bp, Artificial Sequence
  derived and/or modified sequence
atgggcccacggggggctgcctctctgccccgaggacctgggcccagacggctcctgttgccagtggtgttgcctctactgctcctcttactgttggcccctcccggatctggggctggggcctcccgaccccctcatctcgtgtttttgctggctgatgacttgggttggaacgacgtaggctttcatggaagccgaattcgaacacctcacttggacgcattggcagctggaggcgttttgctggataattattacacacagcctctttgcactccctccaggtcacagctcctcaccggacgatatcagatcaggaccggcctgcaacatcagatcatatggccttgccagccatcctgtgtcccgcttgatgagaagctgctgccgcagcttctgaaggaagctggatatactacacacatggtagggaaatggcatctcggaatgtatcgcaaagagtgtcttccgactagacggggtttcgacacttactttggatatcttctgggatcggaggattattacagtcatgagcggtgtacccttattgacgcactgaatgttactagatgcgccctggactttcgggacggcgaagaggttgccaccggctacaaaaacatgtactctacaaatatcttcacaaagcgcgccattgcgttaatcacgaaccacccacccgagaagcccctcttcttatatctggccctgcagtccgttcatgaacctcttcaggtgcccgaggaatacctgaaaccctatgactttattcaggataagaaccggcaccattatgccgggatggtgtccctgatggacgaagcagtggggaacgtgacagccgccctgaagtcctcaggcctgtggaacaacacagtatttatcttttctactgataacggcggacagacactggctggaggcaacaattggccactcagggggcgcaaatggtccctgtgggagggcggcgtgagaggtgtaggctttgttgccagccccctccttaagcagaaaggggtcaaaaatcgggaactcattcacatcagcgactggctgccaacacttgttaaactggccagaggccatacgaacggcacaaaaccgcttgatggattcgatgtctggaagacaatctccgagggctcaccgtcaccacggatcgaactcctccataatattgaccccaatttcgtggattccagcccttgcccgcgcaacagcatggctccagccaaagacgactccagcctgcccgaatattcagcttttaatacctccgttcacgccgccataagacatggtaactggaagctcctgaccggctaccctggctgtgggtattggtttccccccccttctcaatacaatgtgtctgagatcccttcctcagacccacctacaaagacactgtggttgttcgacattgatcgagacccagaggagcgtcacgacctgtctcgggagtatccgcatattgttacaaagttgctctctcgtctccaattttaccacaagcactcagtgcccgtctattttccggcccaagaccctaggtgtgatcccaaggccaccggcgtgtggggcccctggatg

SEQ ID NO: 573 - DNA, 1599 bp, Artificial Sequence
  derived and/or modified sequence
atgggcccaaggggagccgctagccttccaagaggtcctggacctagacgcctgctcctgcctgtcgtgttgccattgctgcttctgctcctcctggcccctccgggctccggagccggggccagccggccaccacacctcgtattcctgttggcggatgacctgggatggaatgatgtgggctttcacggaagcagaatcagaacccctcatctggacgccctcgcggcagggggcgttttgcttgataactattacacccaaccactgtgcactccgagccggtcccagctcctgacagggcgctaccagatcaggaccggcctgcaacatcagatcatctggccttgtcaaccatcctgcgtgcctctcgatgaaaaactgctcccacagcttttgaaggaggccggatataccacgcacatggtgggaaagtggcacctgggcatgtatcgaaaagagtgtttgcccactagaagaggttttgatacctattttggctatcttttgggcagcgaagactattattctcatgaacggtgcactttgattgatgccctcaatgtcactagatgcgctctcgactttcgcgacggtgaggaggtggcaacgggttacaaaaacatgtactcaacaaacatctttactaagagggcgatagctctcattactaaccacccacccgagaaacctctgtttttgtacctcgctttgcagtctgtgcacgaaccattgcaggttccagaggagtacctcaaaccttacgacttcatccaggataagaacaggcaccattatgcaggcatggtgtctctgatggatgaggctgtaggcaatgttactgcagcactgaagagttctggcctctggaacaatacagtgttcatattttccactgataatggcggccaaaccttagcgggaggcaacaactggccactgagaggccgaaaatggtccctttgggaggggggtgtgagaggagtgggattcgttgcgagccctttgctgaagcaaaaaggtgtcaagaacagagagcttattcatatcagcgactggttgccaacactggtgaagttggctagaggacacacaaacggaaccaaaccgctggatggcttcgacgtttggaaaaccatcagcgagggcagtcccagccctcgcattgagcttctgcataatatcgatcccaactttgtggatagttcgccctgtccccgtaacagcatggctccggccaaggatgactccagcctgcccgagtacagtgcttttaacacctccgtgcatgcagccataaggcatggaaactggaagctcttgacaggttatcctggctgcgggtattggttcccccctccgtctcagtacaacgtatcagaaataccgtctagtgaccctcccacaaagactctgtggttatttgatatcgatcgcgatcccgaggaacgacacgatttgtcgagagaatatccacacatcgtgaccaaattgctgtcacgtctgcaattttatcataaacattccgttccagtttactttcccgcccaagacccacgttgcgaccctaaggctacaggagtatggggaccctggatg

SEQ ID NO: 574 - DNA, 1599 bp, Artificial Sequence
  derived and/or modified sequence
atgggaccaagaggagccgcttctctccccagaggccctgggccaaggaggctccttctgcctgtggtcctgccattgctccttttgttgctccttgccccccccggcagtggggcgggagccagcagaccccctcatcttgtattcctgctcgccgacgatctggggtggaatgatgtgggcttccatggaagtagaataagaaccccccacctggacgctctagccgctggcggtgtgttgcttgataattactacacacaaccactatgtaccccctccaggtcccagctgcttactgggcgatatcagatacgtactggcctgcagcatcagatcatttggccttgccagccttcttgcgtaccactggacgagaaactgttgccacaacttttaaaggaagctgggtacaccacccacatggtcgggaagtggcatctgggtatgtatcgaaaagaatgtttgcctactcgaagagggtttgatacgtatttcgggtacttactcggatccgaggactactactcacatgagcggtgtacgcttatcgacgcactcaacgtgactaggtgcgctttagattttcgtgacggtgaggaggtcgcaaccggttacaaaaacatgtatagcacgaatatcttcacgaagcgggcgatcgctttgatcacaaaccacccccctgagaagccgctttttctgtacctggctttgcagagcgtgcacgagcccctccaggtgccagaagagtatcttaagccttacgattttatccaggacaagaataggcaccactatgcaggaatggtgtccttgatggatgaggccgtggggaacgttaccgctgccctcaaaagctccggattatggaacaatacagtcttcattttttctacagataacggaggccaaacactcgccggtggcaataattggcctctgagagggcggaaatggtcattatgggagggaggtgtccgtggcgttggatttgtcgcctctccgctgctcaagcagaagggtgtgaagaatcgggagctaatccatatttcagactggttacccacgctggttaagctggctcgtggccataccaacgggaccaagccactagacggctttgatgtttggaagacaatctcagaaggctctcccagccctagaatcgagctcctgcataacatcgatcccaactttgtggactcatcaccctgtccccgcaatagcatggcgccagctaaagacgacagttctctgccagaatacagtgcctttaacacatctgtgcatgctgccatcagacatggcaattggaaactgctcactggctatccaggctgcggctattggtttccgccaccctcccagtataacgtgtctgagattccctcatcagatcctcccactaagacattgtggctgttcgacatcgaccgagacccagaggagcgacatgacctcagtagggaatatcctcacatcgtgacgaaactcttgagcaggttgcagttctatcataaacatagcgtgcctgtgtacttccctgcccaggacccccgatgcgatcctaaggctacaggagtgtgggggccttggatg

SEQ ID NO: 575 - DNA, 1599 bp, Artificial Sequence
  derived and/or modified sequence
atgggcccgcgcggcgcggcctcgctgccacggggacccggacctcgccgactcttgctcccagtggtgctgcctctccttttgctgctcctcttggcgccgccaggctcaggagccggcgcctcccgcccgccgcacctggtgttcctccttgccgacgatctgggctggaacgacgtcggctttcacggatcgcggatccgcactcctcacctcgacgctttggcggctggaggagtgctgctggacaactactatacccagcctctgtgtacgccctcacggtcccagcttttgaccggtcgctatcagatccggaccggattgcagcatcagattatttggccgtgccaaccaagctgcgtcccgctggacgagaagctgctgccgcagcttctgaaagaagccggatacaccacccacatggttgggaagtggcatttgggtatgtacagaaaggaatgcctgccgactagacggggatttgatacctacttcgggtatctcctggggtccgaggactactactcccatgagcgctgcacccttatcgatgctctgaacgtcaccagatgcgccctcgatttccgcgatggagaggaggtggccaccgggtacaagaacatgtactccactaatatcttcactaagcgcgctatcgcgctgattaccaaccatccaccggagaagccgctcttcttgtaccttgcactgcaatcagtgcacgagccgctccaagtgccagaagaatacctgaagccatacgacttcatccaggataagaataggcatcattacgcaggaatggtgagcctcatggacgaggccgtgggtaatgtgacggcagcactcaagagcagcgggctttggaacaacacggtgttcatcttcagcactgacaacggtgggcagaccctcgcaggaggaaacaattggcctctgcgcggacggaaatggtcactgtgggaaggaggagtgcggggtgtgggattcgtcgcttcgccgctcctgaagcagaagggagtgaagaaccgggagctgatccatatctcggactggctgccgaccctcgtgaaacttgcgagaggccataccaacggcactaaacctctggacggattcgatgtctggaagaccatctcggaagggtccccatcaccccgcatcgagcttttgcataacatcgacccgaacttcgtggactcatccccgtgtcctcggaactccatggcccctgctaaggacgatagctccctgccagagtacagtgccttcaacacctcggtgcacgctgctatccggcatggcaattggaagctcctgaccggttatcctggctgcggatactggttcccaccgccatcacagtacaacgtgtcagaaatcccgtcgtccgatcctcctactaaaacgctttggctcttcgacatcgaccgcgacccggaagaacggcacgatctgtcgcgggaatacccgcatatcgtgaccaagctgctgtctcgcctccagttttaccataagcactccgtgccggtctacttcccggcgcaagacccgcggtgcgatccaaaagcaactggagtgtggggaccctggatg

SEQ ID NO: 576 - DNA, 1599 bp, Artificial Sequence
  derived and/or modified sequence
atggggcctaggggggcggccagcctcccgcgcgggcctggaccacgcaggctgttgctcccagtagtgttgccactgcttttgttgttgttgctggcacccccagggtcaggggctggggcgagtcgcccgccccacctcgtgtttctcctcgcggacgatctagggtggaacgatgtggggtttcacgggagtaggatcaggaccccgcacttggacgctctggcagcaggtggagtccttctggacaattattacacacaacctctctgcaccccatcacgctcccaactgctgaccggtcgctaccagatccgcacgggcttgcagcaccagatcatttggccttgtcagccatcttgcgtgccactcgacgaaaagcttctcccccagttgctgaaggaagccgggtacactacgcatatggtgggaaaatggcacctgggtatgtacaggaaagaatgtttgcctacccgaagaggcttcgacacttactttggctacttattaggaagtgaagactactatagccacgaaagatgcactttgattgacgccctgaatgttacacggtgcgcactggatttccgcgacggagaggaggtcgcaacaggctataagaatatgtactctaccaacatctttacaaaacgcgcaattgcactcatcacaaaccaccctccggagaagcctctgttcctttatctggcacttcagtccgtccatgagccactccaggtgccagaagaatatctgaagccgtacgacttcatccaggataagaatcgacaccactacgctggtatggtctcgctcatggacgaagccgtcggaaacgtgacagccgctttgaaaagttcagggctgtggaataacacggtttttatcttttctaccgataatggaggccagacactcgctggtggcaacaattggcccctcagaggacgcaaatggagcctgtgggaaggcggtgttaggggcgttggtttcgtggcctcccccctgcttaagcaaaaaggggtgaagaatcgtgagctgattcatataagtgattggcttcccacactagttaaactggccagggggcataccaacgggactaagccacttgatggctttgatgtgtggaaaaccattagcgagggctccccgtccccgaggatagagctccttcacaatatagatcctaacttcgtggactcctccccatgccctcgcaatagtatggctcccgccaaggacgattcctctctgcccgagtattccgccttcaatacctcagttcacgccgcgatccgccatgggaattggaagttgctcaccggctaccccggctgtgggtactggttcccaccaccatcacagtataatgtgtccgagatcccttccagtgatccacctactaagaccctgtggctgttcgatatcgaccgggatccagaggagcggcacgatctttctagagaatatcctcacatcgtgaccaagctcttgtctcgtctccagttctaccacaagcacagtgttcctgtgtacttcccggcccaagatcctaggtgtgatccaaaggcgacaggcgtgtggggcccgtggatg

SEQ ID NO: 577 - DNA, 1599 bp, Artificial Sequence
  derived and/or modified sequence
atgggccctcgtggggctgcctctcttcctcgaggaccgggccccaggcgcttgctgctgcctgtggttctgcctctgctgcttctcctccttttagcaccacccggctccggagctggtgcctccaggccaccacatctggtttttttattggcagacgatctaggctggaacgacgtcggctttcacggcagtaggatacgaaccccacatctcgacgccttagctgctggtggagtgctgctggacaactactatactcagcccctctgcacacccagccgatctcaattgctcacaggccgttatcagataaggaccggcctgcagcaccagattatatggccctgccagccctcctgtgtcccacttgatgagaagttactgccccagctcctgaaggaggctggatatactactcacatggtgggcaagtggcatctaggcatgtatcggaaggagtgcctgccaacgcgccgagggttcgatacatacttcggttaccttcttgggtccgaggactattattctcacgagcgatgcactctgattgatgccttgaatgtcacacgatgcgcgcttgacttccgggacggcgaggaggttgccaccgggtacaagaatatgtattccaccaacatctttacgaaaagagcaatcgcccttatcaccaaccatccgcctgagaaacccctattcctttacctggccttacagtcagtgcatgaaccacttcaagtacccgaagagtatctgaagccttacgactttatacaggacaaaaaccgacatcactatgcaggtatggtcagtctgatggatgaggcagtggggaatgtgacagccgctcttaagtccagcgggctctggaataatacggtgttcatattctctaccgacaacggaggccagaccctcgccgggggcaacaactggccccttcgcggcagaaagtggtctctgtgggaggggggggtgcggggtgtcggattcgtcgcgtcccctctccttaaacaaaaaggcgttaagaatcgggaactcattcacatctccgactggctcccgactctggtgaaactggcccggggccatacaaatgggaccaagccgctcgacgggttcgacgtatggaaaaccatctctgaggggagtcctagtccacggattgaattactgcataacattgatcccaactttgtagatagcagtccttgcccaagaaactccatggcccccgccaaagatgatagttcgctacctgagtacagtgcattcaacacttccgttcatgccgccatccgacatgggaattggaaacttttgacagggtacccaggttgcggctattggtttcctccaccatctcagtataacgtttctgagattcccagctcagacccaccaaccaaaacactatggctgttcgacattgacagggatccagaggagcggcatgatctgtctcgcgagtatccccatatcgtgacgaagctgctcagcagattacaattttatcacaagcactcagtcccagtttacttcccagcccaagatccccggtgcgatcccaaagcaaccggcgtctgggggccatggatg

SEQ ID NO: 578 - DNA, 1599 bp, Artificial Sequence
  derived and/or modified sequence
atgggccctcgaggagcagcgtcacttcctaggggtcctggtccccgacgtctgttgctgcctgtggtgctgccactgctgttgcttttgctgcttgcgcccccgggatcaggggcaggagcatcccggcccccacaccttgtgttccttctcgccgatgaccttggctggaacgatgtgggatttcacggttcgagaattaggactccccacctcgatgcacttgccgcaggaggagtgcttctggacaactattacactcaaccactgtgtacgccaagcagatcccaactccttaccggcagataccagattagaactgggcttcaacatcagattatctggccctgccagccttcgtgcgtgccgctggatgagaagctgctgcctcaactgttgaaggaagcagggtacacgactcatatggtgggaaagtggcatctgggaatgtatagaaaagaatgtctgcctactagacggggcttcgatacgtacttcggataccttctgggaagcgaggattactactcccatgaacggtgtactctgattgatgcactgaatgtgaccagatgcgctcttgattttcgggatggagaagaggtggccactggatacaagaacatgtactcgactaacattttcaccaagagagcaatagccctgattactaaccatccccctgaaaagccgctgtttctgtaccttgccctgcaatccgtgcacgagccgctgcaggtgccagaggagtatctgaaaccttacgacttcatccaggacaaaaaccgtcatcactacgcaggcatggtttcgctgatggatgaagccgtcggaaatgtgactgcagcactgaaaagctcgggcctctggaataacactgtgttcatattctcaaccgataatgggggccaaaccctggcaggaggtaacaattggccacttcgggggaggaagtggtcgctgtgggaagggggtgttagaggagtgggtttcgtggcatcgccattgctgaagcaaaagggcgtgaagaaccgcgagctgatccatatcagcgactggcttccaacgctggtgaagttggccagggggcataccaacggcacgaagcctttggacgggtttgatgtgtggaaaaccatctcggaaggttccccttctcctcggatcgagctgcttcataacatagaccctaactttgtggattcatcaccctgtccaagaaacagcatggcccctgcaaaagatgatagcagcctgccggagtacagcgcgttcaacacctctgtccatgcggccattcgccacggaaactggaagctgcttaccggatacccaggttgtggatactggtttcctccaccttcacaatacaacgtgtcagaaattccatcatcggatccgcctactaagactctctggctttttgatatcgatcgcgacccagaagagcgccatgatctgtcaagagaatacccccatattgtgacgaagctcctctcccggctgcagttctaccacaagcattccgtgcctgtgtactttcctgcacaggatccaagatgtgaccccaaggcaaccggagtgtggggaccatggatg

SEQ ID NO: 579 - RNA, 1745 nt, Artificial Sequence
  derived and/or modified sequence
gggaaauaagagagaaaagaagaguaagaagaaauauaagagccaccauggggccaagaggagcggcuucacucccgcgaggaccaggaccuaggcgauugcuucuccccgugguccuuccucugcugcuucuuuugcuucucgcgccaccugguucgggugcgggagccucaagaccgccccaccucguauuucugcucgccgaugaccucggguggaaugacguaggguuccacggaucgcgaauccgaacgccgcaucuugaugcauuggcagcagguggaguacuuuuggauaacuacuacacgcagccauuguguacacccucgaggagccaguugcugacuggccgcuaccagauccggaccggacuucagcaccagaucaucuggcccugucagccgucaugugucccccuugaugagaagcuuuugccucagcugcuuaaagaagcgggguauacgacacauaugguggggaaguggcaccucggaauguacagaaaagaaugccuucccaccagaaggggauucgauaccuacuucgguuaucugcuggggucagaggacuacuacucccacgaacgcugcacgcuuaucgaugcauugaacguaacccgcugcgcccucgacuuucgggauggagaggaagucgccacaggguauaagaacauguauucgacaaacaucuucacgaaaagggccauugcgcugauuacgaaucaucccccggaaaagccccucuuucucuacuuggcgcugcagagcgugcaugagccucugcaagugcccgaggaguaucuuaaacccuacgauuucauccaagacaagaaccggcaccacuacgcgggaauggugucguugauggaugaggcggucggaaaugugacagcggcuuugaagucgagcggacucuggaacaauacgguguucaucuuuucaacugauaaugggggacagacguuggcgggugguaauaacuggccccuuaggggaagaaaauggucgcugugggaagguggagugaggggugucggguuugucgcgagccccuugcugaaacaaaagggggucaagaaccgagaauugauucauaucagcgacuggcugccgacccucgucaagcuggcacgcgggcacacaaacgguacgaagccauuggacggguuugacguguggaaaacaaucuccgagggcucgccuucgccgaggauugaguugcuccacaacaucgaccccaacuuuguagacagcucaccgugcccccgaaauucgauggcgccugcuaaagaugauagcagccugccagaguacuccgcguucaacacuucagugcaugcagcaauucgccacggaaauuggaagcuucugacuggguauccugguuguggcuauugguucccaccgccgucgcaguauaauguaucggagauuccguccucggauccgccgacuaaaacauugugguuguucgacaucgaccgcgaccccgaagagcggcacgaccuuucgagggaauauccccauauugugacgaaguugcuuagccgguugcaguucuaccauaaacacagcguaccgguguauuuuccugcccaagauccucgcugcgaccccaaggccacgggagucuggggucccuggaugugauaagcugccuucugcggggcuugccuucuggccaugcccuucuucucucccuugcaccuguaccucuuggucuuugaauaaagccugaguaggaag

SEQ ID NO: 580 - RNA, 1602 nt, Artificial Sequence
  derived and/or modified sequence
auggggccaagaggagcagcaucucugccaagagggccuggaccucggcgucuuuugcuacccguggugcugccccuucuacuguugcugcugcuggcuccaccaggaucaggugcuggagcaucacgcccaccccaucuuguguuccuccuugcugaugaucuggguuggaacgaugucggauuucauggcucacgaauucgcacgccucaucuggacgccuuagcugcgggaggcgugcugcuggauaauuacuacacccagccucuaugcaccccuucucguucacaacugcugacuggacguuaccagaucaggacgggucuucagcaccagauuaucuggccuugucaaccaagcugcgugccacuggaugagaaauugcugccccaacuacucaaagaagcagguuauacaacccacauggugggaaaauggcaucugggcauguauagaaaggagugccuaccuaccaggaggggauuugauacauacuuugguuaucuccucgguucugaagauuacuauagccaugaacgaugcacacugaucgaugcguugaacgucacaaggugcgcucuugacuuuagggacggcgaggaaguagccacugguuauaaaaauauguacagcaccaacauuuucaccaagagggcuauugcacucauuacuaaucaucccccugagaaaccccucuuccucuauuuggcccuccaauccguccaugaacccuugcaaguccccgaggaauauuugaagcccuacgacuuuauacaggacaagaacagacaucacuaugccgguauggugagccugauggaugaagccgugggcaaugugaccgccgcucugaagucuucuggguuguggaauaacacaguguucauauuuucuaccgauaauggcggccagaccuuggccgggggaaauaauuggcccuugcgcggacgaaaauggucgcugugggagggcggcgugagaggaguuggguuuguagccucgccucugcugaagcagaaaggagucaaaaaccgugaacugauucacauuucagauugguuaccgacucucguaaaacucgcuagggggcacacaaauggaacaaaaccccucgacgguuucgauguauggaagacgaucagcgaagggucgccuuccccucguauagagcuccugcacaauaucgacccaaauuucgucgacuccagcccauguccccgaaacaguauggcuccagcaaaagaugacucuucccucccggaauauucggccuucaauacaagcguucaugcagcgauuagacauggaaauuggaaacuccucacuggauaucccggcugcgguuacugguucccacccccuagccaauacaauguguccgaaauccccucuagcgacccaccuacuaaaacauuguggcucuucgacaucgauagagacccugaggaaagacacgaccucucaagagaguacccgcauauugucacaaaauugcuuagccgacuccaguucuaucauaagcauuccgugcccguguacuucccugcccaggacccacggugcgacccuaaggcaacaggcgucugggggccguggauguag

SEQ ID NO: 581 - RNA, 1602 nt, Artificial Sequence
  derived and/or modified sequence
augggcccgcgcggcgcggcaucccucccccgggguccuggccccagaagauuacugcugccaguaguucuuccuuugcugcuucuguuacugcucgcccccccagggaguggggccggugcaucucgcccaccacauuuggucuuccuccuggcugaugaccugggcuggaacgacguggguuuucacggcagccgaaucagaacuccacacuuggaugcucuugccgcuggcgguguccucuuagauaauuacuauacucaaccgcucugcacaccaucaagaucccagcuccuaaccggacgguaccagauccgaacuggucugcagcaccagauuauuuggcccugucagccuuccugugugccacuggaugaaaagcugcucccacaguuauugaaagaagcaggcuacacaacucauauggucgggaaguggcaccucggcauguaucgcaaggaaugccuacccacgcggcgcggauucgacaccuacuucggcuaucucuuggggagcgaagacuauuacucccacgaacgcuguacccugaucgaugcccucaacgugacccgaugugccuuagacuuccgcgauggagaagagguugcuaccggcuacaaaaauauguacucuaccaauauuuucacuaaaagagcgaucgcccuuaucaccaaccacccaccugagaagccccucuuccuauaccuggcucugcaaagcguucacgaacccuugcaaguaccggaggaauaucugaaacccuacgauuuuauccaagacaagaacagacaccacuacgcagggauggugagucugauggaugaagcagucggcaacguaacagcugcccucaagaguuccggccuauggaacaauacgguguuuauuuucagcacagauaacgguggccagacacuugcuggcggcaauaacuggccacugaggggacggaaguggucccugugggaggggggggucaggggcguggguuucguggcaucuccccuucucaagcaaaagggagucaagaacagagaguuaauacacauuagugauuggcugccgacacuugugaagcuugcgagaggccauacuaacggcacuaagccucuggacggauuugacguguggaagacaaucucugaaggauccccaagcccgcgaaucgaacugcuacauaacauagacccuaacuuuguggacucuagccccugccccaggaacucaauggcgcccgccaaggacgacucuagucuuccagaauacucugccuucaacacgagcgugcacgcugcuaucagacacgggaauuggaaacuacucacaggguaucccggauguggguauugguucccaccuccaagucaauacaacgugagugaaauccccagcucugauccuccuacgaaaacccuguggcuauucgacaucgaccgugauccagaggaaagacacgaucugucucgagaauacccccauauuguaacaaagcuacucucaagacuacaguucuaucacaagcacucuguuccaguauauuuuccagcccaggaucccaggugugacccuaaggccacagguguaugggggccauggauguag

SEQ ID NO: 582 - RNA, 1602 nt, Artificial Sequence
  derived and/or modified sequence
auggggccaagaggugcugccagccugccccguggaccugguccuagaaggcuuuugcuuccagugguccugccgcuccugcuauugcuucuccuagcaccaccugggucuggagccggugcuaguagaccuccacaccugguuuuccucuuagcagacgacuugggcuggaacgacguaggcuuucaugguagucgaaucagaacgccacaccuugacgccuuggccgcaggaggggugcugcucgacaacuacuacacccaaccucuuugcacaccuaguaggucacagcugcucaccggucguuaccagaucagaacaggcuugcagcaccagauuauuuggccaugucagccguccugcguuccacuggacgagaaauuacugccccaacugcugaaggaggccggauacacgacucauauggugggaaaauggcauuuaggcauguaccgaaaggaaugucugcccacucgacgcggauucgacaccuauuucggauacuuguuaggcucagaagauuacuauagucaugaacgaugcacccuuauagaugcgcucaaugucacacguugcgcccuggacuucagagacggagaagaagucgccacaggauauaaaaauauguauagcacaaauaucuucaccaagcgcgccaucgcuuuaaucacaaaucaccccccagagaaaccccuuuuccuuuaccuggcccuucagucaguucaugagcccuugcaggucccugaagaguaccugaagcccuacgauuuuauucaggauaaaaauagacaccauuaugcuggaaugguguccuugauggaugaagcaguggguaacguuacugcagcgcucaaguccaguggucucuggaauaacacagucuucaucuuuagcacugauaacggaggacagacccucgccggagggaacaacuggccuuuaagagggagaaaguggucacugugggaagguggggugcgcggcguuggcuuuguagcuuccccccugcucaaacagaagggugugaaaaauagagaacuuauccauaucagcgacuggcucccaacacucguuaaacuugccaggggucacacuaauggaaccaagccccuggauggcuucgaugucuggaagacuauuuccgaaggaucgccuuccccgagaaucgaacugcugcacaauauagacccgaauuuuguggacagcagcccaugcccccgcaacucaauggcacccgcgaaagaugacuccagccuuccugaauacucagccuucaauacaucgguucaugcugccauucgacacggcaauuggaaauuguugacaggcuauccuggguguggcuacugguuucccccuccuucccaauacaauguguccgaaaucccuucuucagacccgccuacaaaaacuuuguggcuuuuugauaucgaucgagauccugaggagagacaugaucuguccagagaguacccgcauaucguuacuaaguugcucucaagauugcaguuuuaucacaagcauagcguaccaguuuauuuuccagcacaagaucccagaugcgaccccaaagcuacaggggugugggggccauggauguag

SEQ ID NO: 583 - RNA, 1602 nt, Artificial Sequence
  derived and/or modified sequence
augggcccccggggcgccgccucucucccacggggucccggaccaaggcgacuccuccugccagucguucucccguugcucuuacuccuauuacuggcaccaccuggaagcggcgccggcgcaucccgcccaccccaucuggucuuuuuauuggcagacgaccugggauggaacgacgucggguuucacggcucuagaauucggacaccucauuuagaugcucuagccgcaggcgguguucuacucgauaauuacuauacccagccacuaugcacgccaucuagaucucaguuguugaccggaagauaucaaaucagaacuggacuacagcaccaaauuaucuggcccugccagccauccugcguaccuuuggacgaaaagcuguuaccccaacugcucaaagaggccggcuauaccacucacaugguggggaaguggcaucucggaauguaucgcaaagaaugucuacccacgagacgcgguuucgacacuuauuuuggguaccuuuuaggcagugaagacuauuacucucacgaaagaugcacacuuaucgaugcucugaauguuacaaggugugcucuagacuuccgggacggugaggagguugcuaccggcuacaaaaauauguacucuaccaauauuuucacuaaaagagcgaucgcccuuaucaccaaccacccaccugagaagccccucuuccuauaccuggcucugcaaagcguucacgaacccuugcaaguaccggaggaauaucugaaacccuacgauuuuauccaagacaagaacagacaccacuacgcagggauggugagucugauggaugaagcagucggcaacguaacagcugcccucaagaguuccggccuauggaacaauacgguguuuauuuucagcacagauaacggcggacagacgcuggcagguggcaauaauuggccgcugaggggccgcaaauggagcuugugggagggaggaguccgggggguggguuuuguugcaucuccacuguugaagcagaaaggcguaaaaaaccgcgaauuaauucauaucucugauuggcugccaacucucguuaaauuggcuaggggacauacaaaugggaccaaaccauuagauggguuugauguuuggaaaacaauaagcgagggcagcccaucucccagaaucgaacugcugcauaauauagaucccaacuuuguggauuccucacccugcccacguaacuccauggcuccagcaaaggaugauuccucccuccccgaauauuccgccuuuaacacaaguguacaugcagccauccgccaugggaauuggaagcuucugacggguuauccugggugcggguauugguucccuccucccucacaguauaacguauccgaaaucccaagcagcgauccccccaccaagacuuugugguuauuugauauugacagagaucccgaggagaggcacgauuuaucccgcgaguauccccacaucgugacgaaacuacuuaguagauugcaguuuuaucauaaacacaguguacccgucuacuuucccgcccaggacccaagaugcgacccaaaagcgacgggcguuuggggcccauggauguag

SEQ ID NO: 584 - protein, 464 aa, Artificial Sequence
  derived and/or modified sequence
MASESGKLWGGRFVGAVDPIMEKFNASIAYDRHLWEVDVQGSKAYSRGLEKAGLLTKAEMDQILHGLDKVAEEWAQGTFKLNSNDEDIHTANERRLKELIGATAGKLHTGRSRNDQVVTDLRLWMRQTCSTLSGLLWELIRTMVDRAEAERDVLFPGYTHLQRAQPIRWSHWILSHAVALTRDSERLLEVRKRINVLPLGSGAIAGNPLGVDRELLRAELNFGAITLNSMDATSERDFVAEFLFWASLCMTHLSRMAEDLILYCTKEFSFVQLSDAYSTGSSLMPQKKNPDSLELIRSKAGRVFGRCAGLLMTLKGLPSTYNKDLQEDKEAVFEVSDTMSAVLQVATGVISTLQIHQENMGQALSPDMLATDLAYYLVRKGMPFRQAHEASGKAVFMAETKGVALNQLSLQELQTISPLFSGDVICVWDYGHSVEQYGALGGTARSSVDWQIRQVRALLQAQQA

SEQ ID NO: 585 - DNA, 1395 bp, Artificial Sequence
  derived and/or modified sequence
atggccagcgagagcggcaagctgtggggcggcagattcgtgggcgccgtggaccccatcatggagaagttcaacgccagcatcgcctacgacagacacctgtgggaggtggacgtgcagggcagcaaggcctacagcagaggcctggagaaggccggcctgctgaccaaggccgagatggaccagatcctgcacggcctggacaaggtggccgaggagtgggcccagggcaccttcaagctgaacagcaacgacgaggacatccacaccgccaacgagagaagactgaaggagctgatcggcgccaccgccggcaagctgcacaccggcagaagcagaaacgaccaggtggtgaccgacctgagactgtggatgagacagacctgcagcaccctgagcggcctgctgtgggagctgatcagaaccatggtggacagagccgaggccgagagagacgtgctgttccccggctacacccacctgcagagagcccagcccatcagatggagccactggatcctgagccacgccgtggccctgaccagagacagcgagagactgctggaggtgagaaagagaatcaacgtgctgcccctgggcagcggcgccatcgccggcaaccccctgggcgtggacagagagctgctgagagccgagctgaacttcggcgccatcaccctgaacagcatggacgccaccagcgagagagacttcgtggccgagttcctgttctgggccagcctgtgcatgacccacctgagcagaatggccgaggacctgatcctgtactgcaccaaggagttcagcttcgtgcagctgagcgacgcctacagcaccggcagcagcctgatgccccagaagaagaaccccgacagcctggagctgatcagaagcaaggccggcagagtgttcggcagatgcgccggcctgctgatgaccctgaagggcctgcccagcacctacaacaaggacctgcaggaggacaaggaggccgtgttcgaggtgagcgacaccatgagcgccgtgctgcaggtggccaccggcgtgatcagcaccctgcagatccaccaggagaacatgggccaggccctgagccccgacatgctggccaccgacctggcctactacctggtgagaaagggcatgcccttcagacaggcccacgaggccagcggcaaggccgtgttcatggccgagaccaagggcgtggccctgaaccagctgagcctgcaggagctgcagaccatcagccccctgttcagcggcgacgtgatctgcgtgtgggactacggccacagcgtggagcagtacggcgccctgggcggcaccgccagaagcagcgtggactggcagatcagacaggtgagagccctgctgcaggcccagcaggcctag

SEQ ID NO: 586 - DNA, 2143 bp, Artificial Sequence
  derived and/or modified sequence
ccggccagaaaagccctggccagtggcgggcgcgacactatccgtgcggccaggcggagacccggaggaccgaagcttccggacgacgaggaaccgcccaacatggcctcggagagtgggaagctttggggtggccggtttgtgggtgcagtggaccccatcatggagaagttcaacgcgtccattgcctacgaccggcacctttgggaggtggatgttcaaggcagcaaagcctacagcaggggcctggagaaggcagggctcctcaccaaggccgagatggaccagatactccatggcctagacaaggtggctgaggagtgggcccagggcaccttcaaactgaactccaatgatgaggacatccacacagccaatgagcgccgcctgaaggagctcattggtgcaacggcagggaagctgcacacgggacggagccggaatgaccaggtggtcacagacctcaggctgtggatgcggcagacctgctccacgctctcgggcctcctctgggagctcattaggaccatggtggatcgggcagaggcggaacgtgatgttctcttcccggggtacacccatttgcagagggcccagcccatccgctggagccactggattctgagccacgccgtggcactgacccgagactctgagcggctgctggaggtgcggaagcggatcaatgtcctgcccctggggagtggggccattgcaggcaatcccctgggtgtggaccgagagctgctccgagcagaactcaactttggggccatcactctcaacagcatggatgccactagtgagcgggactttgtggccgagttcctgttctgggcttcgctgtgcatgacccatctcagcaggatggccgaggacctcatcctctactgcaccaaggaattcagcttcgtgcagctctcagatgcctacagcacgggaagcagcctgatgccccagaagaaaaaccccgacagtttggagctgatccggagcaaggctgggcgtgtgtttgggcggtgtgccgggctcctgatgaccctcaagggacttcccagcacctacaacaaagacttacaggaggacaaggaagctgtgtttgaagtgtcagacactatgagtgccgtgctccaggtggccactggcgtcatctctacgctgcagattcaccaagagaacatgggacaggctctcagccccgacatgctggccactgaccttgcctattacctggtccgcaaagggatgccattccgccaggcccacgaggcctccgggaaagctgtgttcatggccgagaccaagggggtcgccctcaaccagctgtcactgcaggagctgcagaccatcagccccctgttctcgggcgacgtgatctgcgtgtgggactacgggcacagtgtggagcagtatggtgccctgggcggcactgcgcgctccagcgtcgactggcagatccgccaggtgcgggcgctactgcaggcacagcaggcctaggtcctcccacacctgccccctaataaagtgggcgcgagaggaggctgctgtgtgtttcctgccccagcctggctccctcgttgctgggctttcggggctggccagtggggacagtcagggactggagaggcagggcagggtggcctgtaatcccagcactttggaagggcaaggtgcgaggatgcttgaggccaggagtttgacacagcctgggcaacacagggagacccccatctctactcaataataaaacaaatagcctggcgtggtggcccatgcatatagtcccagctacttgtaaggctgaggtgagaggacacttgtgcccaggagtggaggctgcagtgagctatgatcacgccactgcattccagcctggataacagagtgagaacctatctctaaaaataaataaataaacgaaaaataaatggaagcggagaaaactgggcaagggcaatgagagtcgtagacgggaagggaagagggggctcccatcatagcctctgctctgtccaggccccatccccttcagacagggtatcacagtgacctcctaggccaggagcgatggctcacgcctgtaatcctagcattttgggaggcctgggcaacaggaagactccaactaccatattaaaaaaaa

SEQ ID NO: 587 - DNA, 1622 bp, Artificial Sequence
  derived and/or modified sequence
ggatgggcgggacgggcgtggaggacgccgagcaccgtggcgcgcgctcacgtccgcgtccccaagggctgcgctccctcaagcgcagtgcccagaactcggagccagcccggcccgggggaccctgctggccaaggaggtcgtcagtccggtcttgtcttccagacccggaggaccgaagcttccggacgacgaggaaccgcccaacatggcctcggagagtgggaagctttggggtggccggtttgtgggtgcagtggaccccatcatggagaagttcaacgcgtccattgcctacgaccggcacctttgggaggtggatgttcaaggcagcaaagcctacagcaggggcctggagaaggcagggctcctcaccaaggccgagatggaccagatactccatggcctagacaaggtggctgaggagtgggcccagggcaccttcaaactgaactccaatgatgaggacatccacacagccaatgagcgccgcctgaaggagctcattggtgcaacggcagggaagctgcacacgggacggagccggaatgaccaggtggtcacagacctcaggctgtggatgcggcagacctgctccacgctctcgggcctcctctgggagctcattaggaccatggtggatcgggcagaggcggaacgtgatgttctcttcccggggtacacccatttgcagagggcccagcccatccgctggagccactggattctgagccacgccgtggcactgacccgagactctgagcggctgctggaggtgcggaagcggatcaatgtcctgcccctggggagtggggccattgcaggcaatcccctgggtgtggaccgagagctgctccgagcagaactcaactttggggccatcactctcaacagcatggatgccactagtgagcgggactttgtggccgagttcctgttctgggcttcgctgtgcatgacccatctcagcaggatggccgaggacctcatcctctactgcaccaaggaattcagcttcgtgcagctctcagatgcctacagcacgggaagcagcctgatgccccagaagaaaaaccccgacagtttggagctgatccggagcaaggctgggcgtgtgtttgggcggtgtgccgggctcctgatgaccctcaagggacttcccagcacctacaacaaagacttacaggaggacaaggaagctgtgtttgaagtgtcagacactatgagtgccgtgctccaggtggccactggcgtcatctctacgctgcagattcaccaagagaacatgggacaggctctcagccccgacatgctggccactgaccttgcctattacctggtccgcaaagggatgccattccgccaggcccacgaggcctccgggaaagctgtgttcatggccgagaccaagggggtcgccctcaaccagctgtcactgcaggagctgcagaccatcagccccctgttctcgggcgacgtgatctgcgtgtgggactacgggcacagtgtggagcagtatggtgccctgggcggcactgcgcgctccagcgtcgactggcagatccgccaggtgcgggcgctactgcaggcacagcaggcctaggtcctcccacacctgcccc

SEQ ID NO: 588 - DNA, 1538 bp, Artificial Sequence
  derived and/or modified sequence
gggaaataagagagaaaagaagagtaagaagaaatataagagccaccatggcgtcggagagcggtaaactttggggtggacgattcgtcggggcagtagaccccatcatggagaagtttaacgcgtcgattgcctatgacagacatctctgggaagtagacgtgcaaggatccaaagcctattcacgcgggctggaaaaggccggactgttgacgaaggcagagatggaccagatccttcatgggttggataaagtcgctgaagagtgggcccagggaaccttcaagctcaattcgaatgacgaagatatccacaccgccaacgagcgcagacttaaagaactgattggagcgacagccggtaaactgcacaccggaaggtcacggaacgaccaggtggtcactgatcttaggctgtggatgaggcagacgtgcagcacgctgtcggggttgctttgggagttgatccggacgatggtcgatcgagctgaggcagagagagatgtacttttccccgggtatacacatttgcaacgcgcccagcccatccggtggtcccactggatcttgtcccacgcggtggctctgacacgcgatagcgaacggctccttgaagtccgcaagagaatcaatgtcctccctttgggatccggtgcgattgccggaaatccactgggagtggaccgggaactcttgagggcagagctcaactttggcgcaattaccttgaactcaatggacgcaacctcggagagggacttcgtagcggagtttctcttttgggcgtccctttgcatgactcatttgtcacgcatggcggaggatctgatcttgtactgtacaaaagagttttccttcgtccagctctcagacgcgtactcgacgggatcgagcctgatgccgcagaagaaaaacccagactcattggagctcatccggtcgaaggccgggagggtgttcgggagatgcgcagggctccttatgacgcttaagggacttccgtcaacttacaataaggatctccaagaagataaagaagccgtgtttgaagtcagcgacactatgagcgcagtgttgcaagtagccacgggcgtgatctcgacgctgcagatccatcaggagaatatgggacaggcgctgtccccggatatgctcgcgacagatttggcttattacctcgtccggaaggggatgcccttcagacaggcgcacgaggcgtcgggaaaggcggtattcatggccgaaacaaaaggcgtggcgttgaaccagctgtcgctgcaagaattgcagacgatctcgcctctcttttccggtgatgtgatttgtgtatgggactatgggcactcggtggagcagtacggggcattgggcggtacagcgaggtcatcagtggactggcagattagacaggtgcgcgctctccttcaagcgcaacaggcctgataagctgccttctgcggggcttgccttctggccatgcccttcttctctcccttgcacctgtacctcttggtctttgaataaagcctgagtaggaag

SEQ ID NO: 589 - DNA, 1395 bp, Artificial Sequence
  derived and/or modified sequence
atggcatcagagtccggtaaactctggggcgggcgctttgtaggcgccgtggaccccatcatggagaagtttaacgccagcattgcctacgataggcacctttgggaagtggatgtacagggctccaaggcttacagccgcggtctggagaaggctgggttactgactaaggctgaaatggaccaaattctgcacggactcgacaaggttgccgaagagtgggcccaaggtaccttcaagctgaattcgaatgacgaagacatccacactgccaatgagcggagattaaaggagttaataggtgcgaccgcaggcaaactacacacggggcggtcaagaaacgaccaggtggttaccgacctaagactgtggatgcgtcaaacctgctccactctcagcgggcttctgtgggaacttataaggacaatggtggatagagcggaagccgaacgcgatgtgctttttccaggatatactcacctgcaaagggctcagcctatacgttggtctcattggatcctctctcatgccgttgctttaacgagagattctgaacggctgctggaggtcaggaagcgaattaacgtactgcctctggggagcggcgctatcgctgggaaccccctcggcgtggaccgcgaattactgcgcgccgaactcaattttggagcgatcactctgaacagtatggacgctacttctgagcgggattttgtggccgagttccttttttgggccagtctgtgcatgacacatttgagccgaatggccgaggatctgatcctttactgcactaaagagttctcgtttgtgcagctcagtgacgcgtactcaactggttcatcgctaatgcctcagaaaaagaatcctgacagcctcgagcttattagatcgaaagccggacgtgtctttggtagatgcgccgggcttttgatgactctaaagggcctaccatcaacctacaacaaggatctccaggaagacaaggaggcagtgtttgaggtgtcagatactatgtccgccgtcttgcaggttgctactggcgtaatctccacgctgcagatccatcaggagaatatgggccaagctttatcccccgatatgctcgccacggacctggcctactacctcgtaagaaaagggatgccattcaggcaggcgcacgaagcctcagggaaggccgtgttcatggccgaaacaaaaggggtagctctgaaccaactgagcttacaagaactccaaaccatctctccgctctttagtggggatgtgatctgcgtgtgggattacggccactctgtcgagcagtacggggctttgggcggaaccgctagatcctctgtggattggcagatcaggcaggtgagagccctgttacaggcccagcaggcatag

SEQ ID NO: 590 - DNA, 1395 bp, Artificial Sequence
  derived and/or modified sequence
atggcatccgagagcggcaaattgtggggcggacgattcgttggtgccgtcgatccgattatggaaaaatttaacgcatcgatagcctacgaccgccatctgtgggaggtagatgtacagggatcaaaggcctatagccgcgggctagaaaaagccgggcttctgacaaaggccgagatggaccagatccttcacggcctggacaaggtagccgaggagtgggctcaggggacatttaagcttaatagtaacgacgaagacattcacaccgcgaacgaacggcggttgaaagagctgattggggcaactgcaggcaaattacacacaggtcggagccggaacgaccaggttgtcacggacctgaggctgtggatgaggcaaacatgttctacattgtctgggctcctctgggagctgattcggacaatggtagatcgtgccgaggccgaacgagacgtcttgtttccaggttacactcacttacaaagggctcagcccatccgttggtcccactggatactgtcccatgccgttgctctgacccgagattccgagagactcctggaggtcaggaaacgcatcaacgttctgcctttaggctccggagctatcgctggcaaccctctgggcgtggacagagagctcctcagggcagagttgaactttggagccatcactctgaatagtatggacgccacaagcgaacgcgatttcgtcgccgagttcctgttctgggccagcctgtgcatgacacacttatctagaatggctgaagacctcatcctgtactgtactaaggagtttagttttgtacagctcagcgacgcctacagcaccggatcctcgttgatgccccagaagaagaatcctgattccctggaactgatacgctcaaaagctggaagggtgttcggcagatgcgctggattgctgatgactttaaaaggactacctagtacgtacaataaggatctgcaggaagacaaagaagcagtgtttgaagtatctgacacaatgtccgccgtcctgcaagtagccaccggcgtgatctccaccttacaaattcaccaagagaacatggggcaggctttgtccccggacatgctcgctactgacctcgcttattacttggtgcgcaagggcatgccctttcgacaggctcacgaggccagtggcaaagctgtattcatggcagaaacgaagggggtggctctgaaccagctctcgctccaagagttacagactatctcccccctcttctctggagacgtgatttgtgtgtgggactacggacactcagttgagcaatacggggctcttgggggcaccgccagaagttcagtggattggcagataaggcaggtaagggctctgctgcaggctcagcaggcatag

SEQ ID NO: 591 - DNA, 1395 bp, Artificial Sequence
  derived and/or modified sequence
atggccagcgagagcggcaagctgtggggcggccgctttgtgggcgctgtggaccccatcatggagaagttcaatgccagcatcgcctatgacagacacctgtgggaggtggatgtgcagggcagcaaggcctacagccggggcctggagaaggccggcctgctgaccaaggccgagatggaccagatcctgcacggcctggacaaggtggccgaggagtgggcccagggcaccttcaagctgaacagcaatgatgaggacatccacacagccaatgaaagaaggctgaaggagctgattggagccacagctgggaagctgcacacaggccgcagcagaaatgaccaggtggtgacagacctgcggctgtggatgaggcagacctgcagcaccctgagcggcctgctgtgggagctgatccgcaccatggtggacagagctgaggccgagagagatgtgctcttccctggctacacccacctgcagagggcccagcccatccgctggagccactggatcctgagccatgctgtggccctgacccgggacagcgagcggctgctggaggtgaggaagaggatcaacgtgctgcccctgggcagcggggccatcgccggcaaccccctgggcgtggaccgggagctgctgcgggcagagctgaactttggagccatcaccctgaacagcatggatgccaccagcgagcgggactttgtggccgagttcctgttctgggccagcctgtgcatgacccacctgagcaggatggccgaggacctgatcctgtactgcaccaaggagttctcctttgtgcagctgagtgatgcctacagcacaggcagcagcctgatgccccagaagaagaacccagacagcctggagctgatccgcagcaaggccggccgggtgtttggccgctgtgccggcctgctgatgaccctgaagggcctgcccagcacctacaacaaggacctgcaggaggacaaggaggccgtgtttgaggtgtctgacaccatgtctgctgtgctgcaggtggccactggagtcatcagcaccctgcagatccaccaggagaacatgggccaggccctgagcccagacatgctggccacagacctggcctactacctggtgaggaagggcatgcccttccggcaggcccacgaggccagcggcaaggctgtgttcatggccgagaccaagggcgtggccctgaaccagctgagcctgcaggagctgcagaccatcagccccctcttctctggagatgtgatctgtgtgtgggactatggccacagcgtggagcagtatggagccctgggcggcacagcccggagctctgtggactggcagatccggcaggtgcgggccctgctgcaggcccagcaggcctag

SEQ ID NO: 592 - DNA, 1395 bp, Artificial Sequence
  derived and/or modified sequence
atggccagcgagagcggcaagctgtggggcggccggttcgtgggcgccgttgacccaatcatggagaaattcaacgcctcgatcgcctatgataggcatctctgggaagtcgacgtccagggatccaaagcatatagccgcggactggagaaggccggcctgcttacaaaggccgaaatggaccagatacttcatgggctcgacaaggtcgctgaggagtgggctcaagggacattcaagctcaactcaaacgacgaggacattcataccgccaatgaacggagactgaaagagcttatcggggcaaccgctggtaagctgcacaccggccgaagccgaaatgatcaggtggttacagacctgcgactctggatgcgacaaacatgctccacgctgtccgggctgctttgggagcttattcggaccatggtggatcgagcagaggccgagcgcgatgtcctttttcccggctacacacacctgcagcgcgcccaacccattcgatggagtcattggatactgagccacgcagtagctctgacacgagatagcgagcggctgctggaagtgaggaaacggataaacgtgctcccactgggcagcggagccatcgccggcaaccccctgggagtagatagggaactgctgcgtgcggagttgaacttcggagccataaccctgaatagtatggacgctactagcgagagagacttcgtggcagagttcctgttctgggcttcgttatgtatgacgcatctgtccagaatggcagaggatctcattttgtactgtacaaaagaatttagctttgtgcaactgagcgacgcctacagtaccggtagctctctcatgccgcagaaaaagaaccctgactccctggagctcatcagatccaaagctggtcgcgtatttggacgatgcgccggccttctcatgacactcaagggtcttccaagcacttacaacaaagacttgcaggaggacaaggaggcagtgttcgaggtgtctgatacaatgtcggcggttttgcaggttgccacaggcgtgatctcaacactgcagattcatcaggaaaatatggggcaggcactgagccccgacatgttggcgacagacctagcctactacctcgtgaggaagggaatgccttttcgacaggcgcatgaggcttccggtaaggcggtctttatggctgagaccaaaggcgtcgccctgaatcaattatctctccaggaactgcagactataagccctctcttctcaggggatgttatttgtgtctgggactacgggcacagcgtggagcagtacggcgcgttgggcggcacagcccgctcttcagtggactggcaaattaggcaggtgcgggccctattacaagctcagcaagcctag

SEQ ID NO: 593 - DNA, 1395 bp, Artificial Sequence
  derived and/or modified sequence
atggccagcgagagcggcaagctgtggggcggccggttcgtgggcgcagtggacccgatcatggagaagttcaacgcaagtattgcatacgatcgccacctttgggaggttgatgtacaggggagtaaggcatactcccgggggttagagaaagccggactgcttacaaaggctgaaatggaccagatactgcatggcctggataaagtggctgaagaatgggctcaggggacattcaagctgaatagcaacgatgaagacattcatactgcaaatgagcgccgattgaaggaactcatcggcgctaccgccggtaagctgcacacaggtaggagcagaaacgaccaggttgtgaccgatctgaggctgtggatgcggcagacttgctctactctcagcggtctgttgtgggaactgatacgaactatggttgaccgggccgaagcggagcgcgacgtcctgtttcctgggtacacacacctacagcgggcacaaccaatcagatggtcacactggatcctaagccatgccgttgccctcacccgggattccgaacgcttactcgaggtgagaaagcggatcaacgtgttgcctctcggatccggagctatcgccggaaaccccctgggggtcgaccgggaacttttgcgtgccgagctcaattttggagctattactctgaattccatggatgctacatcagagcgggattttgtggccgagtttctgttctgggccagtctttgcatgactcacctgtctcgaatggccgaagatctgatcctgtattgcaccaaggaattcagcttcgttcagctcagtgacgcctactctacaggaagttctctcatgccacagaaaaaaaacccagactcattggagttgattcggagtaaggccggccgcgttttcgggcgatgcgctggcctgctgatgactttaaaaggactgccttcaacttacaacaaggatcttcaggaggataaggaggctgtctttgaagtgtccgacaccatgtctgccgtgcttcaggtcgctaccggggtaataagtaccctccaaatccaccaggaaaacatgggccaggccctgtctcccgacatgctggccacagacctggcctattatctggtacggaagggcatgccgtttagacaggcccacgaagcgtcaggaaaggcggtgttcatggccgagactaaaggcgtggccttgaaccagctgtctctgcaggagctacagacaatatcccctctgttctccggagatgtgatatgtgtgtgggactacgggcattccgtggagcagtacggggccctcggtggaactgcccgcagcagtgtggattggcagatacgccaggtgagggctctcttacaggcacagcaggcctag

SEQ ID NO: 594 - DNA, 1395 bp, Artificial Sequence
  derived and/or modified sequence
atggcctccgagtctggaaaactgtggggcggacgttttgtaggcgctgtggatcccatcatggagaagttcaatgcttcaattgcttacgataggcatctgtgggaagtcgatgtgcaaggatccaaagcctactcaagaggcctagaaaaggctggccttctgacaaaagccgaaatggatcagatcctgcatggcttggacaaggtcgcggaggagtgggctcagggtacttttaagctgaacagcaatgatgaggatattcatacagcaaacgaaagacggctcaaagagttgatcggcgctacagcaggcaagctgcataccggtaggtccagaaatgatcaggtggtcactgatctccgtctttggatgcgccaaacttgctctaccttgtccggtctcttatgggagctgatacgcacgatggttgaccgcgctgaggctgagagagacgtcctttttcctggatatactcatctgcagcgcgctcagcctattcgctggagtcattggatcctgtcacatgcggtcgcgctgacaagggattccgagaggctgttggaagtgcgcaaacgtatcaatgttttaccattaggcagtggcgcaatcgccggaaaccccctcggcgttgatagagaactgctgcgggctgagcttaactttggtgctatcactttgaactcaatggacgcaacctcagaacgcgacttcgttgctgaatttctgttttgggcatcactctgcatgacacacttgagtaggatggctgaggacctgattctgtactgcacgaaggagttttcctttgtgcagctgagcgacgcctactcaacaggctcctccctcatgcctcagaaaaagaatcctgacagtctggagctgatccgctccaaggccggacgcgtgttcggtaggtgcgccggtcttttgatgaccctaaagggtctgccttctacatacaataaggaccttcaggaggacaaggaagcagtcttcgaggtgagtgatacaatgagcgcagtgcttcaggtcgccaccggagttatctcaactctgcagattcatcaggaaaacatgggccaggcactcagcccagacatgttggctacagacctcgcttattatctggttcggaagggaatgccatttcggcaggcgcacgaggcatctggtaaagccgtgttcatggcagaaactaagggcgtcgccctaaaccagctgagcctccaggaattgcaaacaataagcccgctattttccggagatgtgatctgtgtttgggactacgggcattccgttgaacagtatggcgctctgggagggactgcaagaagcagtgtggattggcagattagacaggtgcgggcactcctgcaagcgcaacaggcatag

SEQ ID NO: 595 - DNA, 1395 bp, Artificial Sequence
  derived and/or modified sequence
atggcatccgagtccggcaagttgtggggcggtcggttcgtgggcgcagtggaccccatcatggagaaatttaatgcctcaattgcatacgatcgacacctctgggaagtggacgtacaaggctcgaaagcttacagccgcggtttagaaaaggctggcctgcttacaaaggccgagatggaccagatcttacatggtttggacaaagtggcagaagaatgggcccagggtaccttcaaacttaactccaacgacgaggatatccacaccgcgaacgagcgcagactgaaggaactcatcggagcaaccgctggaaaattgcacaccggcagaagccgcaacgaccaagttgttacagatctgcggctgtggatgcggcagacctgtagcaccctcagcggactactgtgggaactgatacgaacaatggtggatcgggcagaggccgagcgagacgtgttatttccaggctatactcatctgcagcgggctcagcctattcggtggtcgcactggatcctgagccatgctgttgcattgacgcgtgactccgaacgtttgctggaagtccggaagaggattaatgttctgcccttgggtagcggagcaattgcaggcaaccctctgggggttgatagagaactcctgcgtgccgagctcaatttcggtgccatcacactgaacagtatggacgcgactagcgagagagactttgttgcggagttccttttctgggcaagcctgtgcatgacgcacctgtcaaggatggctgaggaccttatcctgtactgtacaaaagaattctctttcgtacaactctctgatgcttattcgacaggtagttcactgatgcctcagaaaaagaatcccgactccctggagctgatccgttcaaaagctgggagggtgtttggtaggtgcgctgggctcctcatgactctcaaaggcctgcctagcacatacaacaaagacctgcaggaggataaggaagctgtctttgaggtaagtgacactatgtctgccgtgctgcaggttgccacaggagttatcagcacgcttcagatccaccaggagaatatgggtcaggccctgtctcccgacatgctcgcaacagacctggcctattatctcgtgaggaagggaatgcctttcagacaggcgcatgaggcttctggcaaggctgtcttcatggctgagaccaaaggagtggccttgaatcaactgagcctgcaggagcttcaaactatttcacccctcttcagcggggatgtgatatgcgtgtgggactacgggcacagcgtcgagcagtacggtgcactgggtggcacggcacgctcttcagtggactggcagatccgccaagttcgggcactgctgcaggcccagcaggcgtag

SEQ ID NO: 596 - DNA, 1392 bp, Artificial Sequence
  derived and/or modified sequence
atggcttcggaatcagggaagctgtggggcgggagattcgtgggcgcagtcgaccctattatggagaagtttaacgcatccatcgcttatgatcgccatctgtgggaagtggacgtgcaaggttctaaggcctacagccgaggcctggagaaggcaggtctgctgaccaaggcagaaatggaccagatactgcatggtttagataaggtggcagaggagtgggcacagggaacttttaagcttaattccaacgatgaggacatccataccgcaaatgaacgtcgcctgaaggagctaatcggagctacagccggcaaattgcacacaggacggtctcgcaatgaccaagtcgtgacggacctgcggttatggatgaggcagacttgctctacgctcagcgggctattgtgggagctcatccggacaatggtcgaccgcgccgaggccgaaagggacgtgctttttcccgggtacacacacctgcagcgtgcacagcccattcgttggtcgcattggatcttgtctcacgctgttgcattgacgcgcgacagtgaaaggctgctggaagtgaggaagcgcataaatgtgctgccgctcggttctggtgcaatagcaggtaacccacttggagtggatagggagctactaagggctgagctgaatttcggggcaattacccttaattccatggacgctacaagcgagcgagattttgtggctgagttcctcttctgggcctcactgtgcatgacccatctgagtcgaatggccgaggaccttattctctattgtacaaaggagtttagctttgtacagctgtcggatgcatatagcacgggcagcagcctgatgccgcagaaaaaaaaccctgattcattagaattgatacgcagcaaagcaggccgcgtcttcgggaggtgtgcgggcctgttaatgaccctgaaaggcctcccctctacatacaacaaggatctgcaggaagataaagaggccgtgtttgaagttagcgatacaatgagcgctgtcctgcaagtggctactggagtgatcagcaccctgcagatccaccaggagaatatgggccaggcactgtccccagacatgctggctactgacctcgcgtactacctcgtgcgcaagggcatgccttttcggcaggctcacgaagcctcagggaaagcggtgttcatggctgagacgaagggagttgccttaaatcagctgtctttgcaggaattgcagacaatctctcccctctttagcggagatgttatctgcgtgtgggattatggccattctgtcgagcagtatggcgccctgggaggcacagcgcggtcctcagtagactggcagattcggcaggtgagagcgctcctccaggcccagcaggcc

SEQ ID NO: 597 - DNA, 1392 bp, Artificial Sequence
  derived and/or modified sequence
atggcatcggaatcgggtaagctgtggggtggccgctttgtcggcgccgtggatcctatcatggaaaagtttaacgcatcaattgcctacgatcgtcatctttgggaagtggatgtccaagggtctaaggcatactcacgggggcttgaaaaggcaggacttctgaccaaggcagaaatggaccaaatcctccacggccttgacaaagtggcagaagaatgggctcagggtactttcaaactgaactccaacgatgaggatatccataccgccaatgaaaggagactcaaggagctgatcggggcgactgccggtaagctgcataccggaaggtcgcgcaacgatcaagtggtcaccgacctgcggctctggatgcgtcaaacctgcagcacgctgtcaggtctgctgtgggaactgattcgcacgatggtggacagagcggaggccgagagagacgtgttgttcccaggatacactcatctgcagagagcacaaccaataagatggagccattggattcttagccacgccgtcgctcttaccagggactccgagaggcttctggaggtgagaaagagaattaacgtgctgccactgggctccggagcaattgccgggaaccctctgggcgtggacagggaattgctgcgggcagaactgaacttcggtgcgattacgctcaactcgatggatgccacctcggaaagggattttgtggcagaatttctcttctgggcctccctgtgtatgactcacctctccaggatggcagaggatctgattctgtactgtactaaggagtttagctttgtgcaactttctgacgcatactcgaccggaagctcactcatgccacagaaaaagaacccagattccctggagctcattcgctcgaaggcagggagagtgttcggccggtgcgccggtctgctcatgacccttaaagggctcccatccacttacaacaaagatctccaggaggataaggaagcagtgttcgaagtgagcgatacgatgtcggcagtcctgcaagtggcaactggcgtgatctcgaccctgcaaattcatcaagaaaacatgggtcaagctctctcccctgacatgctggctaccgatctggcatactaccttgtgagaaaagggatgccctttcgccaggcccacgaagcgtccggaaaggcggtgttcatggcagaaaccaagggagtggcactcaatcaactgtcacttcaggaactgcaaacgatatctcccctgttctcgggtgacgttatttgtgtgtgggattacggacattccgtcgagcagtacggcgcacttggtggcaccgcacggtcctccgtggactggcagattcgccaggtacgcgcacttcttcaagctcagcaggca

SEQ ID NO: 598 - DNA, 1392 bp, Artificial Sequence
  derived and/or modified sequence
atggcctcagaatccggaaagctgtggggaggaagatttgtgggagctgtcgacccaatcatggaaaagttcaacgccagcatcgcatacgaccgacacctgtgggaagtggatgtgcaggggtctaaagcctactctcggggactggagaaagcgggactgctgaccaaggctgagatggaccaaatcctccatggattggataaggtcgcggaagaatgggcccagggcactttcaagctgaactcgaacgacgaggacatacatacggcaaatgagcgccgcctgaaggagctcatcggagccaccgccggaaaactccatacgggacggtccaggaatgaccaagtggtgactgatctgagactgtggatgcggcagacttgctcgacgctcagcggcctcctctgggaattgatcagaactatggtggaccgcgctgaggctgagcgggacgtgctgtttcctggatatacccacctccagagagcacagccgataaggtggagccactggatcttgtcacacgcggtggcgctcacgagggattccgaacggctccttgaggtccgcaagagaatcaatgtgctccccctcggatcgggagccatcgcggggaacccacttggagtggaccgtgaactgctgcgcgcggaactcaatttcggggccatcaccctgaactcaatggatgccacctcggaacgggactttgtcgcggaattcctcttctgggcctcgctctgcatgacccacctgagtcggatggccgaggatctgatcctctactgcactaaggagttcagcttcgtgcagctgagcgatgcttactcgaccggaagctcgttgatgccacaaaagaaaaacccggactcactggagctcatcaggagcaaggcaggtcgggtgttcgggaggtgtgctggtctgctgatgaccctgaagggactcccatctacttacaacaaggatttgcaggaggacaaggaagctgtctttgaagtcagcgacacgatgtccgctgtcctccaagtcgccaccggcgtcatttccaccttgcagatccatcaagagaacatgggacaggcgctgtccccggacatgctggctactgacctggcttattaccttgtgcgaaaaggcatgccgttccggcaagcacatgaggcttcaggaaaggccgtgttcatggccgagactaaaggtgtcgccctgaatcaactgtcactgcaggaattgcaaactatcagcccgctcttcagcggggacgtgatctgtgtgtgggactacgggcacagcgtcgaacagtacggtgccctcggcgggaccgcacgatccagcgtggattggcagatcaggcaagttcgggcactgcttcaggctcagcaggca

SEQ ID NO: 599 - DNA, 1392 bp, Artificial Sequence
  derived and/or modified sequence
atggcctctgagtccggaaaactatggggcggaagattcgttggggctgtcgatccaattatggagaaattcaacgcttccatcgcttacgatcgacacctctgggaagtggacgtgcagggtagcaaagcctattctagaggacttgagaaggccggtctgctgaccaaagcagaaatggatcagattctccacggcttggacaaggtggctgaagagtgggctcagggtacctttaaacttaatagcaacgacgaggacatacatacagctaacgaacgacggctcaaggagttgataggggcaaccgccgggaagttgcacacagggcgctctcgaaacgatcaggtggtcacagatcttcggctgtggatgaggcagacatgctctacattaagtgggctcctttgggagttaattcgtactatggtggacagagccgaggccgagagggatgtcctgttccccgggtacactcatctgcaacgggctcagccgattcggtggtctcattggatactgtcacacgctgtcgccttaactcgtgattccgaacgacttctggaagtcaggaaaagaatcaatgttctgcctttgggttcgggtgcaattgccgggaatcccttaggggtagatagggagcttctgagggcagagctcaacttcggcgccataactctcaactcgatggatgcgacctctgaacgcgatttcgtcgccgaattcctcttctgggcgtctctgtgcatgacccatttgtcacggatggctgaagatcttatactgtactgcactaaagaattcagctttgtccagttgtctgatgcttatagcaccgggagtagcctgatgccccagaagaagaaccctgattccctggaactgatccgctccaaagccggcagagtatttggtagatgcgctggtttactcatgacacttaaaggccttccgtccacatataataaggacctgcaggaagacaaagaagccgtctttgaagtcagcgacacaatgagcgccgtgctccaagtggctacaggggtgatttccactttgcagatccatcaggagaacatgggtcaagctttgagtcctgatatgctggcaactgatctggcctattatctagtaaggaaaggcatgccattcaggcaggctcatgaggcatctggcaaggctgttttcatggccgaaactaaaggcgtcgccctgaatcagctctcactgcaggagttacaaacgatcagtcctttgttttctggggacgttatatgtgtctgggattatggccactccgtcgagcagtacggggctttggggggtaccgcgagatcatcagtcgactggcagattcgtcaggtccgagctctgctgcaggctcagcaggcc

SEQ ID NO: 600 - DNA, 1392 bp, Artificial Sequence
  derived and/or modified sequence
atggcctcagagtccggcaagctctggggtggccgctttgtgggcgccgtggatcctataatggagaagttcaacgctagcatcgcctacgaccgccacttgtgggaggttgacgttcagggttccaaggcctacagccgcggtctcgagaaggcaggtctgttgaccaaggccgagatggatcagatcctccacggacttgataaggtcgctgaggagtgggcgcagggaacattcaagctcaatagcaacgacgaagacatacataccgcgaacgaacgccgcttgaaagaactgatcggtgctactgccggcaagcttcatacaggtagatcacgcaacgatcaagtggtaaccgatctgaggctgtggatgcgccagacctgttccaccctgagtggattgctgtgggaactcattaggaccatggtagaccgcgccgaagcggagagggatgtcctgtttcctggttacacacacttgcaacgcgctcagcccatcaggtggtcccattggatcttgtcccatgccgtggccctcacacgcgatagcgaaagactgttggaggttagaaaaaggatcaatgtgctcccacttggcagcggagctatcgctggcaaccccctgggcgtagatagagagctgctgagagccgaactcaattttggcgctataacactcaattcaatggacgctacttccgagagggattttgtggcagagttcttgttttgggccagcttgtgcatgacacacctttcccgcatggctgaggacctcattctgtattgcactaaggagttcagtttcgtccaattgtcagacgcttattcaacgggctctagcctgatgccgcaaaaaaaaaaccctgacagtctggagctcatcaggagcaaggcgggcagagtgttcggaaggtgtgctggtctgctcatgaccttgaagggactgccaagcacctacaacaaagacttgcaggaagacaaggaagccgtgttcgaagtctctgacacaatgtcagccgtgctgcaggtcgcaacaggtgtcatcagcacgttgcaaatccatcaggagaacatgggtcaggcattgtcccctgacatgctggccacagacttggcctattacctggttagaaagggcatgccattcagacaagcccatgaagcctcaggtaaggccgttttcatggctgaaacaaagggcgttgccctgaaccaactgtcactgcaggaacttcaaacaatctctcccctcttctccggagatgttatctgtgtctgggactacggtcactctgtagaacagtacggcgctctcggtggcaccgcgcgcagttcagtggattggcagatccgccaggttagggctttgctgcaggcacaacaagct

SEQ ID NO: 601 - DNA, 1392 bp, Artificial Sequence
  derived and/or modified sequence
atggcatcagaaagtggtaagctctggggaggacggtttgtgggcgccgtcgatccgatcatggagaagttcaacgcctccatcgcttacgacagacacctctgggaagtggacgtgcagggatccaaggcgtatagccgcggacttgaaaaagctggcttgctgacgaaggccgaaatggaccagatccttcacggcctggacaaggtggccgaagagtgggcacaaggaactttcaaattgaactcgaacgatgaggacatccataccgcgaacgaacgccgcctcaaagaactcatcggggcaaccgcaggtaagctccataccggccggtcgagaaatgatcaggtggtcactgacctccggctgtggatgcggcagacctgctcgactctcagcggcctgctttgggaattgatccgcaccatggtggacagggcagaggcagagcgggatgtgctgttcccagggtacacccacctgcaacgagcccagcctatccggtggagccactggatcctgtcgcacgccgtcgcattgacgcgcgattccgaacggctgctcgaagtccgaaaaagaatcaatgtgctcccactgggctccggagcgatagcaggaaacccccttggcgtggatcgcgaactcctgagagccgagctcaacttcggtgccattacgctcaactcaatggacgccaccagcgagagagacttcgtggctgaatttctgttctgggcctcactgtgcatgacccatctctcgcggatggctgaagatctcatcctctactgcaccaaagaattttcctttgtccaattgtctgatgcctacagcaccggctcatccctgatgcctcaaaagaagaatccagactcgttggagctcattcgttccaaggctggacgcgtattcggtcgctgtgcaggactcctgatgactctgaaaggactgccttctacctataacaaagacctgcaggaggataaggaagcggtgttcgaagtctcagacactatgtcggcagtgctccaggtggctacgggagtgatctcgactcttcagatccaccaggagaatatgggccaggccttgtcgcctgacatgctcgccactgacctggcatactaccttgtccggaagggaatgccgttccgccaggcacatgaagccagcggtaaagcggtgttcatggccgaaactaagggagtggcacttaaccagctcagcctccaggagctgcagactatctcgccgctttttagcggtgacgtgatttgtgtgtgggactacgggcattcagtggaacagtacggtgccctgggaggcaccgctagatcgtcggtggactggcagatccggcaagtgcgcgctctcctgcaagcgcagcaggcc

SEQ ID NO: 602 - DNA, 1392 bp, Artificial Sequence
  derived and/or modified sequence
atggcttcggagtcgggaaaactgtggggaggtcggttcgtcggagcagtggatccgatcatggagaagttcaacgcttccatcgcgtacgaccggcacctgtgggaggtggacgtgcagggatctaaggcctactcgcgcggcctggaaaaagcaggcctcttgactaaagctgaaatggatcagatcctgcatggactggacaaagtggctgaggagtgggcacaaggcactttcaagttgaattccaatgacgaggatatccatacggccaacgaacggcgtcttaaagaactgattggagccaccgcaggcaagttgcacacgggccgctctcgcaacgaccaggttgttacggatctgagattgtggatgaggcagacctgttcaacgctctccggactgctctgggagctcattcgtaccatggtggatagggctgaagcggaacgcgatgtgctgttccctggatacactcacttgcagcgcgcgcaaccaatccgctggtcgcattggatcctctcacatgcggtggcactgactcgcgactcagagagactgctggaagtcaggaagaggattaatgtactgccgctcggatccggggcaattgcgggcaacccgctgggtgtcgacagagaactgctgcgcgccgagctgaattttggagcgatcacgctcaactccatggatgctacttcggaacgggattttgtcgccgaattcctgttttgggccagcctgtgcatgactcatctgagcagaatggcagaggacctgatcctttattgcaccaaagagttctcgttcgtgcaactctcggacgcttacagcactggctcctcactcatgccgcagaaaaagaaccccgactcactggaactcataaggtcgaaggcgggccgggtgttcggtagatgcgcgggactgctgatgactctgaagggccttccatccacctacaataaagacctgcaagaagataaggaggcagtattcgaagtcagcgacaccatgagcgcggtgctgcaagtggccaccggggtcatctccactctgcagatccatcaggaaaacatgggacaggccctgtcccccgacatgctcgccacggatctggcgtactaccttgtgcgcaagggcatgccattcaggcaggcgcacgaggccagcggaaaggccgtctttatggccgagactaagggggtggctttgaatcagctgtccctccaagaattgcaaactatctccccactgttcagtggtgatgtgatttgtgtctgggattacggacactcggtcgagcaatacggagcactgggagggaccgcccgatcctccgtggactggcagatccgccaggtgcgcgctttgctgcaggcgcaacaggcc

SEQ ID NO: 603 - DNA, 1392 bp, Artificial Sequence
  derived and/or modified sequence
atggcatcagagtcaggcaagctgtggggggggcgattcgtgggcgccgtggatcctatcatggagaagttcaacgcttccatcgcttacgacaggcatttgtgggaggtggacgtacagggatccaaagcctactcaagaggcttagaaaaggccggtctcctgaccaaggccgagatggatcagatactccacggtctcgacaaggttgccgaggagtgggctcagggaacatttaagctgaatagcaatgacgaggatatacacacagccaatgaaagacggctgaaagagctgatcggtgccacagccggcaaacttcataccgggagaagtagaaacgatcaggtggttacggatctgaggttatggatgagacaaacctgtagcactttatctggcttactctgggaattgattaggaccatggtggaccgtgctgaggcagagcgtgacgttctgttcccaggctatactcacttacagagagcacagccgatccggtggagtcattggatcctgtcccacgccgtcgccctcaccagggattcagagcgactgcttgaagttagaaaacggatcaacgttctcccgttgggaagcggtgctatagccggcaatccacttggagttgaccgggaactgttgcgagcagagcttaacttcggggcgattaccctcaactccatggacgccacttctgagagggacttcgtggccgaattcctgttttgggccagcctgtgtatgactcatctctcacggatggctgaggacttgatattgtattgcaccaaagaatttagttttgtacagctgagcgatgcctattccacaggcagctctctaatgccacagaaaaagaacccagacagtctggagctcatccgcagtaaagctggtcgcgtgttcggcaggtgcgcgggtctgcttatgacccttaagggccttccttcgacatacaacaaggacctgcaagaagataaagaggcagtattcgaggtgagcgacacgatgagtgccgtgctgcaggtcgccaccggtgtgatctcgacgttgcaaatccaccaggaaaacatggggcaggcactgagccctgatatgttagccactgatctggcttactatctggtgagaaagggtatgcctttccgccaggcccacgaggcttctgggaaagccgtgttcatggccgagaccaagggggtggcgctaaatcaactgtctctgcaggagttgcagacaatcagcccccttttcagtggggatgtgatatgtgtttgggactatgggcacagcgtggaacagtacggcgcccttggggggacagctagatcttctgttgattggcagatccgccaggtgagggcactgctgcaggcccagcaggct

SEQ ID NO: 604 - DNA, 1392 bp, Artificial Sequence
  derived and/or modified sequence
atggcgagcgagtcaggcaaactttgggggggtcgattcgtcggagccgtggatcccatcatggagaaattcaacgccagtattgcatatgaccggcacctgtgggaggtcgacgtgcaaggaagcaaggcttatagtaggggcctcgagaaagctggactcctgacaaaggctgaaatggaccagatccttcacggcctggacaaggtggccgaggaatgggcgcagggtacgtttaagctcaacagtaacgatgaggatatccatactgccaacgaacggcgtttaaaggaactgatcggagcgactgccggcaagctgcacacaggacgttctagaaacgatcaagtcgtgaccgacttacgtttgtggatgaggcaaacctgctcgaccttgagtggacttctctgggaactcataagaaccatggtcgaccgcgcagaggctgagcgcgatgtgttgttccccggatatacacatctgcagcgggctcagccgatcagatggagccactggatcctgtcgcatgccgtggcccttactagagattctgaaagattgctggaggtccgaaagcgcatcaacgtcctgccgctcgggtcaggggccatagccggaaacccactgggagtagacagggaattacttcgcgctgagctgaacttcggtgccatcactctcaactccatggatgccacttctgagcgggatttcgttgctgaattcttattttgggcttctctgtgcatgacacatctctcccgtatggccgaggacttgatcttgtactgtacaaaggagttttcctttgtccagctgagcgacgcctactccacggggtcttccctgatgccacaaaagaaaaaccccgacagtcttgaattgataagaagtaaggcaggcagggtgtttgggagatgcgcggggctgctgatgacgctgaagggactccctagtacatacaataaagatctccaggaagacaaagaagccgtatttgaagtgagcgacactatgtccgccgtgttgcaggtcgcaacaggcgtaatctccacactccagatccaccaggagaacatgggccaagctctgtcaccagacatgcttgccacagacttggcatattacctggtccgaaaaggcatgccctttcgacaggcacacgaggcaagcggcaaagccgtgtttatggcagagacaaagggggtggctctgaatcagctctcacttcaggagctgcagaccataagtccgctcttctctggggacgtcatttgcgtgtgggattacggacattcggtggagcagtatggggcgctgggcggcacggcgagatctagcgtggattggcagatccggcaggttcgggcgctgctacaggctcagcaggca

SEQ ID NO: 605 - DNA, 1392 bp, Artificial Sequence
  derived and/or modified sequence
atggcttctgagtccggcaaactgtggggcggccgtttcgtcggcgctgtggacccgatcatggagaagttcaatgccagcattgcttatgatagacatctgtgggaagtcgatgttcagggttccaaggcttatagtcgtggtctggagaaagcgggacttctcaccaaggctgagatggatcagatcctccacgggttagacaaggtggctgaagaatgggctcagggtacattcaagctcaactctaacgacgaagatatacatactgccaacgagcgacggttgaaggagctgatcggagccacagctggcaagctgcatactggtagatctaggaacgatcaagtggtgacagacctgaggttgtggatgcgccagacctgctctaccttatcaggacttctctgggagttgatacgcacaatggtggatcgggcggaagccgagcgggatgtcttgtttcccgggtatacgcacctgcagagagcgcaaccgatccgatggtcccattggatactgagccacgctgttgcactcacacgggattccgagcggctactggaagtgaggaagaggattaacgtcttaccgctgggctcaggcgcaatcgcaggaaatccactgggcgtcgacagggaactcctgagggccgagctgaatttcggagccataactctgaactccatggatgccacaagtgaacgagactttgtcgcagagttcctgttctgggcttcactttgtatgactcatttgtctcgaatggccgaggatctcattctttattgcacaaaggagtttagcttcgttcagctgagtgacgcctactccacgggttcatcactgatgccccagaagaaaaaccccgatagcctggagctcatccggagtaaggccggacgcgtctttggtagatgcgccgggctactgatgacattgaagggcctcccatcgacctataacaaggacttacaggaggataaagaggccgttttcgaggtgagcgataccatgtccgccgtcctgcaagtggctacaggcgtcatatctacgctccaaatccaccaggagaatatggggcaagctctgtcgccggatatgcttgcaactgacctggcctactaccttgtccgaaaagggatgccattcaggcaggcccacgaggcatccggcaaggctgtctttatggcagagacaaagggggtggccctcaaccagttgtcattgcaggagctgcagacaatatctccattgttcagcggcgatgtcatttgcgtttgggattatggccattctgtcgaacaatacggtgccttgggagggacagctcggtcttcagtcgactggcaaatccgccaggtgcgagcactcctgcaggcccagcaggct

SEQ ID NO: 606 - DNA, 1392 bp, Artificial Sequence
  derived and/or modified sequence
atggcatcggaatcaggaaagttgtggggcggacggtttgtgggtgcagtggaccccatcatggagaagtttaatgcttccattgcatatgatcgtcatctttgggaagtcgatgtccagggaagcaaggcatattcgcggggactcgaaaaagctgggctgctcaccaaggccgaaatggaccaaatcctgcatgggctcgacaaggtggccgaagaatgggcccaaggtactttcaaacttaacagcaacgatgaagatattcataccgcgaacgaaagacggcttaaagaacttatcggagcgaccgcgggaaagttgcacacgggaagatcaaggaatgaccaagttgtcaccgatcttcggctttggatgagacagacctgcagcactctgtcggggctgctttgggagcttattcgtactatggtcgatagagccgaggcagaaagagacgtgctgttccccggttacactcatctccaacgggcgcagcctattagatggtcccactggatcctgtcccatgcagtcgcactgacgcgggattcagaaaggcttcttgaagtgcggaagcggatcaatgtgcttcccctcggatcaggggcaattgccggaaacccgctcggagtggacagggagctccttcgggcagaacttaactttggggcaattacccttaacagcatggatgcaactagcgagagggattttgtggcggaatttctgttttgggcatctttgtgcatgacgcatctttcgagaatggcagaagatctgatactgtactgtactaaggaattctcgttcgtgcagctgagcgatgcatacagcactggctcatcgttgatgccgcagaagaaaaatcctgattcactcgagctgattcgatcgaaggcaggtagggtttttggccgatgcgcagggcttctgatgactctcaaaggactcccatccacctacaataaggatctccaagaagataaggaggcagtgtttgaagtctccgacaccatgtctgcggttcttcaagtggcaaccggggtcatttccactctgcaaatccatcaagaaaacatgggtcaggcattgtcgccagacatgctggctactgacctcgcatactacctcgtgcgaaagggtatgccattcagacaagcacacgaagcatcaggaaaagctgtgttcatggctgagactaagggagtcgccctcaaccaactctcgttgcaggagttgcaaaccatttcacccttgtttagcggagatgtgatctgtgtgtgggactacggtcactccgtggaacaatacggtgcactgggaggtaccgcgcgttcgtccgtggattggcaaatccgccaagtgcgcgcgcttctgcaagcacagcaggcg

SEQ ID NO: 607 - DNA, 1392 bp, Artificial Sequence
  derived and/or modified sequence
atggcgtcggaatcgggaaaactttggggaggacgctttgtgggggcagtcgatccgatcatggaaaagtttaacgcttcaatcgcttacgaccggcacctctgggaggtggatgtgcaaggatccaaggcgtactcgcgcggtctggagaaggcggggctcctgactaaagcagagatggatcaaatcctgcacggtttggacaaggtcgcggaggaatgggcgcagggaactttcaagctcaacagcaatgacgaggacatccacacggcgaacgaacggaggctcaaggaactgatcggagccaccgccggaaagctccataccgggcgctcccgcaacgaccaggtggtgactgacctgcgcctctggatgcggcagacttgcagcaccctctccgggctcctgtgggaattgatccgcaccatggttgacagagccgaggccgagagggacgtgctgtttccgggatatacccacctccagcgagcgcaacctatccgctggtcacattggatcctcagccacgccgtcgccctgaccagagacagcgagcggctgttggaggtgaggaaacgcatcaacgtgttgccgctcgggagcggagcaatcgccggaaatccactgggagtggacagagaactcctccgcgccgaactgaatttcggcgccatcaccctcaactccatggatgcgacctccgaacgggattttgtcgccgagttcctgttctgggcctccctgtgcatgacccatttgtcgcggatggccgaggacctgatcctgtactgcactaaagagttttcgttcgtgcagctctcggatgcatactccaccggatcctccctgatgccgcagaagaaaaatccggattcgctggaactcattcgctctaaagccggcagggtgttcgggcggtgtgcaggactgcttatgactctgaagggcttgccgtccacctacaacaaagacctccaggaagataaggaagccgttttcgaggtcagcgataccatgtcggccgttctgcaggtcgcaacgggggtgatctccactctccagatccaccaggaaaacatgggacaggccttgagccctgacatgctggccaccgacctcgcctactacttggtccggaaaggcatgcccttccgccaggcccacgaggcctccggaaaagccgtgttcatggcggaaaccaagggggtggctcttaatcagctctctcttcaggagctgcaaaccatctcccccctgttctcgggagacgtgatctgcgtgtgggactacggccacagcgtcgagcagtacggggccctcggaggcaccgcaagaagctccgtcgattggcagatcagacaagtgagagccctgcttcaggcacaacaagca

SEQ ID NO: 608 - DNA, 1392 bp, Artificial Sequence
  derived and/or modified sequence
atggcctctgagagcgggaagctttggggcggtcgctttgtcggggcagttgatcccatcatggagaagtttaacgcatctatcgcttacgatcgccacctgtgggaggtggatgtccaggggagcaaagcgtattcaagagggctggaaaaagcgggccttctcactaaagctgaaatggaccaaatcctccatggtctcgacaaagtggcagaggagtgggcacaagggaccttcaaactgaacagtaacgacgaggatatccataccgcaaatgagcggaggcttaaggaactaatcggagccaccgctgggaagctgcatacaggtcggtctaggaacgatcaggtcgtgactgacctaagactgtggatgagacagacctgttcaaccctgtctgggctgctttgggagctgatacgcacaatggtggatagagctgaggccgagcgagacgtgttattccccggatatacccacctgcaaagagctcagcccatccgctggtcacattggatcttgagtcacgccgtggcattgaccagggacagcgaacggctgctcgaagtacggaaaagaatcaacgtcctcccgctcgggagcggtgccattgccggcaaccctctcggcgttgaccgggagctcctccgcgcggagttgaattttggtgcaattactttgaattccatggatgccactagtgagagagacttcgtagcagaattcttattttgggcatcgctatgcatgacccacttgtcccggatggctgaagatctgattctgtactgcacgaaggaattctcctttgtacagctgtctgatgcctactcgactgggtcaagcctgatgccccagaagaagaatccagactcactggagctcattcggagtaaagctggtcgggtcttcgggaggtgcgccggtttgctcatgacacttaaggggctgccttctacctacaacaaagatctgcaggaggacaaagaagccgttttcgaggtttctgataccatgagcgctgtgctgcaggtagcaaccggtgtcatatccaccctccaaatccaccaggaaaacatgggccaagctttgtcaccagacatgttggctaccgaccttgcctactatctcgtgaggaaggggatgccattcaggcaggcacacgaagcgtccgggaaggcagtgtttatggctgagacaaaaggggtcgctctgaaccaactaagcctgcaggaacttcaaacaatctctccgcttttttcaggggacgtgatctgtgtgtgggattatggacacagcgtggagcagtacggagcgttgggaggcacagctaggtcctccgttgattggcaaatccgacaggttcgggccctgctccaagctcaacaggct

SEQ ID NO: 609 - DNA, 1392 bp, Artificial Sequence
  derived and/or modified sequence
atggcgtctgagtcaggaaaactttggggaggccggtttgtgggagcggtggaccccatcatggagaagtttaacgcgtcgatcgcttatgatcgccatctctgggaagtggacgttcaaggatcgaaggcctactcacgcggactggagaaggcaggactgctgaccaaagcggagatggatcagatcctgcacggactcgataaggtggccgaagaatgggcacagggcactttcaagctcaatagcaatgacgaggacatccacactgctaacgagagacgcctcaaggaactgatcggagcgactgcaggaaagttgcacaccggacgctcacggaacgaccaggtggtgaccgacctgaggctgtggatgcgccagacttgctccaccctgtcaggactgctctgggagttgatcagaacgatggtggaccgagctgaggcagaacgggatgtgctgttcccggggtacacccacctgcaacgcgctcaacctatccgctggtcgcactggatcctgtcccatgccgtcgcactgaccagggactccgagcgcctcctcgaggtgcggaaacggatcaacgtgctgccgctgggaagcggcgccatcgccggaaatccgttgggagtggaccgggagctgctccgcgcagagctgaacttcggcgcgattacgctcaattcgatggatgccacctcagagagggattttgtcgcggagttcctcttctgggcgagcctgtgcatgacgcacctgtcgcggatggcggaagatcttatcctttactgcaccaaggaattctcgttcgtgcagctgtcagacgcgtacagcactggaagctccctgatgccgcagaagaagaacccggactcgctggaactcatccggtcgaaggcgggacgggtgttcggccgctgtgccggacttcttatgaccctgaaaggtctgccaagcacctacaacaaggacctgcaggaggacaaggaggccgtgttcgaggtgtcggatactatgtcggccgtgctccaagtggccaccggagtgatctcgacgttgcagatccatcaggaaaacatgggacaggcactgagcccagacatgctcgcgactgatttggcctactacctggtgcgcaagggcatgccgttccgccaggcccacgaagcgtcgggtaaagcggtgttcatggcagaaaccaaaggagtggccctgaaccagctgtcgctgcaagagctccagactatcagccctctcttcagcggcgacgtgatctgtgtgtgggattacggccactcggtcgaacaatacggcgcactgggagggactgcccggtcgtctgtcgattggcaaatccgccaggtaagagctctgctccaagcccagcaggcg

SEQ ID NO: 610 - DNA, 1392 bp, Artificial Sequence
  derived and/or modified sequence
atggccagcgaatccggtaagctctggggtgggaggtttgttggcgcagtcgatcccatcatggagaaattcaacgcatcgattgcatacgatcgacacctttgggaggttgatgtgcagggatcgaaggcctactctcgcggactcgagaaggctggccttcttaccaaggcagagatggaccagatcctccacggccttgataaggtcgccgaagagtgggcccagggaacgttcaagttgaactccaatgatgaagatatccatactgctaacgagaggaggcttaaggaactgattggagctactgcagggaaactgcatactggtaggtcaaggaacgatcaagtcgttaccgatctcaggctttggatgaggcaaacctgtagcaccctttcgggtttgctctgggaacttatacgaactatggtggatcgtgccgaagccgaacgagatgtgctgtttccgggttacactcatcttcaacgcgcccagcccatacggtggtcgcactggattctgagccatgccgtggcacttactcgcgattccgagaggcttctggaagtgagaaagagaattaacgtgctgcccctcggatcaggagccattgcgggtaatcctctgggagtggatcgagaattgttgcgcgctgagctgaacttcggcgcaattactctgaactcaatggatgcgaccagcgagcgtgatttcgtcgcagaatttcttttttgggcatctctttgtatgacccatctttcaagaatggccgaagatctgattttgtactgcactaaggaattctcgtttgtgcaactgtccgacgcatattccacggggtcgagcctgatgcctcaaaagaagaatccagatagcctggaactgattcgatccaaggcggggagagtgttcggaagatgtgctggactgctgatgacgctgaagggattgccttccacgtacaacaaggacctccaagaagataaagaggcagtgttcgaagtgtccgacaccatgagcgcagtgctgcaggtggcgaccggcgtgatatcgacccttcagatccaccaggagaatatggggcaagcactgtcacccgacatgcttgcaactgatctcgcgtactacctggtgagaaagggcatgccatttagacaagcacacgaggcatcaggtaaagcagtctttatggcagaaaccaaaggtgtggccctgaatcagctttcgctgcaggaactccaaaccatttcgccacttttctccggtgatgtgatttgtgtgtgggattacgggcatagcgtggaacagtacggagcactcgggggcaccgccagaagctccgtggactggcagattagacaggtccgcgcactgcttcaagcccagcaggcg

SEQ ID NO: 611 - DNA, 1392 bp, Artificial Sequence
  derived and/or modified sequence
atggcctctgaatctggcaagctctggggaggccgctttgtcggggcggtagacccgattatggaaaagttcaatgctagcatagcttacgatcgccatctatgggaagtggacgtgcaggggtctaaggcctactccaggggccttgagaaggcaggcttactaactaaggccgaaatggatcagatattgcatggtcttgacaaggtcgctgaagagtgggcccagggaacatttaaactgaatagtaatgacgaggatattcataccgccaatgagcgccgtcttaaagagctaatcggagctaccgccggcaagttgcacaccggccgctcgcgaaacgatcaggtagtgacggatctgaggctgtggatgcgacagacgtgctctaccctttctggcctactgtgggaactcatacgaaccatggtggacagagcagaagctgaaagggatgtgctgttcccagggtacacacaccttcagcgtgctcaacccattaggtggtctcactggatcctctctcacgccgtggcactgacccgcgacagtgaaagattgttagaagtccgcaaaagaattaatgtactccccttgggcagtggggctatcgccggcaaccccttgggtgttgatcgggagttgttacgggcagagttgaacttcggagccattacactaaactctatggatgcaacctctgagcgggatttcgtggctgagttcttattctgggcttccctttgtatgactcacctttcacgcatggcggaagacttaatcctgtattgcaccaaggagttcagctttgtgcaattgtctgatgcctactctacaggttcttcactgatgccacaaaagaaaaaccccgattccctcgaattgatccggtccaaagctggcagagtctttggaaggtgtgcaggtctactgatgactctgaaagggttgcctagcacctataacaaggacttgcaagaggacaaggaggcagtcttcgaggtcagtgacaccatgtccgccgttctgcaagtggccacaggagttatctcaactttacagatccaccaagagaatatgggacaggcgctgagcccagatatgctggcgactgacctcgcctactatctagtgcgcaagggaatgccctttaggcaggcccacgaggcctcaggcaaagccgttttcatggctgagaccaagggtgttgcccttaaccagttgtccctccaagagctccagacgatatctcccctttttagcggcgacgtgatttgtgtgtgggactatgggcacagcgtggagcagtacggcgccttgggaggaaccgcccgctcatcagtcgactggcaaattcggcaggtgagagccttgttgcaggcccaacaggcg

SEQ ID NO: 612 - DNA, 1392 bp, Artificial Sequence
  derived and/or modified sequence
atggcatcggagagcggaaaactctggggtggacgctttgtcggggccgtggatccaattatggaaaagttcaatgcctcgatcgcgtacgacaggcacctctgggaagtggacgttcagggctctaaagcctactcaagaggccttgagaaggcaggacttctcacgaaggctgaaatggaccaaattctgcacggcctggataaggtggccgaagaatgggcacaaggaaccttcaaactgaattcaaatgatgaggatattcacactgcaaacgagcgcaggcttaaagaactgattggagcaaccgctggtaagctccataccggccgcagccgcaacgatcaagtggtgactgatcttcgcctgtggatgaggcaaacgtgttccaccctgtcgggcctgctttgggaacttatccgaactatggtggaccgtgcggaggcagaacgcgacgtcttgttccctggatatacccatttgcagcgtgcacagccaatccgctggagccattggattctttcgcacgcagtggcgctgacgagggattcagaacgcctgctcgaggttagaaagcggattaacgtcctgccactgggttcgggggcaattgcaggaaaccccctgggggtcgaccgcgaactcttgagagcagaacttaactttggtgcaattactctgaattctatggatgcaacctcggagcgagatttcgtggcagaatttcttttttgggcgtcactctgcatgacccacctgagccgcatggcggaagatcttatcctgtattgtaccaaggagttttctttcgtccagcttagcgacgcatactcaaccggatcatcgctcatgcctcagaaaaagaaccctgattcgcttgaactcattagatcgaaggcgggtcgggtctttggaaggtgtgccgggcttttgatgacgcttaagggtctgccgtccacctacaataaggaccttcaggaagataaggaagcagtgttcgaagtgagcgacactatgagtgccgtgttgcaagtcgcaactggcgtgatttctaccctgcagatccatcaggaaaacatgggacaagcactctcgcctgatatgcttgccacggacctggcctactacctcgtccgcaagggaatgcccttcagacaagctcacgaggcctcgggaaaggccgtgttcatggccgaaaccaagggagtggcgctgaaccaactgtcactgcaagagctgcaaactatttccccgcttttttccggtgatgtgatttgcgtctgggactacggacattcggtggaacaatacggggctctgggaggtactgccagatcctctgtcgactggcaaattagacaggtccgagcccttctgcaggcacaacaggca

SEQ ID NO: 613 - DNA, 1392 bp, Artificial Sequence
  derived and/or modified sequence
atggcgtcagagagtggaaaactgtggggaggacgcttcgtcggagccgttgatcctatcatggagaagttcaatgcgtccatcgcctatgatcgccacttgtgggaggtggacgtgcagggatctaaggcgtatagtagggggctggagaaggctggactcctgacaaaggcagagatggatcaaatcctccatggtctggacaaggtggcggaggagtgggcacagggaacgttcaaactgaactctaatgatgaagatatccacacagctaacgagcgacgactgaaagaactcattggggcaacggcagggaagctgcacactggcaggagccggaatgatcaggtcgtgactgacttgcggctgtggatgagacagacgtgcagcacgctgtccggattgctgtgggaactgatccgcacgatggtggaccgcgccgaagcggaacgcgacgtgctgttccccggctacacccacctgcagagggcccaacccatcaggtggtcacattggattttgagtcatgccgtggcactgacacgagactctgaaaggctgctcgaggtgcggaagcgcatcaacgtactgcccctcgggagtggagcaatcgccggaaacccactcggggtggacagggagctgctcagggccgaactgaatttcggggccattaccctgaatagcatggacgccacatcagaaagagacttcgtagctgaatttctcttctgggcctctttgtgcatgactcacctgagtagaatggccgaagatctgattctttattgcacaaaggagttctccttcgtgcaactcagcgacgcttactctacaggcagctcactcatgccacagaaaaagaatcccgatagcctggagctcattcggtcaaaagccggacgcgtattcggcaggtgtgcgggattgctgatgactcttaaaggtcttcctagcacctataacaaggatctgcaagaggataaggaggccgtgttcgaggtgtcagataccatgagtgcagtcctgcaggttgccaccggagttatatccactcttcaaatccaccaggaaaacatggggcaggcacttagccccgatatgctggccaccgatctggcatactatctcgtgcgcaagggcatgccgttcagacaggctcacgaagcttccggtaaggcggtgttcatggccgaaacgaagggagtcgctcttaaccagctgagtctgcaagagctgcagacaattagcccactcttcagcggggatgtcatctgcgtgtgggattacgggcacagcgtggagcaatacggcgcgctcggtgggacggcccgatcaagtgtagactggcagatacggcaggtaagggctttgcttcaggctcagcaggct

SEQ ID NO: 614 - DNA, 1392 bp, Artificial Sequence
  derived and/or modified sequence
atggcttcagagtctggtaaactttggggtggacggtttgtgggcgctgttgaccccattatggagaagttcaacgcgtctattgcatatgataggcatttatgggaggtcgacgtccaggggtctaaagcctattcgaggggtctggagaaagccgggttgctcactaaggcagaaatggatcaaattcttcacgggctggacaaagtcgcagaggaatgggctcagggcacttttaaactcaattctaatgacgaggatatccacaccgccaacgagaggcggttaaaggagctaatcggtgcgaccgctggtaagctgcacacaggccgcagccgaaacgatcaggtggtgacggatctgcgactctggatgagacagacctgctctaccctgtcaggcctgctgtgggaactgattaggaccatggtggatagagctgaggctgaaagagatgttctgttccctggctacactcatctacagagggctcagccgataagatggtcacattggatcctgtcacatgcagttgcactgacgcgcgactcggagaggctactggaagttaggaaacgcatcaatgtcctgccgctaggaagcggtgcaatcgcgggaaatccgctcggcgtggatcgagaactgctcagagctgaactgaacttcggcgcaattacactgaacagcatggacgctacatctgaaagagacttcgtggccgagttcctgttctgggcctctctctgtatgactcaccttagcagaatggccgaagacctcatactatattgcaccaaggagttttcctttgtccaactgtctgacgcctattccactggaagttctctaatgccacagaagaaaaaccctgacagtttggagttgatcaggtcaaaggctggaagagtgttcggtaggtgcgctggcctgcttatgacactgaagggccttcctagtacctacaacaaggaccttcaggaagacaaggaggccgtgttcgaggtgtccgatacaatgtcagccgtactgcaggtggctactggagtgatcagcacgcttcaaatacatcaagaaaacatgggccaggccctcagccccgacatgcttgccaccgatctcgcctactacctggtgagaaagggtatgcctttcaggcaggcgcacgaagccagcggtaaggccgtattcatggccgagactaagggggtggctctcaaccagctcagtctacaagagctgcagaccatatcccctctgttttctggtgacgtgatctgtgtctgggactacggtcattctgtggagcaatatggggcactcggtgggaccgctcgttcttccgttgattggcagatcagacaagtgagggccctgttgcaagcccagcaggct

SEQ ID NO: 615 - DNA, 1392 bp, Artificial Sequence
  derived and/or modified sequence
atggcctcggagtccggaaagctctggggcggacggttcgtgggtgccgtcgacccaatcatggagaagtttaacgcgtccatcgcttacgatcggcacctgtgggaggttgatgttcagggatctaaggcttattcgcgaggactggaaaaggcgggcctgttgaccaaagccgaaatggaccagatcctgcacggcttggataaagtggccgaagaatgggcccaaggaacttttaagctgaactctaatgatgaagatatccatacggccaacgagagacgattgaaggagctcatcggagccactgcgggtaagttgcacactgggcgtagccgcaacgaccaggtggtgactgacctgaggctctggatgcgtcagacttgctcgaccttgagtggactcttgtgggaactcatccgcactatggtggaccgggcagaagccgagagagacgtgctcttccctggatacacgcacctccaaagggcacagccgatccgatggagccactggatactgtcacacgccgtcgcactgaccagggactcggaacgcctcctcgaggtccgcaaacggatcaatgtgctcccgttgggatcgggggctatcgctggaaatccgctcggagtcgatcgggaactgctcagggccgaactgaactttggcgcaattaccctgaacagcatggacgccacttccgagcgcgatttcgtggcagaattcctgttctgggcatctctgtgcatgacccatctgagcaggatggcagaagatctcatcctgtactgcacgaaagagttctcctttgtccagttgtccgacgcctactcgacggggagttccctgatgccacagaagaaaaatccagattcacttgaacttattagatcgaaggctggacgcgtgttcggcaggtgtgccggactcctgatgactctgaagggactgccgtccacctacaacaaggacctgcaagaggacaaggaagccgtgttcgaggtgagcgataccatgtcggcggtcctccaagtcgctaccggagtcatttcgaccctgcaaatccatcaggagaatatgggtcaagcccttagcccggatatgctggctaccgacctcgcatactaccttgtgcggaaggggatgcctttccgccaggcgcatgaggcgtcaggaaaagcggtgttcatggcagaaaccaagggcgtggcactgaaccagctctcgctgcaagagctgcagaccatttcaccccttttctccggagacgtaatctgcgtgtgggactacggtcattcagtagagcagtacggcgcgctgggtggcactgcacgctcatcagtggactggcagatccggcaagtccgcgcccttttgcaggcgcagcaagcc

SEQ ID NO: 616 - DNA, 1392 bp, Artificial Sequence
  derived and/or modified sequence
atggcctcggagtccggaaagctgtggggcggacggttcgtcggagcagtcgacccgattatggaaaagttcaacgcctcgatcgcatacgatcgccatctgtgggaagtggacgtgcaaggctcgaaggcttactcccggggactggagaaggcagggctcctcaccaaggctgagatggaccagatcctgcacggacttgataaggttgccgaagagtgggcccaaggcacctttaaactcaatagcaacgatgaagatatccacactgccaatgaaagaagactcaaagagctgatcggagcgactgccgggaagctgcacaccggaagaagccggaacgatcaggtcgtgaccgacctccggctctggatgcgccagacctgctctaccttgtccgggctgttgtgggagctcatccgcaccatggtggaccgcgccgaagccgagagagacgtgctcttccctgggtacacccatctgcagagagcacaacctatcagatggtcgcactggatcctttcccatgcggtggctctgacccgcgacagcgagaggctcctcgaggtccggaagcgcatcaatgtgctgccgttggggtcgggagctattgcaggaaaccccctgggagttgaccgagaactgctgcgcgcagaactgaattttggagctatcacgctcaactcgatggatgctacctccgagcgggatttcgtggcagaattcttgttctgggcgtcactgtgcatgactcatctgtcccggatggctgaggaccttattctgtactgtactaaggaattctcatttgtccaactgagcgacgcttacagcaccggatccagccttatgccgcagaagaaaaaccccgattcattggaactgatccgctccaaagctggacgggtcttcggcaggtgtgcagggctcctgatgactctcaaaggcctgccgtccacttacaataaagacctgcaggaggacaaggaggccgttttcgaagtcagcgacacgatgtcagccgtgcttcaggtggctacgggagtgatcagcactctccaaatccaccaagaaaatatgggacaggccttgtcgcctgacatgctggcaaccgacctcgcctactacctcgtgcgtaagggcatgcctttccgccaggcacacgaagcctcgggaaaggcagtgttcatggccgaaaccaagggagtcgcactgaatcaactttcccttcaagagctccaaactatatctccactgttctctggagacgtgatctgcgtgtgggactacggtcactcagtcgagcagtatggagctctcgggggcactgcccgctcgtcggtggactggcagatcaggcaggttcgggcccttctgcaagcccagcaggcg

SEQ ID NO: 617 - DNA, 1392 bp, Artificial Sequence
  derived and/or modified sequence
atggcatccgaatcgggaaaactttggggaggacgttttgtcggggcagtggaccctatcatggaaaagtttaacgcatcaatcgcatatgaccgacatctgtgggaagtggatgtgcagggaagcaaggcatactccagaggtctggaaaaggctggtctgttgaccaaggcagaaatggatcaaattcttcatggtcttgataaagtggcagaagagtgggcccagggaaccttcaagctgaactccaacgacgaggatatacataccgccaatgagcggagactgaaagaacttattggtgcaactgcaggtaaattgcacactgggaggtcccgcaacgatcaagtggtgaccgacctgcggctgtggatgagacagacttgtagcactctttccgggcttctgtgggagcttataaggaccatggtggaccgggcggaggcagaacgtgatgtcctgtttcctgggtacactcatctgcaaagggcacagcctattcggtggtcccattggatcctttcacacgcagtggcactgacccgagattcagaaaggcttctcgaagtgaggaagaggattaacgtgctgcccctcggttcgggggcaattgcaggtaaccccctgggagtggatagagagctgctccgtgccgagctgaatttcggagcaatcactctgaattccatggatgcgacttcagaaagagatttcgtggcagaattcctgttttgggcgtcgttgtgcatgacccatctgagccgaatggccgaagatcttattctttactgtaccaaggagttttccttcgtgcaactgtccgatgcctacagtaccggttcgagcctgatgccacagaagaaaaaccctgattcactcgagcttattcgcagcaaagcaggacgggtctttgggcgctgcgcaggtctgctgatgaccctcaagggtctgccgtcgacttacaacaaagacttgcaggaggacaaagaggcagtctttgaagtcagcgacaccatgagcgcggtgctgcaagtggccactggagtcatctccactctgcaaatccaccaggaaaacatgggacaggccctctccccggatatgcttgctaccgatctggcatactacctggtgagaaaaggtatgccatttaggcaggcccacgaggcgtccggaaaggctgtctttatggcggaaactaagggcgtggcgctgaaccagctttcgctgcaggagcttcaaactattagccctctcttcagcggagatgtgatctgtgtgtgggattacggccattccgtggaacagtacggagcactgggaggaaccgccaggagctcagtggactggcaaattcgtcaagtgagggcattgttgcaagcgcagcaagct

SEQ ID NO: 618 - DNA, 1392 bp, Artificial Sequence
  derived and/or modified sequence
atggccagcgagagcggaaagctctggggaggccgcttcgtcggcgccgtggatcccataatggagaagttcaacgcctccatagcttatgacagacacctgtgggaggtcgacgtgcagggatctaaggcctatagcaggggcctggagaaggccgggcttctgacgaaggcagagatggatcaaattctacacggacttgacaaagtggcagaagaatgggctcaaggaacctttaaactgaatagcaatgacgaggatattcataccgctaacgagagacgcctgaaggaactcattggcgccaccgctggtaaactgcacaccggtagaagccggaatgatcaagttgtgacagacctgagattgtggatgcgccagacctgtagtactctgtccgggcttttatgggagctcatccggactatggtagacagagcagaggcagaaagagacgtcctcttcccaggatacacccatctacagcgcgcccaacctattcgatggtcccattggatactgtcccacgctgtggccctgacgagagactcagagcggctgctcgaggttcgtaaacgtatcaatgtgttaccgctgggctccggcgcaattgccggcaatcctctcggggtggaccgtgaactcctgcgggccgaactgaattttggagctatcacactgaactctatggatgctacgagcgaacgcgactttgttgctgaatttctgttttgggcctctctgtgtatgacccatttatccaggatggccgaagacttgatcttgtactgcacaaaagagttttcatttgtgcaattaagcgatgcgtattctacgggttctagcctgatgccacagaagaaaaaccccgatagtctggaacttatcagatcaaaggcaggaagggtgttcggcaggtgcgcgggactgctcatgaccctcaagggacttccaagcacttacaacaaagatttgcaagaagacaaggaggccgtctttgaggtgagcgacacaatgagtgctgtgctacaggtggcaaccggtgtgatttcaactctgcagatccaccaggagaatatggggcaggcactgtctcccgacatgctggcaactgatttagcctactatctggtcagaaagggaatgcccttcaggcaggctcacgaagcctctggaaaagctgtgttcatggccgagaccaaaggcgtggctctgaaccaactgagtctccaagagcttcaaactatctcccccctgtttagcggagacgtgatttgtgtctgggattatgggcactccgttgagcagtatggcgcattgggcggcaccgcgcgttcaagcgtcgattggcagatacgacaggtgagagcgctattgcaagctcagcaagcg

SEQ ID NO: 619 - DNA, 1392 bp, Artificial Sequence
  derived and/or modified sequence
atggcttccgagtccggaaagctttggggaggaagatttgtgggcgctgtcgaccctatcatggaaaagttcaacgcatccatcgcctacgatcgtcatctctgggaggtggacgtacagggttccaaggcctactcccgcggtcttgaaaaggctggcctcttgaccaaagctgagatggaccagattcttcacggacttgataaggtggctgaggagtgggctcaaggtacttttaagttgaacagcaacgatgaggatattcatacagccaatgaaagacgcctgaaggagctgatcggcgctacagccggaaagctgcacaccggacgctccaggaacgatcaggtcgtgaccgatcttagactttggatgagacaaacctgttctaccctgtctggactcctgtgggagctgattaggactatggtcgaccgcgcagaagccgagagagatgttctcttcccaggttacacccaccttcaaagggcccaacccatcaggtggtcccattggatattgtctcacgcagtggcactcacccgcgacagcgaacgcctgctggaagtcaggaagcgtatcaacgtcctgcccctgggcagcggagctattgccggcaaccctctgggagtggaccgtgagctgttgcgtgctgagttgaattttggagctatcaccttgaattcaatggatgctaccagtgaaagagatttcgtggcagaatttctgttttgggcatctctttgtatgacccatctgagtcgtatggctgaggatcttatcctctattgtacaaaggagttcagctttgtacagctgtcagatgcttattctaccggctcttcccttatgccccagaagaagaatccagattctctcgagctcatacgctccaaggccggtcgtgtgttcggacgttgtgccggcctgcttatgactcttaaaggtctgccctctacatataacaaggatctccaagaggacaaggaagctgtcttcgaagtctccgacactatgagcgccgtccttcaggtcgctaccggcgtgataagcaccctgcagatccatcaagagaatatgggtcaggccttgtcacctgacatgctggctacagatctcgcctactaccttgtaagaaaaggaatgccttttaggcaggcacatgaagcaagtggcaaggctgtttttatggcagagacaaagggagtagctctgaatcagttgagtctccaagagctccaaacaatctctcctctgttctctggtgatgtcatctgcgtttgggattacggtcacagcgttgagcagtacggcgcccttggtggcaccgctcgttctagcgtggactggcagatcagacaagtgcgcgcactccttcaagcccagcaggct

SEQ ID NO: 620 - DNA, 1392 bp, Artificial Sequence
  derived and/or modified sequence
atggcatccgagtccgggaagctctggggaggccgctttgtgggcgctgtggatcctattatggaaaagttcaacgcgtcaatcgcctacgaccgccacctgtgggaagtggatgttcaggggtcaaaggcgtattcacgcgggttagaaaaagcggggctgttaacaaaggccgaaatggatcaaatcctgcacgggttagacaaagtggccgaggagtgggcccaagggacatttaagcttaattctaacgacgaagatatacacacggctaacgagaggcgactcaaggaattgataggagcaaccgccgggaaactccataccgggaggagcaggaacgaccaggtggtcacagacctgcgtctttggatgcgtcagacctgttccaccttgtctggactcttgtgggaattgatacgaactatggtagaccgggccgaagcagaacgggacgtactgttcccgggctacacccacttacagcgagctcaaccaatccgctggagccattggattctttctcacgctgtggcccttactagagactccgagcgcctgttagaggtcagaaagagaattaatgtgttacctttggggtccggagcgatcgccggaaaccccctcggcgtggacagggagctgttgagagcagagctgaatttcggcgcaattacattaaattccatggacgccaccagcgaacgggatttcgttgcagagtttttattttgggctagcttgtgtatgactcatctttcccgaatggccgaggacttgatcctgtactgtaccaaggagtttagtttcgtccaactgtctgatgcatactcaaccggcagcagcctgatgccccaaaagaagaatcctgatagtctagagcttatcagatccaaggctggaagggtgtttggcaggtgtgccggcctgctcatgactttaaaaggcctccccagtacttacaataaagacctccaagaagacaaggaggccgtgttcgaggtgtctgatactatgagcgcggtgctccaggtggccacaggcgtgatttccaccctccagattcatcaggagaatatgggtcaggccctgtcgcctgacatgctggccaccgacctggcctactatctcgttcggaaggggatgccgtttagacaggcccatgaggcatctggcaaggccgtctttatggctgagacgaagggggttgcactcaaccagttgtccctacaggagttgcaaactatctctcctctattcagcggggatgtgatctgcgtctgggactatggccactctgtggaacaatacggtgcccttggaggcaccgccaggagctccgtggactggcagattcggcaggtccgcgcccttctgcaggctcagcaagcc

SEQ ID NO: 621 - DNA, 1392 bp, Artificial Sequence
  derived and/or modified sequence
atggctagtgaaagtgggaaactttggggcggaagatttgtgggggccgtcgatcccattatggagaaatttaatgcttccatcgcgtatgatcgacacctgtgggaagttgacgtccagggatctaaagcctattcacggggactggagaaggccggtttgctgacaaaggctgagatggaccagatacttcacggattggataaagtagcagaggaatgggcacagggaacgtttaaattaaattccaacgacgaagacatccacaccgcgaacgagaggagactcaaagagctgatcggagctacagccggcaagctccatacagggcgatcccgtaacgatcaggtagtgacagatttgcggctgtggatgcggcagacctgctccaccctgtctggattgctttgggagctcattcgaaccatggtggaccgcgccgaagctgagcgggacgtcctgttccccggatatacacacctgcagcgcgcacagcctattcggtggagccattggatcctgagtcatgccgttgcactcacccgcgacagcgaacggctgctggaggtgcggaaacggatcaatgtcttgcccctggggagcggtgccatcgcaggtaatcccctcggggttgatcgggaattgctgagggcagagttgaacttcggtgccattacactaaatagtatggacgccacatcggagagggacttcgtcgccgagtttctgttctgggcttcactgtgcatgacgcatctttcccggatggctgaagacctcatactctattgcaccaaagaatttagctttgtccagctcagtgatgcttatagtactggaagttccctaatgccacaaaagaagaaccctgactcgttggagctgataaggagcaaggcgggcagagtcttcggccgctgtgctgggcttttaatgactctcaaagggttaccaagcacctataacaaggacctccaggaggacaaggaggccgtgttcgaggtgtcggacaccatgtccgctgtgctccaggtggcgaccggcgttatcagtaccttgcagatccatcaagagaacatgggtcaggccctcagtcctgacatgctggccactgacctggcatactatctcgttaggaagggtatgcccttcagacaggctcacgaggcatccgggaaggctgtcttcatggctgagacaaaaggggtcgcgctgaaccagctgtcccttcaggaattacagacgatatctccgctgttttccggggacgtgatttgtgtgtgggattatggccattcggtggagcagtatggcgctttggggggcaccgctcgttcatcggtggactggcagatccgccaggtcagggccctgctacaggcgcagcaggcc

SEQ ID NO: 622 - DNA, 1392 bp, Artificial Sequence
  derived and/or modified sequence
atggcatctgaatcgggaaagctctggggtggtcgtttcgtgggagccgtcgatccgatcatggagaaattcaacgcttcgattgcctacgatagacatctttgggaagtggatgttcagggctcgaaggcatatagcagggggcttgaaaaagcaggcctgttgaccaaggctgaaatggaccagattcttcatggacttgataaggtcgcagaggaatgggcccagggcacctttaagctgaactccaatgatgaggatatacacactgcaaatgaaagacgcctcaaggagcttatcggcgcaactgcaggcaaattgcacactggaaggtcgaggaacgatcaagtggtgactgatttgaggctttggatgcgacagacctgttccactctgtcgggactgctgtgggagctgattcgcactatggtcgatagagcagaagcagaacgcgatgtcctgttccccgggtacactcatcttcagcgtgctcagcccatcaggtggagccactggattctgtctcacgcagtcgcattgaccagagattcggaacgcctgctggaagtgaggaagcgaattaacgtgctcccactgggatcaggagcaatagctggaaatccactcggggtggatcgcgaacttcttcgggccgagcttaactttggagcgattaccctgaactcaatggatgcaacttccgagagggatttcgtagccgaatttcttttttgggcctctctgtgtatgacccatctgtcaagaatggcagaggacctgattctttactgtaccaaggagttttccttcgtccagctcagcgatgcttactcaaccggttcgtcattgatgccacaaaagaagaatcctgattcactggaactgattagaagcaaggcaggacgggtgtttggaaggtgcgcaggtctgctgatgactcttaagggcttgccatcgacgtacaacaaggatcttcaagaagataaggaggccgtgttcgaagtgtcggacaccatgagcgcagtgcttcaggttgcaacgggagtgattagcacgctgcaaattcatcaagagaatatgggtcaggcgctgagcccagatatgctggcaaccgatttggcttactacctcgtgcgcaaagggatgccatttcgccaagcgcatgaagcatcgggtaaggcagtgttcatggcggagactaaaggtgtggcactcaaccaacttagccttcaggaacttcagaccatctcgcctctctttagcggagatgtgatttgcgtgtgggattacgggcattcggtcgaacaatacggggcacttgggggcaccgcacgctcatcagtggactggcaaatccgacaggtccgtgcgctgcttcaagcacagcaagca

SEQ ID NO: 623 - DNA, 1392 bp, Artificial Sequence
  derived and/or modified sequence
atggcatccgaatccggcaagctgtggggcggacgattcgtcggcgctgtggaccctatcatggagaagtttaacgcctccatcgcttatgatagacacttgtgggaggttgatgtccagggcagcaaggcatattctcgaggtctcgaaaaagcgggattgttgacaaaagcggaaatggaccagatccttcacggactggataaagttgcagaggaatgggcccaaggtacctttaagttaaacagtaatgacgaggacattcatactgctaacgaaaggcgactgaaggagctgatcggcgcaacggccggcaaactccacacaggacgcagtagaaatgatcaagtggtcaccgacttgcggctgtggatgaggcagacctgttcgacactgagtggattgttgtgggagttaataaggaccatggtcgacagggcggaagcagagcgggatgttcttttccccggctacacccaccttcagcgcgcacagcctatacgctggtctcactggattctaagccatgcagtggcccttacccgtgattcagagcgactgctagaggtgaggaaacgaataaacgttctgccacttggctcaggagcgatagcggggaaccctttgggagtcgacagggagttactgagggctgaactgaactttggcgctattactctgaatagtatggatgctacctccgaaagggatttcgtagccgaattcctgttttgggcatccttgtgcatgacacatctgtctagaatggctgaagacctgatcttatactgcactaaagagttttcgttcgttcagctatctgatgcatattcgaccgggtctagtctgatgccgcagaagaagaaccccgacagcctggagttgatcagatctaaggccggtagggtctttggcagatgcgctgggctgcttatgacacttaaaggcctgccaagtacctacaataaggatctgcaggaagataaagaggccgtctttgaagtatctgacacgatgagtgctgtgctgcaggttgcgactggcgtcatctcgaccctgcaaatccaccaggagaatatggggcaggcactgtcacccgacatgctcgctacagacctggcttactacctagtccggaagggcatgccttttcgacaggctcacgaggcatcaggaaaagctgtcttcatggctgaaacaaagggcgttgcattgaatcagctaagcctccaggagctccagacgatttcccccctgttttcgggtgatgtaatctgcgtgtgggattatggtcactctgtcgagcagtatggtgcattgggtggcacagcccggtcatccgtggactggcagatccgccaggtgcgcgccctgctgcaagcgcagcaggcc

SEQ ID NO: 624 - DNA, 1392 bp, Artificial Sequence
  derived and/or modified sequence
atggcatcagaaagtggcaagttgtggggaggcagatttgttggagccgtggacccgatcatggagaaatttaacgcgtctatagcatacgatcgacatttgtgggaggtggatgtgcagggctcgaaagcttactcgagaggcttggaaaaagcaggcctcttgacaaaggcagaaatggaccagattcttcacggccttgacaaggtcgccgaggagtgggcccaaggtaccttcaagctcaactctaacgacgaagacattcatactgcaaacgaacggaggcttaaagagctgattggggctacggcgggaaagctgcatactggacgcagcagaaacgatcaggtcgtcactgatttgagactgtggatgcgtcagacctgctccactctctcagggctgctgtgggagttgattcgcaccatggtagatcgtgccgaagcagagagagatgtgcttttcccagggtacactcatctccagcgagcccagccaattcgctggagtcactggattctgtctcacgcagtggcactgacccgagattctgaaagactgctcgaagtaagaaaacggatcaacgtacttcctctaggctctggtgcaatagccggaaatccgcttggcgtggatcgcgaactgctgcgggccgagctgaacttcggggcaattaccctgaactctatggacgctaccagtgagcgggacttcgtggctgaattcctgttttgggcatcactctgcatgacacatttatccagaatggctgaagacctgatcctgtattgcactaaggagttttctttcgtccagctctcggacgcctacagcaccggatccagcctaatgccacagaaaaagaaccctgattcgctggaactcatccgatccaaggctggccgcgtcttcggccggtgtgctggcctacttatgactctcaaaggtctcccctcaacatacaataaggatctgcaggaggacaaggaagccgtctttgaggtttcagatacaatgtccgcagtactgcaggtcgccacgggcgttatcagcacactgcagatacaccaggaaaacatgggacaagccctgtcacctgacatgctggctaccgacttggcctactatttggtcagaaaggggatgccttttcgccaagcccatgaagcatccggaaaagccgtctttatggccgagacgaagggagtcgccctcaaccagctgtctcttcaggaacttcagacaatcagcccactcttttctggagacgtgatttgcgtctgggattacgggcacagtgtagagcagtatggagcgttaggcggcaccgctaggtcatcagtggactggcagatacggcaggtaagagcactgctgcaagcacagcaggcc

SEQ ID NO: 625 - DNA, 1392 bp, Artificial Sequence
  derived and/or modified sequence
atggcgtcggaaagcggaaaactgtggggaggccggttcgtgggagcagtggatccaattatggagaagtttaatgcttccattgcatacgatagacatctttgggaagtggatgtgcagggtagcaaggcgtactcgagaggcttggagaaagctgggttgcttactaaggccgagatggatcaaatcctgcatggcctcgacaaggtggcagaggaatgggcacaaggaacttttaagctgaactcaaacgacgaggacatccacacggcgaacgagaggcgcttgaaggaactgattggggcgacggcagggaaactgcatacgggtagatcgcggaacgaccaagttgtgacggacctccgtctttggatgcggcaaacctgttcgaccctgagcggacttctctgggaactcataaggactatggtggatagggcagaagcagaacgcgatgtgctttttccaggatacacgcacctgcaacgggcacaacctattagatggtcacactggatccttagccacgcagtcgcacttactcgggactccgaacggttgcttgaagtgaggaagcgaattaacgtgcttcctctcggaagcggtgcaattgctggaaatccgcttggggttgacagagaactgttgagggcagagctcaactttggtgccatcactcttaacagcatggatgcgacttccgagcgcgattttgtggcagagttcctgttttgggcgtccctctgtatgacccatcttagccgcatggcagaagatctcatcctttactgtactaaggaattctcctttgtccaactgagcgacgcatactcaaccggatcctcactgatgccgcaaaagaaaaatccagattcgctggaacttattaggagcaaggctggacgtgtgttcggtcgatgtgcagggcttctcatgacccttaaaggcctgcctagcacttacaacaaagatcttcaagaagataaggaggccgttttcgaagtgtcagataccatgtcggcggtcctccaggtcgcaaccggagtgatctcaactctgcagattcaccaggaaaacatggggcaggcactttcgcccgatatgttggctactgacctcgcgtactacctggtgcgaaagggtatgccattcaggcaagcacatgaagcaagcggaaaagccgtgtttatggcagagactaagggagtagcgctgaaccagctttcgcttcaagaactccagacgatctctccactcttctcaggagacgtcatctgtgtgtgggattatggacattcagtggaacagtacggagcacttggcggcactgcacgaagttccgtggattggcaaatcagacaggtcagagcattgctgcaggcacaacaagca

SEQ ID NO: 626 - DNA, 1392 bp, Artificial Sequence
  derived and/or modified sequence
atggcgtcagaatcgggaaagctgtggggaggacgatttgtgggcgcggtcgaccctatcatggagaagttcaatgcctccatcgcttacgatcgccatctttgggaagttgacgtgcagggatcaaaggcttattcacgaggtttggaaaaggctggccttctcaccaaggcagagatggaccaaatcctgcatggactggataaggtggccgaagaatgggcgcagggaaccttcaaactcaactccaatgatgaggacatccatactgccaacgagcggcggctcaaagaactgattggtgcaaccgccgggaaactccacaccggccggtcccgcaacgaccaggtggtgacggaccttcggctgtggatgcgacaaacctgctcgacgctcagcggactgttgtgggagctgatccgcactatggtggatcgggcggaagccgaacgggatgtcctgttcccaggttacacccacttgcagcgcgcccaaccgatcaggtggtcgcactggatcctgagtcacgcagtcgcccttacccgggactcagagagactgctggaggtgcggaagcgaataaacgtcttgccgctcgggtccggagccatcgctggaaaccccctgggagtcgatcgcgagctgctccgcgctgagctgaatttcggagcgatcactctgaattccatggacgctacttcagaacgggacttcgtggcagaattcctcttctgggcatcgctgtgtatgacccatctttcccgtatggcggaagatctgatcctctactgcaccaaggaattttcattcgtgcaactgtcggacgcgtactcaaccggctcgagtctcatgccacaaaagaagaatccagactcgctggagctgatcaggtcgaaggccggtagagtgttcggaagatgcgctgggctgttgatgactctgaagggacttccttccacttacaacaaagatctccaggaggacaaggaggccgtgtttgaagtctcagacactatgtccgcagttctccaggttgccactggggtcatctccaccctgcagattcaccaggaaaacatgggacaggcactgtcaccagatatgctcgcgactgatttggcctactacctggtccgcaaaggtatgccgtttcggcaggcccatgaagcctcgggcaaggccgtgttcatggcggaaacgaaaggtgtggcccttaaccagctgtcactgcaggaactgcaaaccatatcacctctcttctctggagacgtcatctgcgtgtgggactatggtcactcagtcgaacaatacggggcgctgggaggaaccgctagaagctcggtggactggcaaatccgccaggtgagagcacttctgcaagcccagcaggcc

SEQ ID NO: 627 - DNA, 1392 bp, Artificial Sequence
  derived and/or modified sequence
atggctagcgaaagtgggaaactgtggggaggtcggtttgtaggcgcagtggaccccatcatggaaaaatttaatgctagtatcgcttacgatcgacatctgtgggaagtcgacgttcagggttccaaagcatattctagggggctggaaaaggctggcctgctgacaaaggctgagatggaccagatcctgcacggactggacaaagtagctgaggagtgggcccagggtacgtttaagctcaattccaacgacgaggacatacacactgctaacgaaagaagactgaaggaacttatcggagcaacggcaggcaagctgcacaccggtagatctcgcaatgaccaggttgtgactgacctgcggctttggatgagacagacatgttccacactgtctggactgttgtgggagctgattcgaaccatggtggatcgggccgaggcagaaagagatgtactgttcccgggatatactcacctccaacgcgcgcagcctattcgctggagccactggattctctctcacgcggttgctctcacccgcgacagcgagcggttacttgaggtgagaaaacgaattaatgtactaccactcggaagtggcgctatcgccggtaatccacttggtgttgaccgcgagctcctgcgggcagagctgaattttggagccataactttaaatagcatggatgctacgagcgagcgagattttgtcgcagaattcctgttctgggccagcttgtgtatgacccatttgagccggatggcggaggatttgatattgtattgtactaaggaattctcatttgtgcagttgagcgacgcttacagtaccggcagctcgcttatgcctcagaaaaaaaatcccgactctctggagttgatccgaagtaaggcgggacgagtattcggtaggtgtgctggcctgctgatgacgctgaaaggtcttccctcaacatacaataaggatctgcaggaagacaaagaagccgtcttcgaagtcagcgatacaatgagtgctgtgctccaggtggctaccggcgtcatttctaccctccagattcaccaggagaacatgggtcaggctctcagccccgacatgctggcaacagatctagcatactatctggtgaggaaggggatgccctttcggcaggcccatgaagcgtccgggaaagccgtattcatggccgagacaaaaggtgtggccctaaaccagctttcactgcaagagttgcagaccatctccccgctgttcagcggagatgtaatctgcgtgtgggattacggtcattcagtcgaacagtacggcgctctagggggtacggcaaggagcagcgtcgactggcagatacggcaggtgcgggccctcctccaggcccagcaagca

SEQ ID NO: 628 - DNA, 1392 bp, Artificial Sequence
  derived and/or modified sequence
atggcctcagagtcgggaaagttgtggggtggccgcttcgtgggagccgtcgatccaatcatggagaaattcaatgcatctattgcgtacgatcgccatctgtgggaggtggacgtgcagggctcgaaagcgtactcacgtggtttggagaaggctggtcttcttaccaaggcggaaatggatcagatactacacggtcttgataaggttgcagaagaatgggcccaggggacgttcaagctcaatagtaacgacgaggacattcacactgcgaatgagcgtcgattgaaagagctgatcggcgcgacggcaggtaagctgcacacgggccgttcccgaaacgatcaagtcgtgacagacctacgtctgtggatgcgtcagacatgctcaacgctgtcgggcctgctgtgggaattgatccgtaccatggtggaccgcgcggaggccgagagggacgtcctcttccccggatatactcacttgcagcgcgctcagcccatacgctggtcgcactggatactcagccacgcagtggctctgacgagggacagtgaaaggctgctggaggtacgtaagcgaattaacgtgctccccctgggatcgggtgccatcgcgggaaacccactaggcgtagatcgcgagcttctgcgtgccgagctgaacttcggcgcaatcactctcaactccatggacgccactagcgagcgcgatttcgtggcagagtttctattctgggcctcgctgtgcatgacacacctttccaggatggcggaagatctgatcctttattgcaccaaggaattctccttcgtccaactgtctgatgcctactcgacgggctcgtccctgatgccgcaaaagaagaaccccgattctttagagctaatccgatctaaggctggcagggtgtttggtcgttgcgcaggactgctgatgaccctgaagggcctccccagtacctacaacaaggacctgcaggaggacaaggaggctgtgttcgaagtaagtgatactatgtcggctgtactacaggtggccaccggcgtgatatccaccctccagatccatcaggagaacatgggacaggccctgtccccagacatgttggctacagatctagcctactatctggttagaaaaggaatgccctttcgccaggcacatgaggcctcgggcaaagctgtgttcatggcggagactaagggtgttgctcttaaccagctgagtttgcaagagctacagaccatctcgcctctgttcagcggcgacgtgatatgcgtttgggattatggccatagcgttgaacagtacggagccttgggaggtacggctcgaagttcagtcgactggcaaatccgacaagtgcgcgcgctgctgcaggcgcagcaggca

SEQ ID NO: 629 - DNA, 1392 bp, Artificial Sequence
  derived and/or modified sequence
atggcgtcggaatcgggtaaactatggggtggtcgatttgttggtgcggttgatccgataatggaaaaatttaatgcgtcgatagcgtatgatcgacatttatgggaagtagatgttcaaggttcgaaagcgtattcgcgtggtttagaaaaagcgggtctattaacgaaagcggaaatggatcaaatattacatggtttagataaagttgcggaagaatgggcgcaaggtacgtttaaattaaattcgaatgatgaagatatacatacggcgaatgaacgacgactaaaagaattaataggtgcgacggcgggtaaactacatacgggtcgatcgcgaaatgatcaagtagtaacggatttacgactatggatgcgacaaacgtgttcgacgttatcgggtctactatgggaactaatacgtacgatggtagatcgagcggaagcggaacgtgatgtattatttccgggttatacgcatttacaacgagcgcaaccgatacgttggtcgcattggatattatcgcatgcggtagcgctaacgcgtgattcggaacgattattagaagttcgaaaacgtataaatgttctaccgttaggttcgggtgcgatagcgggtaatccgctaggtgtagatcgtgaactattacgtgcggaattaaattttggtgcgataacgctaaattcgatggatgcgacgtcggaacgtgattttgtagcggaatttttattttgggcgtcgctatgtatgacgcatttatcgcgtatggcggaagatctaatactatattgtacgaaagaattttcgtttgtacaactatcggatgcgtattcgacgggttcgtcgctaatgccgcaaaaaaaaaatccggattcgctagaactaatacgatcgaaagcgggtcgagtttttggtcgatgtgcgggtctactaatgacgctaaaaggtttaccgtcgacgtataataaagatttacaagaagataaagaagcggtttttgaagtatcggatacgatgtcggcggtattacaagtagcgacgggtgtaatatcgacgttacaaatacatcaagaaaatatgggtcaagcgctatcgccggatatgttagcgacggatctagcgtattatctagtacgaaaaggtatgccgtttcgacaagcgcatgaagcgtcgggtaaagcggtatttatggcggaaacgaaaggtgtagcgctaaatcaactatcgctacaagaattacaaacgatatcgccgttattttcgggtgatgtaatatgtgtatgggattatggtcattcggtagaacaatatggtgcgctaggtggtacggcgcgatcgtcggtagattggcaaatacgacaagtacgtgcgttactacaagcgcaacaagcg

SEQ ID NO: 630 - DNA, 1392 bp, Artificial Sequence
  derived and/or modified sequence
atggcgtcggaatcaggaaagctgtggggagggcgcttcgtgggcgcagtggacccaatcatggaaaagttcaacgcgtcaatagcctacgaccggcacctctgggaggtggatgtgcagggcagcaaggcgtacagccgtggcttggagaaggcaggactcctgactaaggccgaaatggatcagattcttcatggacttgataaagtggcggaggagtgggcccaggggacctttaagctgaattcgaacgacgaggacatccataccgcaaatgagcggcggctcaaagaactcatcggtgcgactgccgggaagctgcatactggacgctccagaaacgaccaggtcgttactgatctgcgactgtggatgagacagacgtgttccaccctgagcggactcctctgggaactcatccgcacgatggtggaccgcgccgaagcggagcgggacgtcctgttccctggatacactcatctgcagcgcgcacagccgatccggtggagccactggatactgtcacacgccgtggcgctgactcgagattcggaacgccttctggaggtccgcaagcgaatcaacgtcctgccgctcggctccggtgccatcgctggtaatccgctcggcgtggaccgggagctcctgcgcgcggagttgaacttcggagcaattactttgaactcgatggacgcaacctccgaaagagatttcgtggccgaattcctcttttgggcgtcactgtgcatgacccaccttagccgtatggctgaggacctgatcctgtattgcaccaaggaattctccttcgtgcagctgtccgacgcgtactcgactggatcgtcgctgatgccgcagaagaaaaacccggacagccttgaactcattcggtcgaaggccggacgggtgtttggccggtgcgctggtctgctcatgactctcaaaggactcccgtcaacctacaacaaggacctgcaagaggataaggaagcagtctttgaggtgtccgatacgatgtccgccgtgctccaggtggctactggcgtgatttccaccctgcaaatccaccaggaaaacatgggacaagcactttcacccgatatgctggcgaccgacctggcctactaccttgtgcgcaaaggtatgcccttcaggcaagcccatgaagcaagtgggaaggccgtgttcatggctgaaactaagggagtggcactgaatcagctgtcgctccaggagctgcagaccatctcgccgctgttctcgggagatgtgatctgcgtgtgggattacggccactcggtggagcaatacggagcactcggtggtaccgcacgctcatctgtggactggcagatccgacaggtgagggcacttttgcaagcccaacaggca

SEQ ID NO: 631 - DNA, 1392 bp, Artificial Sequence
  derived and/or modified sequence
atggcctcggagtcggggaaactgtggggcggccggtttgtgggagcagtggacccgattatggagaaattcaatgcgtcgattgcctatgacagacacttgtgggaagtggacgtgcaaggctcaaaggcttactcgcggggattggagaaggccgggctgcttactaaagccgaaatggatcagattctgcacggactggataaggtggccgaggagtgggcccaaggaacctttaagctcaactcgaacgatgaagatatccatactgctaacgagagacgcctcaaagagctgatcggagctactgccggtaaactgcacaccgggcgatccagaaatgatcaagtggtcaccgacctgcggctgtggatgcggcagacctgtagcactctttcaggactgctgtgggagcttattcgtactatggtggatcgggcggaagcggaaagagacgtcctctttcccggatacactcatctgcaacgagcccagccgatcagatggtcgcattggattctgtcccacgccgttgccctgacccgcgactcagaacgcctgctggaagtccggaaaagaatcaatgttctgcctctgggatcgggagccatcgctggaaatccactgggagtcgaccgcgaactgcttcgcgccgagctgaattttggtgccatcactctgaacagcatggacgcgacctccgaaagagatttcgtggctgagtttctcttttgggcatcgctgtgcatgactcatttgtcccgcatggccgaagatttgattctgtactgcaccaaggaattcagcttcgtgcaactcagcgacgcatactcgacgggaagctccctgatgccacagaagaaaaacccggactccctcgaactgatccggagcaaggccggacgcgtgtttggaagatgcgctggcctcctcatgacgctgaaaggcctgcctagcacttataacaaggatctgcaggaagataaggaagccgttttcgaggtgtcggacaccatgtctgccgtgctccaagtcgcaaccggcgtgatcagcaccctgcaaatccaccaggagaatatgggccaggccctgtctcctgatatgctggcgaccgacctcgcctactacctcgtgaggaagggtatgccattcaggcaagcacacgaggcatcagggaaagcagttttcatggcggaaactaagggtgtcgccctcaatcaactgtcactgcaggagctccagactatcagcccgcttttctcaggagacgtcatctgcgtgtgggattacggtcatagcgtggagcagtacggagccctcggcggaaccgcacggtcgtcggtggattggcaaatacgacaagtgcgcgccctgctgcaggcccaacaggct

SEQ ID NO: 632 - DNA, 1392 bp, Artificial Sequence
  derived and/or modified sequence
atggccagcgaatcgggaaagctctggggtggacgctttgtgggcgcggtcgacccaatcatggagaaattcaacgcatctatcgcatacgaccgccacctgtgggaggtggatgtgcagggatcgaaggcgtactccagaggattggaaaaggccggtctgctgaccaaggcggaaatggaccaaattctgcacggactggacaaggtcgctgaggagtgggcccaaggaactttcaagctgaactccaacgatgaggacatccataccgccaacgaacggaggctgaaagagcttatcggggcgaccgcaggaaagctgcacaccggacgctcaagaaatgatcaagttgtgactgacctccgcttgtggatgcggcagacttgctcgactctgtccggcctgctctgggaactcatcaggactatggtcgaccgtgcagaggcagagagagatgtgctgtttcccggatacacccacctccagcgggctcaaccgattcggtggtcccactggatcctttcgcacgcggtggctctgacccgggactccgagcgccttctcgaagtccggaagcgaatcaatgtccttcctctcggtagcggggctatcgccggaaatccactgggtgtggatcgggagctcctgagagcggaactgaacttcggagctatcaccctgaactcgatggacgccacctctgaacgcgactttgtggcagagttcttgttctgggcttccctgtgcatgacgcatctctcacggatggctgaggacttgatcctgtactgcaccaaagagttctcatttgtgcaactgtcggacgcatacagcacgggaagttcgctgatgccgcagaagaagaatccagattcactcgaactgattcgcagcaaagcgggccgcgtgttcgggagatgtgccggcctccttatgacgctgaaagggctgccgtccacctacaacaaggatcttcaggaagataaggaagccgtgttcgaggtcagcgacactatgtccgcggtgctccaggtggcaactggagtgatctcgactctccagatccatcaggaaaatatgggacaagccttgtcgcctgatatgctggccactgacctcgcctactacctggtgcgcaaaggcatgccgttcaggcaggcccacgaagccagcggcaaggccgtgttcatggccgaaaccaagggcgtagcgctgaaccagctgtcgctgcaagaactccaaaccattagcccgctgttctcaggcgacgtcatctgcgtgtgggactacgggcattcagtggaacaatatggagctctcggaggcactgcaaggagctccgtcgattggcagatccgccaggttagagccctgttgcaggcccagcaggcg

SEQ ID NO: 633 - DNA, 1392 bp, Artificial Sequence
  derived and/or modified sequence
atggcatcagaatcagggaaactttggggaggaagatttgttggagcagtggaccccattatggagaagtttaatgcgagcatcgcatacgatagacatctttgggaagtcgacgtgcagggatccaaggcttacagccggggtttggagaaggcaggtctgctcaccaaggcagaaatggaccaaattcttcatggacttgataaggtcgctgaagaatgggcacagggaaccttcaagctcaattccaatgatgaggacattcataccgcgaacgagagacgccttaaggagctgatcggagcaactgccggcaagctgcataccgggaggtcacgaaacgaccaagtcgtgactgatttgagactgtggatgaggcagacgtgcagcacgctctccggacttctgtgggaactgatcagaactatggtggatagagcagaggcagaacgggatgtgctctttcctggttacacccaccttcaaagagcccagcctattagatggtcccattggattctgtcccatgccgtcgcacttactagagattccgaacggctgcttgaagttagaaaacggattaatgtgctgcccctggggtcgggggcaattgccggcaacccgctcggggtcgatcgggaactgcttcgtgcggaattgaattttggggcaattactcttaactccatggatgcaacctcggagcgggattttgtcgcagagttcctgttctgggccagcctttgtatgacccacctgtctcggatggcggaggaccttattctttactgtaccaaggaattctcgtttgtgcaactttcggatgcgtactccaccggctcctccctcatgcctcagaagaagaacccggactccctggagcttattcgcagcaaggccggacgtgtctttggaagatgcgccggtttgttgatgacccttaaaggccttcctagcacgtacaacaaggatctccaagaagataaggaggcagtgtttgaagtctctgatactatgagcgcagtccttcaggtggcaaccggtgtcatctcgaccctgcaaatccatcaggaaaacatgggacaagccctcagcccagacatgctggcaactgacctggcatactacctggtgagaaaggggatgccttttagacaagcacatgaagcatccggtaaggcagtgttcatggctgaaactaagggtgtggccctgaatcaactttccctccaagaacttcaaaccatctcgccactgttttcgggtgacgtgatctgtgtgtgggactacggtcatagcgtcgagcagtatggagcacttggaggcaccgccaggtcctcggtggattggcagatcagacaagtcagggccctgctgcaagcacaacaggca

SEQ ID NO: 634 - DNA, 1392 bp, Artificial Sequence
  derived and/or modified sequence
atggcctccgagtccgggaagctctggggtggacgctttgttggagccgtggatcctattatggaaaagtttaacgcgtctatagcttatgaccgacacctgtgggaggtggacgtgcagggatccaaggcctactctagaggactcgagaaagccggtctcttaaccaaggcagagatggatcagattttgcatggcctagataaggttgcagaagagtgggcccagggcacttttaagttgaattctaatgatgaagacattcatacagccaatgaaaggagactcaaggaactgattggggctaccgccggaaagctacacacgggacgttccaggaacgaccaagtggtcaccgatctgagactctggatgagacagacttgcagtaccttaagcggtcttttgtgggagctgattagaaccatggtcgatcgcgctgaggcggagcgagacgtgttgtttccaggttacacccacctccaacgcgcccaaccaatacggtggtcacactggatactctcccacgccgttgctctcaccagagattccgagagactcctggaggttaggaaaaggatcaatgtactcccactgggatctggagccattgctggcaatccactgggggtcgatcgggagctgctccgcgctgagctgaatttcggcgccattacactgaattccatggacgccacatccgagcgcgacttcgtggcagaatttctcttctgggcctctctttgcatgacacacttatcccgcatggctgaggacctcatcctttattgtaccaaggagttctctttcgtgcagttgagcgacgcctattcaaccggctcttccttgatgccgcagaagaaaaaccctgactctctagagctcattcgtagcaaagcaggcagagtattcgggcggtgcgctggacttctgatgaccctgaagggattaccctccacctataacaaggacctacaagaggacaaggaagccgtatttgaggtatcagacacgatgtctgcggttctccaggtcgcaaccggcgtgatctcaactcttcagatccaccaggagaatatggggcaagccctttcaccggatatgctcgcaaccgacttggcgtattacctggtgaggaaagggatgcccttccgacaggctcatgaagcaagcggaaaggccgtgttcatggctgagacgaagggcgtagctttgaaccaattaagtctccaggagctgcaaacaatcagccctttgttctccggcgacgtaatctgcgtgtgggattatgggcactccgtggaacagtacggtgccctgggaggaaccgcaaggtcctctgtcgattggcagattcggcaggtacgagctctgctgcaggcacaacaagca

SEQ ID NO: 635 - DNA, 1392 bp, Artificial Sequence
  derived and/or modified sequence
atggcgtccgaatctgggaagctgtggggtggaagatttgtgggagcagtggatccaatcatggaaaagtttaatgcttccattgcctacgatagacatctgtgggaggtggacgtgcaaggctcgaaggcgtactcgagggggttggagaaagcaggactgctcactaaagccgaaatggatcaaattcttcatggtctggacaaggtcgcagaggaatgggcacaaggaacttttaagctgaattccaacgacgaagatatccataccgcaaacgagcgaaggcttaaggaattgatcggagctacggcagggaagctccatactgggaggtcgcgtaatgatcaagtggtgactgaccttagactctggatgcgacaaacctgttcgactcttagcggtttgctctgggaactcatccgtaccatggtggatcgcgcagaggcagagagagatgttctttttcccggatacactcatctgcagagggcacaaccaatcagatggtcgcactggatcctgagccatgcggtggcgcttacccgagattcagaacgcttgcttgaggtgagaaagcggattaatgtccttccgcttgggtcaggtgcaattgccggaaaccctctcggggtggatcgggaacttctccgggcggaactgaactttggagcgattacgctgaattcaatggatgcaacctccgaaagagatttcgttgccgaattcctgttctgggcgtccctttgcatgacgcatctgtcacgaatggcagaagatttgattctgtactgtacgaaggaatttagctttgtccaactgtccgatgcctactccaccgggtcctcactgatgcctcaaaagaagaaccctgattcgctcgagctgatcagatcgaaagcaggacgcgtgtttggacgatgtgcgggccttctcatgaccttgaaaggactccctagcacttacaacaaagatctgcaggaagataaagaagcagtgttcgaagtctcagacactatgtcagcagtgttgcaggtggcaactggtgtcatttccactttgcaaattcatcaagagaatatgggacaagccttgtcgccagatatgttggcaactgacctcgcttactaccttgtccgtaagggaatgccctttcgccaggcacacgaggcatcaggtaaagccgtgtttatggccgaaacgaagggcgtagcacttaatcagctgagcctccaagaacttcagaccatttcgccgcttttttccggtgatgtgatctgtgtctgggattacgggcattcagtggaacaatacggtgcccttggcggaactgcaagaagctccgtggattggcagatacggcaggtccgcgcactcttgcaggcgcaacaggca

SEQ ID NO: 636 - DNA, 1392 bp, Artificial Sequence
  derived and/or modified sequence
atggcaagtgagtctggaaagctttggggcggccggttcgtaggagccgtggaccccatcatggagaagtttaacgcttccattgcttatgaccgacatctatgggaagtggacgtccaggggagtaaggcgtatagtcgagggctggaaaaagctggccttctcacaaaagctgagatggaccagatactgcatggcctagataaggttgctgaggagtgggcccagggtacctttaaactgaacagcaatgacgaagacatacacactgcaaatgaacgccggcttaaggagctaattggggcaacggcgggtaagctacatactggaagatcccgtaatgatcaggtggtgactgaccttaggctctggatgcgccaaacctgtagtaccctttcagggctcctttgggagctcattagaacaatggtcgaccgggcggaggctgagagagatgtgttgttccctgggtatacccaccttcaaagagcccagccgattcgctggtcacattggatcctcagccacgccgtggcccttacgagggatagtgagcggttgctagaggtgcggaaaagaattaatgtcctgcccctcgggagtggtgccatcgccggcaaccccctcggagttgatagggagttgctgcgcgccgaattaaactttggtgctatcaccctgaattccatggacgccacgtcagagagagactttgtggccgagtttctcttttgggcgtccctgtgcatgacacacctctcgcgcatggccgaggatcttattctatattgcaccaaggaattcagcttcgtgcagctctcagatgcgtactcaacaggatcttctttaatgccgcagaaaaagaaccccgactctctggaactgatcagatcaaaagctggcagggtgttcggaagatgtgctggcttgctgatgaccttgaaagggctgcccagcacatacaataaggacctgcaagaggacaaagaggccgtctttgaggtgtcagacacaatgtccgcggttctgcaagtggctacgggggtaatcagtacccttcagattcatcaggagaacatggggcaggctctgtcacctgacatgctggccacagacctggcctattatctggtgcggaaaggcatgcccttccgacaggcacacgaagcgagcgggaaggccgtgttcatggcagaaacaaagggcgtggctttgaaccagttatctctgcaagagctccagacaataagccccctattttcaggtgacgtcatctgcgtgtgggattacggccattccgtcgaacagtatggggctctcggtgggaccgcacgcagcagcgtagactggcagattcggcaggtgcgagctctgcttcaggcacagcaggcc

SEQ ID NO: 637 - DNA, 1392 bp, Artificial Sequence
  derived and/or modified sequence
atggcaagtgagtctggcaaactttggggcggacgttttgtcggtgcagtcgatcccattatggaaaaatttaatgctagcatcgcatatgatagacacctctgggaagtggatgtccaaggttcgaaggcctatagtaggggattggagaaggcaggcctattgacgaaagctgaaatggaccaaatcttgcatggacttgataaagtggcggaagaatgggcacaaggcacgttcaagctaaattcgaacgatgaggatatacatacggctaatgagcgtcgactcaaggagctgattggagcgaccgctggaaagctgcacacgggacgttcgagaaacgatcaagttgttaccgatcttaggctttggatgcgtcaaacgtgctcaacgctgtcaggcctgctttgggaacttatccgtaccatggtcgatcgggctgaagctgaaagagatgttctcttccccgggtatacacatctccaacgtgcgcagccgattaggtggagtcactggattttgtcacatgctgtggcactcaccagggattctgaacggttacttgaagtacgtaaacgtattaatgttcttcctcttggatcaggagccatcgcgggcaacccactgggcgtggaccgcgaacttctgcgtgccgaactgaattttggtgcgattaccctcaattccatggatgcaacgtccgaaagagatttcgttgcggagtttttgttttgggcatccttgtgtatgacacatctgtccagaatggccgaagacttgattctatactgcacaaaagagttttctttcgtccaattgtcagacgcttattctacaggttcatcacttatgccgcagaagaaaaatccagattcactagagctcataagatctaaggccggcagagtattcggacgttgtgcaggactcctgatgactctaaaaggtttaccgtctacatataataaagatcttcaggaggacaaggaagcagttttcgaagtttcggacactatgtctgcagtgttgcaagttgcaacgggagtcataagcacgctgcagattcaccaagagaatatgggacaggcactatcaccggacatgctcgctacagaccttgcttattacctagtaagaaaggggatgccgtttcgtcaagctcatgaggccagtgggaaagctgtttttatggctgaaacaaagggagttgcgttgaatcagctgtccctccaggagcttcaaacaatatcgccacttttttcaggggatgttatttgtgtgtgggattacgggcacagtgtcgaacaatacggtgcgctaggaggaacagctcgctcgtcagttgattggcagatcagacaagtccgcgctctgcttcaagcacaacaggcc

SEQ ID NO: 638 - DNA, 1392 bp, Artificial Sequence
  derived and/or modified sequence
atggcctctgaaagcggcaagttgtggggtggcagattcgttggggctgtggatccaattatggagaaatttaatgccagcatcgcctacgacagacacttgtgggaggtggacgtccaagggtctaaggcttactcaagaggcttagaaaaagccggtttgctcacgaaagcagaaatggaccagatattgcacggattggataaggtagcagaagagtgggcgcaggggactttcaagctgaattcaaatgacgaagacatacatacagcaaatgaacgacgattaaaggagctcattggggccaccgcagggaagcttcacacaggcaggtctagaaatgaccaagtggtcactgacctgaggctgtggatgcgccagacgtgctccaccctgagcggtctcctgtgggaattaatcagaaccatggtggaccgtgcagaagccgaacgcgatgtgctcttccccgggtatacccatctacaacgggctcagccaatcaggtggagccactggattctctcacacgcggttgctctaactagagatagtgagcggcttctggaggttcgaaaacgcatcaatgtgctgccacttggcagcggtgctattgctggcaaccccttaggggtggaccgggagctattgagagcggagctgaatttcggtgccattaccctcaatagtatggacgcaacctctgagcgggattttgtagccgaattcttgttctgggccagcctctgcatgacgcatttaagccgaatggccgaagacctcatcctctattgtacaaaagagttctcatttgtacagttgtcagatgcttatagcacaggaagcagcctgatgccccaaaagaaaaatcccgattctctcgagctcataaggtctaaggcgggaagggtattcgggagatgtgccggtttgttgatgactctgaaagggttaccatcgacctacaacaaggacctgcaggaggataaagaggcagtattcgaggtgtccgatactatgtccgccgtgctccaggttgcaactggtgtcatttccactctccaaattcatcaggagaacatgggacaggccctgtcgcctgacatgctggcaactgacctggcgtattaccttgtgaggaagggcatgccctttaggcaggcccacgaagctagcggaaaggctgtgtttatggctgaaacgaagggcgtcgcattaaaccagttgtctctgcaggaactccagactatctcaccactgttctctggggatgtcatatgcgtgtgggattacggccactctgtcgaacagtacggcgctcttggcggcacagcgaggagctccgtggattggcagatacgacaggttagagccctgctgcaggcgcagcaggct

SEQ ID NO: 639 - DNA, 1392 bp, Artificial Sequence
  derived and/or modified sequence
atggcctctgagtccggaaaactttggggagggagatttgtcggagccgttgatcctatcatggagaagttcaatgcaagtatagcatatgatcggcacctgtgggaagttgatgtacagggatctaaagcatattctagaggattagagaaggccggactgctgactaaggcagaaatggatcagatcctacacgggctcgacaaagtcgctgaggaatgggcacagggaacatttaaactaaactctaacgatgaggatatacatacagccaacgaacggagacttaaagaacttataggagcaactgctggaaaattacatactgggaggtctcgaaacgatcaggtcgtgacagacctcagactatggatgagacagacttgctcgacactgtcggggctgctatgggaactaatacggactatggtggatcgggccgaagcagaacgcgatgtgctgtttcccgggtatactcatttacagagagcgcagccaatccgttggtcccattggatcctcagtcacgcagtcgcactgactagggattccgaaaggctcctcgaagttagaaagcggataaacgtgctgcccctagggtcaggagcaatcgcgggaaatccccttggagtcgatcgagaactgctgagggctgaactcaatttcggagctatcacacttaactccatggatgcaacttcagaacgggatttcgtggctgagttcctattctgggcctccctgtgcatgacacacctatccagaatggcggaagacctaatcctctactgtactaaagaattctcattcgtccagctgtctgatgcttattcaactggaagttcactcatgccccagaagaaaaaccccgactccctcgaactgatacgctctaaagctggacgggtgttcggacggtgtgctggactgctcatgactcttaaaggactcccttctacatacaacaaagatctccaggaagataaggaagccgtatttgaagtaagtgatactatgagtgcggtgcttcaggtggctacaggagtcatctccacactccagatccatcaggaaaatatgggacaggctctctcccccgacatgctcgccacagacttagcttattatttagttcgaaaagggatgccattcagacaggcccatgaggcctccgggaaagctgtctttatggccgagacaaaaggagtagccctaaaccagttgtccctccaggaactccagacaatctcgccactattctcgggagatgtgatatgcgtttgggactacgggcattccgtggaacagtatggggccttagggggaactgctagaagtagtgtggattggcagatccgccaggttcgcgccttgctccaggcccagcaagct

SEQ ID NO: 640 - DNA, 1392 bp, Artificial Sequence
  derived and/or modified sequence
atggccagcgagtcaggaaagctttgggggggccgtttcgtaggagctgtggatccaatcatggagaagtttaatgcttccatcgcatatgataggcacctttgggaggttgacgtgcaaggtagtaaagcctattcaaggggtctggagaaagccggccttctaacaaaagctgaaatggaccagatactacatggactggataaagtggcagaggaatgggcacaaggtacgttcaaattgaactctaatgacgaggatatacataccgccaacgagcgtagactaaaagaattgattggtgcgaccgctggtaagttgcatacagggaggtcgcgaaatgatcaagtcgtaaccgacctgaggctttggatgagacaaacttgttctacattgtcaggattgttgtgggaactcataagaaccatggtggatagggcagaggcagaacgtgacgtactattccctggttacactcacctccaaagagcacagccgatcaggtggtcgcactggattctctctcatgccgtcgcactcacaagggactctgaaaggttactcgaggtgagaaagcgcataaatgttttgccactgggttctggtgccattgccggaaacccattgggcgtagatcgggaacttcttcgagctgaattgaattttggtgctattaccttgaattctatggatgctacaagcgagcgtgattttgtggccgagttcttgttttgggcttctttatgcatgacccacttatctcgaatggcggaagatcttatcctgtattgtacgaaagaattctctttcgtccaattgtcggatgcatatagtactggaagcagcttaatgccacagaaaaagaaccctgatagtctagaattgattcgttccaaggctggacgagttttcggaaggtgtgctgggttattgatgacattgaagggtctgccgagcacttacaataaggaccttcaagaggataaagaagcagtgttcgaggttagtgataccatgtccgcagtgctacaagttgccactggagttatttcgaccttacaaattcatcaagagaacatgggtcaagcactctctccagatatgctagcaacagacttggcttactatctggtacgaaagggcatgccctttagacaggcacatgaggctagcgggaaggcagtgtttatggcagaaacaaagggtgtcgcactaaatcaactgtcactgcaggagctgcaaaccatatcacctttgttttctggtgatgttatatgtgtttgggactacggtcacagtgttgagcagtatggggcacttgggggtacagctagaagttcggtcgattggcaaatacgccaggtcagagctcttctccaagcccagcaggct

SEQ ID NO: 641 - DNA, 1392 bp, Artificial Sequence
  derived and/or modified sequence
atggcttcggaatcagggaagttgtggggcgggagattcgtcggcgctgtcgatcctatcatggagaaattcaacgcctctatcgcttatgatcgccatttgtgggaagtggacgtgcaggggtcgaaggcctactcccggggcttggagaaggcggggctgctgaccaaagcagagatggatcagattctgcacggactggacaaggttgcggaggaatgggcacaaggaaccttcaagttgaattctaacgacgaagatatccacactgcaaacgagcgcaggctgaaggaactgatcggagcaactgccggaaaattgcacacgggaagatcccggaacgatcaggtcgttaccgacctgaggctctggatgcggcaaacctgctcaactttgtcgggactgttgtgggagttgatcagaactatggtggatcgcgcagaggccgaacgggacgtcctttttcccggttatacccatctgcagcgagcgcaaccgatccggtggtcgcattggattttgtcacacgccgtcgcgctcacccgggactccgagcgcctgctggaagtgcggaagcggatcaatgtgctgccgctcggaagcggcgccatcgccggaaatccactcggtgtcgatcgggagttgctgcgtgcagagcttaacttcggtgcaattactctgaactcgatggacgccactagcgaacgggattttgtggccgaattcctcttctgggcctcactctgtatgacccaccttagccgcatggcggaggacctgatcctctactgcacgaaggaattcagctttgtgcagctgtccgacgcgtacagcaccggctcaagcctgatgccgcagaaaaagaatcctgactccctggagctcatccgcagcaaggctggacgggtgttcggcagatgcgccggcctgcttatgacgctgaagggactgccgtcgacgtacaacaaagacctccaagaagataaagaagccgtgttcgaagtcagcgacaccatgagcgcagtgctgcaggtggctaccggggttatctcgaccctccagattcaccaggagaatatgggacaggctctgtcgcctgatatgctcgcgaccgacctggcgtactaccttgtgagaaagggaatgccatttagacaagcccatgaggccagcggaaaggctgtgttcatggcggaaaccaaaggagtcgcactcaaccagctgtcgcttcaggaacttcaaactatctcgccgctgttctcgggagacgtgatatgcgtctgggactacggtcacagcgtggaacaatacggcgcgctgggcggtacggcccgctctagcgtggactggcagatccggcaggtccgggcgctgttgcaagctcaacaggcg

SEQ ID NO: 642 - DNA, 1392 bp, Artificial Sequence
  derived and/or modified sequence
atggcctccgaatcgggaaagctgtggggcggccgattcgtgggtgccgtcgatccgatcatggagaaattcaatgccagcatcgcatacgaccggcacctgtgggaggtggacgtccagggctcaaaggcgtactcgagaggactggaaaaggctggcctcctgacgaaggctgaaatggatcagattctgcacgggctggataaagtggcagaggagtgggcccagggtaccttcaaactgaattctaacgacgaggatattcacactgcgaatgaacggcgcctgaaggagctgattggtgccactgctgggaaacttcacactggacgctcgcggaacgaccaggtcgtgactgacctccggctgtggatgcgccagacctgctcaaccctgtccggactgttgtgggaactgattaggaccatggtggaccgcgccgaagccgagcgggatgtcctcttcccgggctacacccatctgcagcgggcgcagccaatccgctggtcccattggatcctttcccatgcagtcgcgctcacccgggactcagagcgtctgctcgaagtgcggaaacgaatcaatgtgctcccgctgggctcaggcgccatcgcaggcaaccccctgggagttgacagggaactcctgcgggccgaactcaacttcggagcaataacgctgaatagcatggacgcaaccagcgagcgggacttcgtggcggagtttttgttctgggcctccctgtgtatgacccatttgagccggatggccgaagatttgatcctgtactgcaccaaggagttcagcttcgtgcaactgtccgacgcgtacagcactggatcgtcgctgatgccacaaaagaaaaacccagactcactggaactgatccgtagcaaggcaggaagagtgtttggaagatgcgcgggacttctcatgaccctcaagggccttcctagcacttacaacaaggacctccaggaagataaggaagcggtgttcgaagtttccgacaccatgtctgcagtcctgcaggtggcaaccggagtgattagcaccttgcaaatccaccaggagaacatggggcaagccctgagcccggacatgctcgccaccgacctggcatactacctggtccggaagggaatgccattcagacaggcacatgaagcatcggggaaagccgtgtttatggccgagactaagggtgttgctttgaaccaactgtccctgcaggagctccaaaccatcagcccactcttttccggagatgtcatatgcgtttgggactacggtcactccgttgaacagtatggagccctgggagggactgcccgctcttccgtggactggcaaatccggcaggtgcgggcgttgctccaggcccaacaggct

SEQ ID NO: 643 - DNA, 1392 bp, Artificial Sequence
  derived and/or modified sequence
atggccagcgagtcagggaagctgtggggcggccgcttcgtcggcgcagtggacccaattatggagaagtttaatgcttctatcgcttacgataggcacctgtgggaggtggatgtgcaggggagcaaagcttattcccggggattagagaaggctggtttactgactaaggccgaaatggatcaaatccttcatggactcgataaagtagccgaggaatgggctcaggggacctttaagctcaactctaacgacgaagatatccacactgccaatgaaagaaggctgaaggagctgatcggagctaccgctgggaaactacacaccgggagaagtcgcaatgaccaggtggtcaccgacctgcgtctgtggatgagacagacctgctctaccctgagtgggctcctgtgggaactgatcagaaccatggtggatcgggctgaggcagaacgggatgtgctatttccaggatatactcatcttcagcgggctcagccaatccgctggagtcattggattctgtctcatgccgtggccttaaccagagatagcgaacggctgctagaggtgcggaagagaatcaatgtgctccccctgggctcaggcgctatagccggtaaccctctgggcgtcgaccgagaactgctacgagccgagctcaacttcggcgctataaccctgaattccatggacgccaccagcgaacgggactttgtcgctgagttcttattctgggccagcttatgcatgacccatctgtccagaatggccgaggaccttatactctactgcacaaaagaatttagttttgtccaactgtccgacgcatattccacaggctcttccctgatgccacagaaaaagaaccctgactccctagaactgatcaggtctaaagctgggcgggtgttcggccggtgcgcagggctgctgatgacactcaaagggctcccaagtacatataacaaggacctccaagaagataaagaagcagtctttgaggtgtctgacactatgtccgctgtcctgcaggtggccaccggcgtgataagcaccttacagatacaccaggagaacatgggccaggctctctctccagatatgctggcaaccgatcttgcctattatttggtcaggaaggggatgccttttaggcaggcccacgaagctagcggcaaggccgtgttcatggccgagactaaaggcgtggctctaaaccagttgagcctgcaggagctccagacaatcagtccactgtttagtggcgatgtcatttgtgtttgggattacggccattctgtggagcaatacggcgctctgggtggtaccgcaagaagcagcgtagactggcagataagacaggtccgtgccctgttacaggcacagcaggct

SEQ ID NO: 644 - DNA, 1392 bp, Artificial Sequence
  derived and/or modified sequence
atggcctccgagagcggtaagctgtggggaggtagatttgtgggggcagtggatccaattatggagaaattcaacgcaagcattgcttatgaccggcacctgtgggaagtggacgttcaaggctccaaggcttactcaagaggactggaaaaggcaggactgcttaccaaagccgaaatggatcagattctccatggccttgataaggtggccgaggaatgggcccaaggaacctttaagctgaactcgaatgacgaagatattcacactgcaaacgagcgcagacttaaggaactcattggagccaccgcggggaagttgcataccgggcggtccaggaacgaccaggtcgttaccgatctgagactttggatgcgacagacctgctcaactctttctggacttctttgggagctgatacggaccatggtggatagggcagaggcagaaagagatgtgctctttcctggatatacccatcttcagagagcccaaccaattcggtggtcccattggattctgtcacacgctgtcgcattgacccgcgactcggaaagacttctggaggtgagaaagagaattaacgtacttccacttggatcgggcgccatcgcaggaaacccgcttggtgtggatagggagcttctgagagcagaactcaactttggtgccatcaccctcaactcaatggacgcaacgtcagaacgcgatttcgtcgcagagttcctgttttgggcttcgctgtgtatgactcatctgtcccgcatggcagaggatcttattctttactgcaccaaagagttttcgtttgtgcaactgtcagatgcatacagcaccggttcatcactgatgccacaaaagaagaaccccgattccctggagttgattagatcgaaagcaggaagagtctttggcaggtgtgcaggtttgcttatgactctgaaaggactgccttctacctacaataaggatctgcaagaggacaaggaggccgtgtttgaagtgtcggataccatgtcggccgtgcttcaggtcgcaactggcgtgattagcactctgcaaatccatcaagagaatatgggtcaagcattgtcccctgatatgctcgcaactgacctggcatactaccttgtgcgaaagggcatgccttttcgtcaggcacacgaagcatcaggtaaggccgtgttcatggctgaaaccaagggagtggctcttaatcagctgtcgctccaggaactccagactatttcgcctctgttttccggggatgtcatatgtgtttgggactacggacattcagttgagcaatacggagccctgggcggaacggcccgttcgagcgttgactggcaaattagacaggtgcgggcactgctccaagcccaacaggcc

SEQ ID NO: 645 - DNA, 1392 bp, Artificial Sequence
  derived and/or modified sequence
atggcttccgagtcaggcaaattgtggggaggcagattcgtgggcgctgtggaccctataatggagaaattcaatgctagtattgcctatgatagacatctatgggaggtggacgttcagggatctaaggcctattcacgaggccttgagaaggcgggtttgcttactaaggcagaaatggatcagattttgcacggactggataaagtcgcggaggagtgggcccaagggactttcaaactgaacagcaatgacgaagatatccacaccgcaaacgagcggcgtctgaaggaattaatcggcgctactgccggaaagctgcatactgggcgctccagaaacgatcaggttgtcaccgatctgcggctgtggatgcgtcagacctgtagtaccctaagtggcttgctgtgggagctaatccggacaatggtcgacagagctgaggctgagagggacgtactgttcccaggctacacccatctgcagcgggctcaacccatccgttggagccactggatactctcccacgctgttgctctgactcgggattctgaacgcttgctcgaagtgagaaagagaattaacgtgttgcccctgggctctggcgcaattgctggtaacccactgggcgtggatagggagctgctgcgcgccgaacttaatttcggtgcaattaccctgaattctatggatgcgacctccgagagggacttcgtggccgagttcttgttttgggcctcactctgcatgacccacttatcacggatggccgaggatctgattctctattgtacaaaggagttctcattcgtccagctgtcagacgcctatagcaccggatcgagtctgatgccccagaaaaagaatcctgattcccttgagctgatccgaagcaaagccggaagggtgtttgggcggtgtgctggcctcctgatgacactcaagggactgccctcaacttacaataaagacctacaggaggataaggaagcggtgttcgaggtgagtgacacaatgagcgctgtactgcaggtggccacgggagtgatatcaactcttcagatccaccaggagaatatgggacaagccctgtcacccgacatgctcgcaacagacctggcgtactacctagttcgcaaagggatgcccttccgccaggcccacgaggcatctggtaaagccgtgtttatggcggagaccaaaggcgttgccctcaaccagctcagtctccaagaactgcagactatcagcccgctgtttagtggtgatgtgatttgcgtgtgggactatggacattcagtggagcagtacggggccttagggggaacagctaggtccagcgtggactggcagataaggcaagtacgcgcccttctgcaggctcagcaggcc

SEQ ID NO: 646 - DNA, 1392 bp, Artificial Sequence
  derived and/or modified sequence
atggcttcagaatcaggaaaattatggggtggacgattcgttggagcagtcgatcctataatggaaaaatttaatgcatctatagcatatgatagacatttatgggaagtggatgtacaaggatcaaaagcttattctcgtggattagaaaaagcaggtttattaactaaagctgagatggatcaaattttacatggattagataaagtagccgaagaatgggcacaaggtacttttaaattaaattcaaatgatgaagatatacatactgcaaatgaaagaaggttaaaagaattaattggtgccactgctggaaaactacatactggaagatctagaaatgaccaagttgtaactgatttgagactttggatgagacaaacatgctccacactttcgggtcttctttgggaattaattagaactatggttgaccgtgcagaagcagaaagggatgttttattcccaggatatacacatttacagagagcacaacctattagatggagtcattggattttgtctcatgctgtcgcacttacacgtgattcagaacgacttttagaagttagaaagagaattaatgttctaccattaggaagtggagcaattgcaggaaatccattaggtgttgatagagaattacttcgtgcagaattaaatttcggtgctattactcttaattctatggatgcaacttcagaaagagactttgttgctgaatttcttttttgggctagtttatgtatgacacatttatcaagaatggcagaagatcttattttatattgtactaaagaattctcatttgttcagctttcagatgcatattcaacaggatcttctcttatgccacaaaaaaaaaatccagattctttagaacttataagaagcaaagctggaagagtttttggaagatgtgcaggtcttttaatgacattaaaaggacttccatcaacttataataaggacttacaagaagataaagaagctgtctttgaagtttcagatacaatgtctgctgttttacaagttgcaacaggagttatatctactttacagattcatcaagagaatatgggacaagcacttagtccagatatgttagctacagatcttgcatattatcttgtcagaaaaggaatgccttttcgtcaagctcacgaagcatcaggaaaagcagttttcatggcagaaactaagggagtagctcttaatcaattatccttacaagaacttcaaactatttcaccacttttctctggagacgtcatttgtgtttgggattatggacacagtgtagaacaatatggagctttaggtggaactgcaagatcaagtgttgattggcaaattcgtcaagttcgagcattattacaagcacaacaagca

SEQ ID NO: 647 - DNA, 1392 bp, Artificial Sequence
  derived and/or modified sequence
atggcctcggaatcaggtaaactctggggtggtcggtttgtcggtgcggtggaccctataatggagaaattcaacgcgtcgatcgcatacgaccggcacctctgggaggtggacgtgcaaggatccaaagcatactcccggggtctggaaaaggcgggacttctcaccaaggccgaaatggatcaaattctgcacggtcttgataaggttgcagaggaatgggctcaaggaacctttaagctgaattcaaacgatgaggatatacataccgcaaacgaacgcaggctgaaagaactgattggcgcaactgcaggaaagctccatactgggagatcccgtaacgaccaagtcgtcaccgatcttaggctttggatgaggcaaacttgtagcactctctctggactcctttgggagcttatccgaactatggtcgatcgggcagaggcagaaagagacgttcttttccccggatacacgcatctgcaacgggcacagcctatccgctggagccattggatactgtcacacgccgtggcgcttactcgtgattccgaaagacttcttgaagtgaggaagcgcattaacgtcctcccactgggatcaggagctatagcgggaaatccgcttggcgtggaccgtgagctgctccgtgccgagctgaactttggagcaattactctgaactctatggatgcgacttcggagcgtgattttgtcgcagaatttctgttttgggcaagcctttgcatgacccacctgagccgcatggcagaagatctgattctttactgtaccaaagagttcagctttgtgcaactgtctgatgcatactcaacgggtagctcgctcatgccacagaagaagaatcctgactcgctggaacttattagatccaaggcgggtagagtgttcggaagatgtgcaggactgctgatgacccttaagggactgcccagcacgtacaataaggatcttcaagaggataaagaagccgtgtttgaagtgtccgatactatgtctgcagtgttgcaggttgcaacgggagtcattagcacccttcaaatccatcaagaaaacatgggacaggcactctcgcccgacatgttggccacggatctggcgtactacctcgtgagaaaaggcatgccatttagacaagctcatgaagcatccggcaaggcagtgttcatggccgagactaagggagtggcattgaatcaactttctctgcaagaactgcaaaccatttcgcctcttttttcgggtgatgtgatttgcgtgtgggactacgggcattccgtggaacagtatggcgctctgggtggaacggcacggtcgtcagtggactggcagattaggcaggtccgggcactcctccaagcacagcaggcc

SEQ ID NO: 648 - DNA, 1392 bp, Artificial Sequence
  derived and/or modified sequence
atggcctctgagtctggtaaactgtggggaggcagattcgtcggtgccgtcgatcccattatggagaaattcaatgcctctatcgcctacgaccggcacctgtgggaggtggatgtccagggctccaaagcttacagtagagggctcgagaaggctggtctgctcactaaagcggaaatggatcagatcctgcatggtctggacaaagtggctgaggagtgggcccagggcaccttcaaacttaacagtaatgacgaagatatccataccgctaacgaacggcgcctcaaagaactgatcggtgcaaccgccgggaaattgcacaccgggcgctctaggaatgaccaggtcgtgactgatctcaggctctggatgagacaaacttgcagcacacttagcggccttctgtgggagctcattaggaccatggtagatcgggcagaggcagaaagagatgtcctgttcccgggatacacgcacctgcaacgggcccaaccaattagatggtcacattggatcctgtcacatgcagttgccttgactagagattcagagcggctgctggaggtgcggaaacgcatcaatgtcctgcctctcgggtccggagccatcgccgggaacccccttggggtggatcgagagcttctccgcgccgagcttaactttggggcaataacattgaattccatggacgccacatccgaacgagactttgtcgctgaatttttgttctgggccagtctgtgtatgacccaccttagtcgaatggctgaggaccttattctctactgcactaaggagttctcattcgttcaactgagcgatgcttactccactggctcttcactgatgccccaaaaaaaaaatcccgactccttggagcttatccggtcaaaggccgggcgcgtatttgggcggtgtgcaggattgttgatgacccttaagggtctgccctccacttacaacaaggacctgcaggaggacaaagaggcggtgttcgaggtgagcgacaccatgtctgctgtgctgcaagttgccactggggtaatctccactctgcagatacaccaggaaaacatgggtcaagcgctttctccagacatgctggctaccgaccttgcttactacctggttcgaaaaggcatgccatttcgccaggcacacgaggcatccggtaaagctgtgtttatggctgagacaaagggtgtggcgctgaaccagctgtctctgcaggagctgcaaacgatcagtccgctgttttccggtgacgttatctgcgtttgggactatgggcatagtgtggagcagtatggcgctctgggaggcacggcccgcagcagcgtggactggcagatccggcaggtgagagctctcttgcaggcacaacaagcc

SEQ ID NO: 649 - DNA, 1392 bp, Artificial Sequence
  derived and/or modified sequence
atggcttccgagtctggcaagctatggggaggtagattcgtgggagctgtcgatccaatcatggagaagtttaacgcgtcgatcgcatatgataggcatctgtgggaggtggacgtccagggatctaaggcatacagtcgcggcctggaaaaagccggcctgcttacaaaggctgagatggatcagatcctccacggtttggataaggtcgcagaagagtgggctcagggcacattcaagctaaattcaaatgatgaggacatccacaccgccaacgaacggaggttgaaggagctcataggggcaacagcaggcaagttacacaccgggagaagcaggaacgaccaggtcgtaaccgacctacgactgtggatgcgacagacctgctccactctttccgggctcctgtgggaactgattcgcacaatggtcgacagagccgaagctgaacgggatgtcttattccctggctatacgcatctgcaacgtgcccagcccatcaggtggagccattggattttgtcccatgcggtggccctcacaagagatagtgagagactgttggaagtgaggaagaggatcaacgtgctgccgttgggctccggagctattgccggcaacccattaggggtggatcgcgagctcttgagggctgagctgaatttcggcgctatcaccctgaattccatggacgccacctccgagcgagactttgtggccgaatttcttttctgggcaagcctctgcatgacacacttgtcccgaatggccgaggatttgatcctctattgcacaaaggaattttcattcgtgcagttatccgatgcttactccaccggctcctccctcatgcctcagaagaaaaatccagactctctcgaactgatcaggagcaaggctgggcgagtttttggccgttgtgctgggctcctgatgacactcaaagggctgcccagcacctataataaggatctccaggaggataaagaagcagtatttgaggtctccgataccatgtccgccgtattacaggtcgctactggagtcatcagtacacttcagatacatcaggagaatatgggccaggccttgtctccagatatgcttgccaccgatttggcatactacttagtgcgaaaaggcatgcccttcagacaggctcatgaggcatcggggaaggcagtgttcatggctgagaccaaaggagtagcccttaaccagctctcccttcaggagctacaaacgatcagcccactgttttcaggggatgtcatatgtgtgtgggactatggccatagcgtcgaacagtatggtgccttaggaggaacagccagatccagcgtggattggcagattagacaagtccgagcactgttgcaggcccagcaagct

SEQ ID NO: 650 - DNA, 1392 bp, Artificial Sequence
  derived and/or modified sequence
atggctagcgaaagcggtaagctgtggggtgggaggttcgtgggcgctgtagatcctattatggaaaaattcaacgcctccatcgcatacgaccgtcacctgtgggaggtggatgtgcagggctccaaggcctatagccgcgggcttgagaaggccggtcttctcactaaggctgaaatggatcagattcttcatgggttagacaaagttgccgaagagtgggcccagggcacattcaaactgaattcaaacgatgaggacatacacacagcaaacgaaagaaggctgaaggagctcattggagccacggcgggcaagctccacacaggacggagtcgcaacgatcaagtcgtaactgacctgcgtctctggatgcggcagacctgttcaaccttaagcggattgctttgggagcttatccggaccatggtagaccgggccgaggctgaacgggacgtgctattccccggctatacccatctgcagcgggctcagcccattcgctggtcccattggattttgagccacgccgtggcactaacgagggactctgaacggcttctggaggttcggaagcgcattaacgtgctaccacttggatccggcgcgatagctggcaacccactgggggtcgatcgggagctactcagggcggaactgaacttcggagctattacgctgaactccatggacgccacaagcgagagggactttgtggctgagtttctgttctgggcctcactctgtatgacccatctgtctaggatggctgaagatttgatcttgtactgcactaaggaattctccttcgtgcagctcagcgatgcatattccactgggagcagtctcatgccacagaaaaaaaaccccgatagcctcgagcttatcagatccaaggccggccgtgtgttcggtcgatgtgccggattgctaatgacgctgaagggcttgccatccacctacaataaggaccttcaggaagacaaggaagccgtgttcgaagtgagcgacactatgtctgccgtattacaggtggctacaggggtgatctccactctgcagatccatcaggaaaacatgggccaggcactgagccctgacatgctggcgactgatctggcatattacctggtgcggaaaggtatgccattccggcaggctcacgaagcctcaggcaaggctgtttttatggccgagaccaagggagtagctctcaatcaattgtccctgcaggaactccagacaataagccctttgtttagtggagatgttatctgtgtctgggattacggtcatagcgttgaacagtacggtgccctgggaggaacagcccggtcgagtgttgattggcagatccggcaggtgcgagccctcctgcaggcacagcaggcc

SEQ ID NO: 651 - DNA, 1392 bp, Artificial Sequence
  derived and/or modified sequence
atggcgtcagaatccggcaaactctggggcggtcggttcgtgggagccgttgacccaatcatggaaaagttcaacgcaagcattgcgtacgataggcacttgtgggaggtggatgtccaggggtccaaggcctattcacggggactcgagaaggcagggctccttaccaaagccgagatggaccagattttgcatggattggacaaggtcgcagaagagtgggcccaaggcacttttaagctcaactccaatgacgaggatattcacacggcgaacgaacgtagactgaaggagctgatcggagccaccgcaggtaagctgcacactggacgctcgagaaatgaccaagtggtgaccgatctcagactgtggatgagacaaacctgttccacgttgtccggattgctctgggaattgatcagaactatggtggaccgcgctgaggccgaacgcgacgtgctgtttcccggctacacccacctgcaacgggctcagcctatccgctggtcccattggatcctgtcgcacgcagtggcactcactcgggactcggaaaggttgctcgaagtcagaaaacgcatcaatgtgctcccgttggggagcggagcgatcgcaggaaacccgctcggagtcgatcgggagctgctgcgggctgaactcaatttcggcgccatcactctgaattcaatggatgccacttcggaacgggatttcgtggcagaatttctcttctgggcctcactgtgcatgacccatcttagccgcatggcggaggacttgattctctattgcactaaagaatttagcttcgtccagctctccgacgcctattctaccgggtcgtccctcatgccacagaaaaagaacccggacagcctggaactgatcaggtcaaaggcgggaagagtgttcggccggtgtgcagggctcctgatgaccctcaagggtctgccgtcaacctacaacaaggatctccaagaggacaaggaagccgtgttcgaagttagcgacactatgtccgctgtcctccaagtcgccacgggcgtgatcagcacgcttcagatccaccaggagaacatgggccaggctctttcgccggatatgttggctactgatctggcatactacttggtgcgcaagggaatgcctttccggcaagctcacgaagcatcaggaaaggcagtctttatggcggagactaagggtgtcgctctgaatcaactgtcactccaggaactgcagaccataagccctctgttctcgggcgatgttatctgcgtgtgggactacggacatagcgtggagcaatacggcgcgctggggggtactgcccgctcaagcgtggactggcagatccgccaggtgcgcgctctgctgcaagcccagcaggct

SEQ ID NO: 652 - DNA, 1392 bp, Artificial Sequence
  derived and/or modified sequence
atggcgtcggagtcgggcaagctctggggtggacgcttcgttggagcagtcgaccccattatggagaagttcaatgcaagcatcgcatacgatcgccacctctgggaggtggatgtgcaaggatcgaaggcatactcgcggggacttgagaaggcagggcttcttaccaaggccgagatggatcagattctgcatggcctcgataaggtggcagaagaatgggctcaaggcacctttaaactgaacagcaacgatgaggatattcataccgcaaacgaacgtaggctcaaggaactgattggtgcaacggcaggcaagctgcataccggaagatcccgaaacgatcaggtggtcacggacctgagactctggatgcgacagacgtgtagcacccttagcgggctgctgtgggagctcattcgcacgatggtcgatcgtgcagaagccgagcgcgatgtgctctttcctggttacactcatcttcagagggcccaaccgattagatggtcccattggattctttcacatgcagtggcgcttacgagggactccgaacgactcctggaggtccggaagagaatcaatgtcctgccactgggatccggtgcaattgccggaaaccctttgggagtggacagagagctgcttcgcgcggaactcaacttcggagcaattactctgaactccatggacgcaacctcggaaagggattttgtcgctgaatttctgttctgggcgtccctctgcatgacccacctgtcccgcatggcggaggatctgatcctttactgcaccaaggaattctcctttgtgcaattgtcggacgcctacagcaccggatcatcgctcatgccacaaaagaaaaatcctgattccctggagcttatccgcagcaaggcaggaagagtgtttggacggtgtgcagggctgctgatgaccctcaagggacttccttctacttacaacaaagatctgcaggaagataaggaagcagtgtttgaagtgtcggataccatgtccgccgtgcttcaggtcgcaaccggagtgatatcgactctgcagatacaccaggagaatatggggcaggcactctcgccagatatgctggcaaccgacctggcttactacctcgtccggaagggtatgccttttcggcaagcacatgaggcgtcaggcaaagcagtgtttatggctgagactaagggggtcgcccttaaccagctttcgttgcaagagctccagactatcagcccactgttttccggagatgtgatttgtgtgtgggactacggacattcagtcgaacaatacggagcacttggcggtacggcaagatcatcggtcgactggcagatccggcaggtgagagcccttctgcaagcccaacaagca

SEQ ID NO: 653 - DNA, 1392 bp, Artificial Sequence
  derived and/or modified sequence
atggccagcgagagtggcaaactgtggggaggtaggtttgtgggcgctgtagaccccataatggagaaattcaatgcctccatcgcctatgaccggcacttgtgggaagtggatgtgcaggggagcaaggcatactcaagaggcctggaaaaggcgggcttactgacaaaagcagagatggatcagattctgcacggattggataaagtggccgaagagtgggcacagggtacttttaagctgaattccaacgatgaggacatccatacggctaatgaacgccggcttaaggaactgatcggcgctaccgctggcaaattgcataccgggaggagtcgaaacgatcaggttgtgactgacctgaggctgtggatgaggcagacctgttctacactgtcaggtctcctctgggagctcatcaggaccatggtcgatcgggctgaggccgagcgagacgtcctcttcccaggctatacccatctgcaacgggcccaaccaataaggtggagtcattggattttgagtcatgctgtggcactgactagggactccgaaaggctgctcgaagttaggaaaagaattaacgttcttcccctgggatccggcgctatcgcagggaaccccctcggggttgacagggagctccttcgggctgaacttaacttcggcgctattaccctgaactccatggatgccacctccgaacgagacttcgttgccgagtttcttttctgggctagcctgtgcatgactcacctctcccgaatggccgaagacttaatactgtattgcaccaaggaattttcctttgtacagctctctgacgcctactcaacaggatcttcactgatgccacagaagaaaaaccctgactcactggagctaattagaagcaaggccgggagagtgttcggtaggtgcgccggactgcttatgaccctgaaagggcttccaagtacatataacaaggaccttcaggaggataaggaggccgtatttgaagtttccgatacgatgagcgccgtgttacaagtggcgacaggagtaattagcacgttgcagatccatcaggaaaacatgggtcaggccctctcacctgatatgctcgccaccgacctcgcctattacctcgtgaggaagggtatgccgttccggcaggcgcacgaagcatctggcaaggccgtgttcatggctgaaacgaagggcgttgccctaaatcagctctctctgcaggaactgcaaacaatctctcccctctttagcggcgacgtgatatgcgtatgggattatggccacagtgtggaacagtacggagcgcttggggggacagcacgtagctctgtggattggcagatccggcaggtccgcgctttgctgcaggcgcagcaggcc

SEQ ID NO: 654 - DNA, 1392 bp, Artificial Sequence
  derived and/or modified sequence
atggcgtcggaatcgggaaagttgtggggagggaggttcgtgggagctgtagacccgatcatggaaaagttcaatgcctccatcgcatacgaccgacatctctgggaagtcgacgtgcagggaagtaaagcatacagccggggtctggagaaggcgggtctgctgactaaagcggaaatggaccagatcctgcacggactggacaaggtggcagaagagtgggcgcagggcacttttaagctcaactccaatgacgaggatatccatacggccaatgagcgtcggctgaaagaactgatcggtgctactgctggtaaactgcataccggtcgctccagaaacgaccaagtggtgaccgatcttcgcctctggatgcgacaaacctgcagcactctctccgggctgctctgggaactgattcgcactatggtcgaccgagcagaagcggagcgcgacgtcctgttcccgggatacactcacctccaaagagcccaacccattagatggtcccactggattctgagccatgcagtggctttgacccgcgactcggagagactcctcgaagtccggaagaggataaacgtgcttccattgggttctggcgcgatcgcgggaaacccactgggagtcgatagggaactcctgcgcgccgaattgaacttcggcgccattacgttgaactcgatggacgcaacttccgagagagatttcgttgccgaattccttttctgggcttctctgtgcatgacccacctgagccggatggcggaggatctgattctgtactgcactaaggaattttcattcgtccagctgtccgatgcgtattcgacggggagcagcctgatgccgcagaagaagaatccagattcgctggagttgatcagatcgaaggccggacgggtgtttggacggtgcgccggtctgcttatgaccctgaaagggctcccgtccacgtacaacaaagacctgcaggaggacaaggaggctgtgttcgaagtctccgataccatgtcggctgtcttgcaggttgccaccggcgtgatatcaaccctccagatccatcaggaaaacatgggccaagccctgtcaccagacatgctcgcgactgatcttgcatactacctggtgagaaagggaatgccgttccgccaagcgcacgaggcatcaggaaaggccgtgttcatggctgaaacgaaaggagtagcactcaatcagctgtcgctgcaagaactccagactatctccccgctttttagcggagacgtgatctgtgtctgggattacgggcactcagtggaacagtacggagcactcggggggaccgcgcgctcctcagtggactggcagatccgccaggtgagagctctgttgcaagcgcaacaggcg

SEQ ID NO: 655 - DNA, 1392 bp, Artificial Sequence
  derived and/or modified sequence
atggcttctgaaagtggcaaactgtggggaggaaggttcgtgggagctgttgatcctataatggagaaatttaacgcctctatcgcttacgatagacacttgtgggaagtggacgtgcagggcagtaaagcgtattctcgcggcttagaaaaagccggcttgttgaccaaagccgagatggatcaaattttgcacggccttgacaaggtcgcagaggaatgggctcagggtacctttaaactgaactcaaatgatgaagacatccacacagcaaacgaaagaagattgaaggaacttattggagcaaccgctggaaagctgcacacaggccgctcaaggaatgatcaagtggtgactgatctgcgcctgtggatgcggcagacctgcagcacactgtctggcctgttgtgggagctcattagaacgatggtggacagggccgaagccgagcgggatgtcctgtttcccggatacacacatctccagcgggctcaacctatcaggtggtcacattggatcctgtcccatgctgttgcattgacacgcgattcagagcgactgctagaagtacgcaagcgaatcaacgtgttgccactgggcagcggagcgatcgcaggcaacccactgggtgtggatcgcgaactcctgagggcagagctcaatttcggagctataacgttaaactccatggacgccacctctgaaagggacttcgtggctgaatttctgttttgggccagcttgtgcatgacccacctaagcaggatggcggaggaccttatactttattgcaccaaggagttcagttttgtgcagctcagcgatgcatattccaccggtagcagcctgatgccccaaaaaaaaaatccagatagccttgagttgatccggagcaaggcaggtagggtcttcggcaggtgcgcaggactcctgatgaccttaaagggcttgccgagcacctacaacaaagatctacaggaagataaggaagctgtgtttgaggtttccgacactatgtctgctgtgttacaggtggcgactggcgtgattagtactctgcaaatccaccaagaaaacatgggccaagcattatcaccagacatgcttgctactgacctcgcatactatctcgttaggaaaggcatgcctttcagacaagcgcatgaggcttccggaaaggcagtcttcatggcagaaacaaaaggcgtggccctaaaccaactgtctcttcaagaacttcagacaataagccccctgttctctggagatgtgatttgtgtctgggattacggccacagcgtggagcaatacggcgctctgggcggaaccgcgagatctagtgtggattggcaaatccgtcaagtgcgcgcgttgctgcaggcgcagcaagcc

SEQ ID NO: 656 - DNA, 1392 bp, Artificial Sequence
  derived and/or modified sequence
atggcttccgaaagtggcaaattgtggggaggacgctttgttggagcagtggatcctatcatggagaaatttaatgcatcgattgcatacgataggcatttgtgggaggtcgacgttcaagggagtaaagcctattcgcgtggactagaaaaggctggcctgttgacgaaagctgagatggatcaaattctgcatggtcttgataaagtcgctgaagaatgggcccaaggtacattcaaactgaattctaatgatgaagacattcatacagctaacgaacgtagacttaaagaacttattggtgcgacggctggcaaactgcacacgggcagaagcaggaacgatcaagtcgtcacagacttgagattatggatgcgccaaacgtgtagcactttatccggcttgttgtgggaactcattcgtacaatggtagatcgtgctgaagctgaaagagatgttctttttccgggatacacacatcttcaaagggcacaacctattagatggagccattggattttatcccacgccgtcgctctaactcgcgactcagagagacttttagaagtaagaaagcgtatcaacgtactcccgttgggctcgggtgcaatcgctggcaatccgcttggcgttgatcgggaactgttaagagcggagttgaactttggggccatcactctgaattcaatggatgcgacctcagagcgggattttgttgctgagtttcttttttgggctagcttatgcatgactcatctgagccgcatggcagaggacttaatcttgtactgcacaaaagaattttcttttgttcaactcagcgacgcatatagtactggaagctcgcttatgccgcagaaaaagaatccagactccttagaattgatcaggtcaaaagctggccgcgtttttggaaggtgtgcgggtttacttatgacattaaagggtttgccaagcacgtacaacaaggaccttcaagaagataaagaagctgtttttgaggtgagcgatacaatgtccgctgtgctgcaggtggccactggtgttattagtacattacaaattcatcaagaaaacatgggacaagcgctttctccggatatgttagcgacagatttagcatattatcttgtcagaaaggggatgcctttcagacaagcgcacgaggcttctggaaaggccgtctttatggctgagactaaaggcgtagctttgaaccagctgtctctgcaggagctgcaaacgatctcacccctgttttcaggagatgtcatatgtgtgtgggattatggacattccgttgaacagtatggggctttgggcggtacagcacgcagctccgttgattggcaaatacgccaagttcgcgcattgctacaagcccagcaggca

SEQ ID NO: 657 - DNA, 1392 bp, Artificial Sequence
  derived and/or modified sequence
atggcaagcgaatctggaaagctgtggggaggacggttcgtaggggctgttgatcccataatggagaagtttaacgctagcattgcatacgataggcatctatgggaggtggacgttcaaggttctaaagcttactcaagaggcctcgagaaagctggtcttctcaccaaggccgaaatggaccagattttgcacggcctggacaaggtcgctgaagagtgggcccaaggaacattcaagctgaattctaatgacgaagatatccacacagctaatgagagaaggctcaaggaactgataggagctacggcaggcaagcttcataccggcagatcacgcaatgatcaggtggtgaccgatctcagactgtggatgcgccagacctgcagtacactttccgggctcctgtgggagcttatccgtacaatggttgatagggcagaggctgagcgcgacgtgctgttccccggatacacacacctgcaacgtgcccagcccattaggtggagccactggattcttagtcatgcagtggccctgaccagggactccgaaagattgttggaagtgaggaagcggataaacgttcttccccttggatctggagcgatcgcaggaaatccattgggcgtcgacagagagttgcttagagccgagctgaactttggggcaatcaccttgaactccatggatgccacctcagaaagagattttgtagccgagttcttgttctgggcaagcctctgcatgacacatttaagtaggatggctgaggatctgatcttgtactgcaccaaagaatttagttttgtgcaacttagtgatgcgtacagtactgggtctagtctcatgccccaaaagaagaatcctgactcactggagttgattagaagcaaggctgggagagtgttcggaaggtgcgctggcctgctgatgacgctgaagggattgccttcaacttacaataaggacttgcaggaagacaaagaggctgtgttcgaagttagcgacactatgagtgctgtattgcaggtggccaccggagtgattagcacactgcagatacaccaggagaatatgggtcaggctctcagcccggacatgctcgcgactgatttggcctactatctagttagaaagggaatgccatttcgccaggcacacgaggcctcgggtaaagctgtctttatggcagaaacaaaaggcgtggccctcaaccagctctctcttcaagaattgcagaccatcagcccacttttttccggtgacgtgatttgcgtgtgggactacggacattccgtagagcagtacggcgcgctcggaggcaccgcgcgatccagcgttgattggcaaattaggcaagtcagggctctcctccaagcccaacaggct

SEQ ID NO: 658 - DNA, 1392 bp, Artificial Sequence
  derived and/or modified sequence
atggccagtgaatctggaaagctgtggggagggaggtttgtgggtgccgtggacccgatcatggaaaagtttaacgcatccatcgcctacgaccgccacttgtgggaggtggatgtgcaaggcagcaaggcatactcgagaggcctcgaaaaagccggactgctcaccaaagcggagatggatcagattctccacggattggacaaggtggcggaggagtgggcccagggaaccttcaagctgaactctaatgatgaggacatccacaccgccaacgagagacgccttaaggagctgataggagctaccgcgggaaagctgcatactggaagatcccggaacgaccaagtggtgaccgatctgagactgtggatgcggcaaacgtgtagcactttgtcgggcctgctgtgggaattgatccggaccatggtggaccgcgcagaagcggaacgggacgtgctctttccgggatacacccacttgcagcgggcacagccgatccgctggtcccactggatcctgagccatgcggtggccttgacgcgcgactcggagagactcctcgaagttaggaaaagaatcaatgtcctccccctgggaagcggggcgatcgctggaaaccctctcggggtggacagggaactgctccgggcggaactgaattttggagccatcaccctcaattccatggacgccacctcagaacgcgacttcgtggccgagttcctgttctgggcctccctgtgcatgacccacctgtcacggatggccgaggacctgattctctactgtaccaaggaattctccttcgtccaactgtctgacgcctactcgactggctcctcactgatgccgcagaagaagaacccggattctttggagctgatccgctcgaaggcgggccgggtctttggacgctgtgctggccttctgatgaccctcaagggcctgccttcgacttataacaaggacttgcaggaggataaggaagcggtctttgaagtttccgatactatgtcggccgtgcttcaggtggccaccggagtcatcagcactctgcaaatccaccaagaaaacatgggacaggccctttcgccagacatgttggccactgatctggcttactacctggtccgcaagggaatgcccttccggcaagcccacgaagccagcggaaaggcagtattcatggcggaaaccaagggcgtcgctctgaatcaactctcgctgcaggaactgcagacgatctcaccactgttcagcggagacgtgatctgcgtgtgggactacggtcactctgtggagcagtacggagctctgggaggcacggcaagaagcagcgtggactggcaaatccgccaagtgcgagcacttctccaagctcagcaagct

SEQ ID NO: 659 - DNA, 1392 bp, Artificial Sequence
  derived and/or modified sequence
atggcctccgaatctggaaaactttggggggggagatttgttggagctgtagatccaatcatggaaaagttcaacgcctctatcgcctacgatcgccacctctgggaagtggatgttcaggggtctaaagcttattctaggggattagagaaagctggattattgacaaaagccgaaatggatcagatcctccacggattggacaaagtggcagaagaatgggcgcaggggactttcaagctgaattccaacgacgaggacattcatacagcaaatgagcgccggctcaaggaattaattggagctacagctggaaaactccatacagggaggtcacgaaacgatcaggtagtaacagatttgaggctctggatgagacagacttgttcaactctcagtgggctcctgtgggaattgatccggactatggtggatagagctgaagcagagagggatgtgctgttcccaggatatacacatctccaacgcgcccagcccattcggtggtctcattggatcctttctcacgctgttgctctcactcgggattccgaacggctgctcgaagtgcgaaagcgcatcaatgttctaccactcgggtctggagcaatcgccggaaaccctctcggagtcgatcgggaactcctacgcgctgaacttaatttcggggctattacattaaactccatggatgccacatccgagcgggactttgtcgcagagtttctcttctgggcatccctttgcatgacacatcttagtagaatggctgaagatctaattctatattgtactaaagaattctccttcgtacagctgtctgatgcctattcaacggggtcctcattaatgccacagaaaaaaaaccccgattctctcgaactcattcgatcaaaagccgggcgggtatttgggagatgtgctggactcttaatgacactgaaaggactcccctcaacttataataaagatctgcaggaagataaagaagccgtgtttgaagttagtgatacaatgtccgctgttctacaggtggctactggggtcatcagtacactccagattcatcaggaaaacatggggcaggccctgtctcctgatatgttagctactgatctagcatattaccttgtgcgaaaagggatgccattcaggcaggcgcacgaagcatccgggaaagctgtttttatggctgaaactaaaggggtggcactgaaccagctcagtcttcaggaactgcagactataagtcctctgttttcaggagatgtgatatgtgtatgggactatggacacagtgtggaacagtatggagccctgggaggaactgctcggagttctgtcgattggcagatcagacaggtaagggccttactacaggcacagcaagca

SEQ ID NO: 660 - DNA, 1392 bp, Artificial Sequence
  derived and/or modified sequence
atggccagtgagagtggtaaattgtgggggggacgatttgtcggcgcggttgaccctatcatggagaaatttaatgcctcaatcgcctacgatcgccacctgtgggaggtggacgtgcagggatcgaaggcttactctcgcggactcgagaaggcagggctgttgaccaaagccgagatggaccagatcctgcatggtctggataaggtagccgaggagtgggcccaggggacattcaaattaaattctaacgatgaggacattcatactgccaatgaacgccgtctgaaggaactcattggggccactgccggaaagttgcatactgggaggtcaagaaatgatcaggtagttacagatttgcgcctatggatgcgccagacatgctccacactttccgggctgctgtgggagctcatcaggactatggtcgatagagccgaggcagagagagatgtgctcttcccgggatacacacacctgcagcgggcccaacccatcagatggtcacactggattctttcacatgccgttgccctgacgagggattccgaacggctgctggaggtccggaagaggataaatgtcctccctctagggtccggagctatcgccggtaatccactcggagtggaccgggagcttcttcgtgccgagctcaatttcggtgctataacactgaacagtatggacgccacctcagaacgggattttgtggcagagttcttattctgggcatccctgtgcatgactcacctaagtaggatggcagaagatctgattctgtactgcacaaaggagttctcgtttgttcagctgtcagatgcgtattccaccggctccagcctgatgccacaaaaaaaaaaccccgattctctggagttgatccggtctaaggcaggccgcgtcttcgggcgctgcgccggactgctcatgactctcaagggcttgccttccacctacaataaagacctgcaagaagataaggaagctgtatttgaggtgagcgacacgatgagtgcggttcttcaggtggcgacgggcgtgatttcgacactgcagatccaccaggagaacatgggtcaggcactctcaccggatatgttggctaccgatctggcatactatttggtaagaaagggcatgccttttcggcaggcacatgaggctagcggaaaggcggtgtttatggccgagaccaagggagtagccttaaaccagctaagcctgcaggagctgcagactatttcccctctgttttcgggtgatgtaatctgtgtctgggattacggtcactcagttgagcaatatggcgctctgggcgggactgcccgttcctccgttgattggcagatcaggcaggtcagagctctcctccaggcgcaacaggcc

SEQ ID NO: 661 - DNA, 1392 bp, Artificial Sequence
  derived and/or modified sequence
atggcttctgaatcgggaaaactgtggggtggacggttcgtcggcgccgtagaccctataatggagaaattcaacgccagtatcgcttacgacaggcacctgtgggaggtcgacgtgcagggctcgaaggcgtatagccgaggtcttgaaaaagcgggcctgcttaccaaggcggagatggaccaaatcctgcacggactggacaaagtcgcagaggagtgggcgcagggaaccttcaagctgaattcgaacgacgaagatatccacaccgccaacgagcgccgcctgaaggaactcatcggggctaccgctggaaaactgcataccggacgctcgaggaacgatcaggtcgttacggacctccgactgtggatgagacaaacttgttcgacgctgagcgggctgctctgggaactgattcgtactatggttgaccgggcagaagctgaacgcgacgtgctctttcctggctacactcacctccagcgcgcgcagccgatccgctggtcccattggatcctgtcccatgctgtggcgctcaccagggatagcgagagactccttgaagtcagaaagcggatcaatgtgctcccactgggatccggggctatcgccggcaacccgctcggagtggatcgcgaactgctcagagcggaactcaatttcggagccattaccctgaacagcatggatgccacctcagagagagatttcgtggcagaatttcttttctgggcgtcattgtgcatgacccacttgagtagaatggctgaggatctcattctgtattgcacgaaagagttctctttcgtccagctctcagacgcctattccacgggatcgtcccttatgccgcagaagaagaatccggacagcttggaactgatccgttcgaaggcgggccgcgtgttcggtcgctgcgctgggcttctcatgactctcaagggattgcccagcacttacaacaaggacttgcaagaagataaggaggctgtgttcgaggtgtcggacaccatgtcggcagtgctccaggtggccacgggtgtcatcagtactctccagattcatcaagagaacatgggacaagccttgtccccagatatgttggccactgatctggcctactacctggtccgaaagggaatgccttttcggcaggctcacgaagccagcggaaaagccgtgttcatggccgaaactaagggagtggccttgaatcagctgtcactccaagagctccaaaccatctcgccactgtttagcggagacgtgatctgcgtgtgggattacggtcactcggtggagcaatacggagctctgggaggaaccgcccggtcctcggttgactggcaaatcaggcaggtgcgggccctgctgcaggcccaacaggct

SEQ ID NO: 662 - DNA, 1392 bp, Artificial Sequence
  derived and/or modified sequence
atggcctctgagtctggtaagctctgggggggccgctttgttggcgccgtagaccctatcatggagaagttcaatgcttcgatcgcatacgaccgccacctgtgggaagtggacgtgcagggctcaaaggcttactcacggggactggaaaaagccgggctgctcactaaagcggaaatggatcagatcttacacgggctcgataaagtcgctgaagaatgggcccagggaaccttcaaattaaactccaatgacgaagatatacacacagctaatgagagacgcctcaaagagctgatcggggcgactgcaggcaaactgcatactggacgcagtagaaatgatcaagtggtgactgatctgaggctctggatgaggcagacatgcagcacactgtctggactactctgggaacttatccgtaccatggtcgaccgggcagaagcagagcgcgacgtgctcttccccggctatacccatcttcagagagcccaaccaatccgttggagtcactggattttgagccatgctgtggcacttacccgggactctgagcgcctcctagaagtgcgcaaaagaataaatgtgctcccactcggatcaggggccatcgccggcaaccctcttggagtggatcgggagctgttgagagccgagctcaacttcggggcgatcacccttaacagcatggacgcgacgtctgagcgagacttcgtggctgaattcctcttctgggcctcgctgtgtatgacacacctgtctagaatggcagaggatctcattctctattgtaccaaggagttctcattcgtccagctctccgatgcctactccacaggctcttcgctaatgcctcaaaagaaaaaccccgattcactggagctgatacgaagcaaggctggaagggtctttggcagatgcgctggtctgctgatgaccctgaaggggctaccctccacgtacaataaagatctgcaggaggataaggaggccgtgtttgaggtgtctgatactatgtctgccgtgttgcaagtcgcaactggcgtcatttccacacttcagatccatcaagagaatatgggacaggcgttgtcccccgacatgctggcgacggaccttgcctactatctggtaagaaagggcatgcccttccgtcaggcacatgaggctagcggtaaggccgtctttatggcagaaacgaaaggtgttgctctgaaccaattatcactgcaggaactgcagaccatcagccccctcttttctggagacgtgatttgcgtctgggattacgggcattcggtggaacagtatggggccctgggcggaaccgctaggtcgtcggtagattggcagatcaggcaggtacgagcgctgctgcaggcccagcaggcc

SEQ ID NO: 663 - DNA, 1392 bp, Artificial Sequence
  derived and/or modified sequence
atggctagcgaatccgggaaattgtggggcggccggtttgtaggagcagtggaccccattatggagaaatttaatgcgtcgatagcatatgacagacatctgtgggaggtcgacgtgcagggtagtaaagcttactccagaggcctcgagaaggcagggctcctgaccaaagctgagatggaccagattctccatggtctcgacaaggttgctgaagagtgggcgcaaggtacctttaagctgaacagtaacgatgaggatatccatacagccaatgaaaggagattgaaagagttgattggagccacagcaggaaagttacatactgggcgcagtcgtaacgaccaggttgtcactgacctgcggttgtggatgcgccagacatgttcaacgctgtccgggcttctgtgggaactgatcaggaccatggtggatagggcggaagctgagcgggacgtcctgtttccaggttatacacatctacaacgggcacaacctatcagatggtcccactggatcctttcccatgctgtcgctctcacacgggactctgagaggctgcttgaggtgaggaagcgcattaacgttttgcccctcggctccggtgcaatcgctggcaaccctctgggtgttgatcgcgaattactgagagctgaactcaatttcggagccatcaccctgaacagtatggatgctacctcagagcgcgattttgttgccgagttcctcttctgggcatcgctctgcatgactcacctctccagaatggcggaagatctcattctttattgtacgaaagaatttagctttgtccagctttcggatgcgtacagcacagggagttcacttatgccacagaagaaaaatcccgacagcctggaactgatccgcagcaaggccggacgggtgttcggccgttgcgctgggttgcttatgacgctcaagggactgcctagcacgtacaataaagacctacaagaggacaaagaggcggtgttcgaagtatcagatacaatgtctgccgtgttacaggttgctaccggcgttatctctacactccaaatccaccaggagaacatgggacaggctcttagccctgatatgctggccaccgatctggcctactaccttgtgaggaaaggaatgccgtttaggcaagcacacgaggcctcaggcaaggctgtgttcatggcagaaacaaagggggtggcactgaaccagctttccttgcaagagctgcagacaatcagcccactcttcagcggtgacgttatctgcgtctgggactatggccacagcgtcgaacagtacggggccctgggcgggaccgctcgttccagtgtcgactggcaaattcggcaagtgagggccctcctccaagcacaacaggca

SEQ ID NO: 664 - DNA, 1392 bp, Artificial Sequence
  derived and/or modified sequence
atggcaagcgagtccggtaagctgtggggaggtagatttgtgggggcggtggaccctattatggaaaagtttaacgcaagcatcgcatacgatagacatctctgggaagtggatgtgcagggttccaaggcatacagcaggggtcttgaaaaagcaggccttctgaccaaggcggaaatggatcagattcttcatggtttggacaaggttgcagaagagtgggcacaagggacctttaaacttaacagcaatgatgaggacattcacactgcaaacgagaggagattgaaggaacttatcggtgcaactgccggcaagctgcacaccggccgttcaagaaatgatcaagtggttaccgatcttcgcctttggatgcgtcagacttgttccactctgtcgggacttctctgggaactcatccggacgatggtggatagagcagaggcggaaagagatgtgctttttccaggttacacgcaccttcaacgagcacaacctattagatggtcacattggatcctttcgcatgcggtggcacttactcgggatagcgaacgcctgctcgaagtcagaaaacgaattaacgtccttcctttgggatcgggggcaattgcgggaaatccgctgggcgtggatagagaactgctgagagccgaacttaacttcggagcaatcaccctgaacagcatggatgcaacctctgagagagactttgtcgcggaatttcttttctgggcctcactgtgcatgactcatctgtcgcggatggcggaagatctcatcctttactgcacgaaggaatttagcttcgtgcaactgagcgatgcctactcaaccggatcatcattgatgccacaaaagaaaaacccggactcccttgaactcattcggtcaaaggcgggacgggtgtttggtagatgcgccggacttcttatgactcttaaaggacttccatccacgtacaacaaagatctgcaagaggacaaggaagcagtctttgaagtcagcgacactatgtccgccgtcctgcaagtggcaactggagtcatatcgacccttcaaatccatcaagagaatatgggacaggcactttcccctgatatgttggctacggatcttgcatactacctggtccgaaagggaatgccttttcggcaagcacatgaagcatctgggaaggccgtgtttatggcggaaactaagggcgtggcactgaaccagctctccctccaagagcttcagactatttctccacttttctccggtgacgtgatttgtgtgtgggattacggtcattcggtggaacagtacggggcccttggggggaccgcaagaagctcggtcgattggcagatccggcaggtgagggcgctcctgcaggcacaacaggca

SEQ ID NO: 665 - DNA, 1392 bp, Artificial Sequence
  derived and/or modified sequence
atggcgtcggaatcggggaaactgtggggaggcagatttgtgggtgccgtggacccaatcatggagaagttcaacgcgtccatcgcatacgacagacatctctgggaggtggacgttcagggctcaaaagcctactcgcggggactggaaaaggcggggctcctgacgaaggccgagatggaccagattctgcacggcctggataaggtggccgaagaatgggctcagggtaccttcaagctgaactccaatgacgaagatatccatactgcgaacgagagacgcctcaaggaacttatcggagctaccgccgggaagctgcacactggacgcagccgcaacgaccaggtcgtgactgatttgcgcctctggatgcgccaaacttgctcgaccctctccggactgctgtgggaactcattcgcaccatggtggatagggccgaggccgagcgcgacgtcctgttcccgggatacacccatctgcagcgcgcgcagcctatcaggtggtcccattggattcttagccacgccgttgcgcttacgcgggactcggaaagactgctcgaagtcaggaagcgtatcaatgtgctgccactgggatctggagcaatcgcgggcaacccgctcggagtggaccgggagctgctgagagcagaattgaacttcggagcgattaccctcaatagcatggatgcgacttccgagcgggactttgtcgctgaattcttgttctgggcttccctgtgtatgacccacttgtcgagaatggcggaggacctgatcctgtactgcaccaaggaatttagcttcgtgcagctgagcgacgcctacagcactgggagctcgctgatgccgcaaaagaaaaaccctgactccctggaactgatccgcagcaaggcaggacgcgtgttcggccggtgcgcagggctcctgatgactctcaaggggttgccgtcgacctacaacaaagatctgcaagaggacaaggaggccgtctttgaggtgtcggacactatgtccgcagtgctgcaagtggcaacgggcgtgatcagcaccctccagatccaccaagagaatatggggcaggcactctctccggatatgctggccactgatctggcgtactacctcgtgcgcaagggaatgcccttccggcaagcccacgaggcgtcgggaaaggcggtgttcatggcggagactaaaggagtggcgctgaatcagctgtctctccaggaactgcagactatctcgcctctctttagcggggacgtgatttgcgtctgggactacgggcatagcgtggagcagtacggagcactcggaggaactgccagatcgtccgtggactggcagatccgccaggtgcgcgccctgctccaggcgcagcaggca

SEQ ID NO: 666 - DNA, 1392 bp, Artificial Sequence
  derived and/or modified sequence
atggcatcagaatcgggcaaactttggggaggccgattcgtgggggcagtcgaccccatcatggaaaagtttaacgcatccatcgcgtacgatcgacatctgtgggaagtggacgttcagggttccaaggcatactccaggggactggaaaaggcaggacttcttactaaggccgagatggatcaaattctgcacggactggacaaggtggcagaggaatgggcacaaggtacgtttaaacttaacagcaatgacgaggacattcatacggcaaatgagagacgactgaaggagctcataggagcgaccgcaggaaagctgcatactggacggagcagaaacgatcaagtggtaaccgaccttcggttgtggatgcgccaaacctgttccaccctgtcgggccttctgtgggagctgatccgcaccatggtcgatcgggccgaggcagaacgggacgtgctgtttccaggttatacccatttgcaaagagcgcaacccatcaggtggtcgcattggattctttctcacgcagtcgcattgactcgggattcggaacgtctgctggaagtgcggaagaggataaacgttctcccccttggatcaggagcgattgcggggaatccgctgggcgtcgatcgcgaactgcttcgcgccgagcttaacttcggtgcaatcacgcttaatagcatggatgcaacctcggaacgcgatttcgtggcagaattcttgttctgggcaagcctgtgtatgactcacctctcgaggatggccgaggacctcattctgtattgtactaaggaattctcatttgtgcaattgtcggatgcatactcgaccggctccagcttgatgcctcaaaagaaaaacccggacagtctggaattgatccgctccaaggccggcagggtgtttggacgctgtgccggcctccttatgacccttaaagggctgccatccacttacaacaaagaccttcaagaagataaggaagccgtgtttgaagtctcggacactatgtcggcagtgctccaggtggctactggtgtgatttccactctccagatccatcaagagaatatggggcaggcgctgtcccccgacatgcttgcaaccgatctcgcatactaccttgtgagaaagggaatgccttttagacaggcacacgaagcatcgggcaaggcagtgttcatggcggaaactaagggggtggcccttaaccaactctccctgcaggaacttcagaccatttcccctctcttttccggtgatgtgatttgtgtgtgggactacggacactccgttgaacagtacggtgcccttggtggtaccgctcgatccagcgtcgactggcagataagacaagtaagggcacttctgcaagcgcaacaggca

SEQ ID NO: 667 - DNA, 1392 bp, Artificial Sequence
  derived and/or modified sequence
atggcctcagagtccggtaagctgtggggcggcagatttgttggggcagtggacccgatcatggagaaatttaacgcctctattgcctatgatcgccacctgtgggaggtggatgtccagggaagcaaagcgtacagccgtggactggagaaggccggcctgcttaccaaggccgagatggaccagattttacacggactggacaaagtggccgaggagtgggctcagggaacgtttaagctgaactctaatgacgaagatatccatacagccaatgagcgtaggcttaaagaactgattggagctacggcagggaagctgcatactggccggtctcggaatgaccaagttgtgaccgatctccggctctggatgcgtcagacctgttcaacattgtcaggtctgctgtgggagttgatcagaactatggttgatagagcggaggccgaacgggatgtcctgttcccagggtatacccacctgcaacgtgctcaacccatcaggtggtcccactggatactttcacacgcagtggccctcacgagagattcagagcggttgctcgaggttaggaaaagaatcaatgtgctccccctcggaagcggagctatcgcaggcaacccgctcggggtggatcgggagctcctacgagctgagttgaattttggcgccattaccctcaacagcatggacgctacaagcgaacgggactttgttgccgaatttctattttgggcaagtttgtgcatgactcacctcagccgcatggcagaagacttgattctatattgtaccaaggagttctcgtttgtccagttgagcgacgcttacagtacaggatcatcccttatgcctcagaaaaaaaaccccgacagtcttgagttgattcggagtaaggccgggcgggtctttggaagatgcgctggcttgttgatgacgctaaaaggtcttccatcaacgtacaacaaggacctgcaggaggataaggaggctgtctttgaagtttctgacaccatgtcagccgttctgcaggtggcaaccggcgtgatttcaacattgcagattcatcaggaaaacatgggacaggccctgagccctgatatgctcgcgactgatctagcgtactatttggtcagaaagggcatgccctttcgacaggcgcacgaggcctccggcaaggccgttttcatggcagagaccaaaggcgtggcgctgaaccaactgtctctgcaggagcttcaaactatctcccccttattcagcggggacgttatctgcgtgtgggattatggacattctgtcgagcagtatggggccctgggtggcaccgcccggagttccgtggattggcaaattaggcaagtgcgtgcgctattacaggctcagcaggcc

SEQ ID NO: 668 - DNA, 1392 bp, Artificial Sequence
  derived and/or modified sequence
atggctagcgagagcggcaaactgtggggcggacgcttcgtaggtgcggtggacccgataatggagaagttcaacgcctccatcgcgtatgatagacatctgtgggaggtggatgtgcagggatcaaaggcctattcgagagggctcgagaaggccggcctcctgacgaaggccgaaatggaccagatattacacggccttgacaaagtggccgaggagtgggcccaggggacgttcaagctgaatagcaatgacgaagatattcacaccgcaaacgagcgtcgtttgaaggagctgataggcgcaacagccggcaaattacataccgggcggtcacggaacgatcaggtggttactgacctaagactgtggatgcggcagacttgtagtacgctgagcgggttgctgtgggagttaatccgaaccatggtggatcgggcggaagctgaacgcgatgtgctgtttccgggatacacccatctgcagcgcgcccaacctatacggtggtcccactggatcttgtctcacgcggtggccctgactcgagatagtgagcggctccttgaggttcgaaaaagaatcaacgtgctgccgttagggtctggtgccattgctggtaatccccttggggtggatagggagcttctgcgcgctgagctgaatttcggggccatcacattgaactctatggacgctacctctgaacgagatttcgtggcagagtttcttttttgggcctctctctgtatgactcacctcagtcggatggccgaggaccttatactgtactgcactaaggagttctcctttgtgcagctgtccgacgcctatagtactgggtcctcactcatgccgcagaagaagaaccctgacagcttagagttgattaggagtaaagccgggagggtatttgggagatgtgccggcctcctcatgacgctgaagggactgcctagcacttataataaggacctgcaagaggacaaggaagctgtttttgaggtcagtgatactatgagcgccgtactgcaggtggccactggcgtcatcagcactcttcagatacatcaagagaacatgggacaagccctcagtcctgacatgttggccaccgaccttgcttattatctagtgcgcaagggtatgccattccgccaagctcacgaggcttctggaaaagccgtcttcatggctgagacaaaaggggtcgctttgaaccagctgagcctgcaagagttgcagacaatcagccctcttttctccggagatgtcatatgcgtgtgggactatggtcattccgttgagcagtacggcgctttgggggggaccgcacgcagctccgttgactggcagatccgacaggtgagggccctgctacaggcccagcaggct

SEQ ID NO: 669 - DNA, 1392 bp, Artificial Sequence
  derived and/or modified sequence
atggcatcggagtcaggaaagctgtggggaggaagatttgtgggcgcggtggaccccattatggagaagttcaacgcatcgattgcatacgaccgtcatctgtgggaggtggatgtgcaagggtccaaggcatacagccggggcctggaaaaggcaggattgttgactaaggcagagatggatcagattcttcacggactcgataaagtggcagaagaatgggcacagggaacctttaagctcaattcaaatgacgaggacattcatactgccaatgaacgccgactcaaggaacttattggagcaaccgccgggaagctgcataccggtagatcaaggaacgaccaagtcgtcacggatttgaggctgtggatgagacaaacgtgttcgaccctttcggggcttctctgggaactgataagaaccatggttgatcgcgcagaggcagagagagatgtgctctttccaggttacacccacctgcaaagagcgcaacctattagatggtcgcactggattctctcccatgcagtggcactgactcgggactcggaaagacttctcgaggtgaggaaaagaataaacgtgcttcccttggggtcgggagccattgcaggaaacccgcttggagtcgaccgtgagcttcttcgggcagaactgaacttcggggcaattacccttaattctatggatgcaacttcggaacgcgacttcgtggcggaattcctgttctgggcctccctgtgtatgacgcatctctcgcgcatggctgaggatttgattctttattgcacgaaggaatttagcttcgtgcaactttccgatgcatactccaccggatcctcgctgatgccgcagaagaaaaaccctgattcacttgaacttatcagatctaaagcaggacgggtgtttggacggtgcgcaggcctcctgatgactctcaaggggttgccctcgacttacaacaaggatcttcaagaagataaggaggcagtctttgaggtcagcgacaccatgtccgcagttctgcaagtcgcaaccggggtgatatcgacccttcagatccatcaagagaacatgggacaagcgctgtcccctgatatgcttgccactgatctggcatactacctcgtgagaaagggaatgccttttagacaggcacatgaggcgtcaggaaaagcagtctttatggcagaaacgaagggagtcgcccttaaccagctttctcttcaagaattgcaaactatatcccctcttttttcaggtgacgtgatctgtgtgtgggattatgggcattccgtggaacaatacggtgcactgggtggcactgcccggagctcagtcgattggcagatcaggcaggttagagcgcttcttcaagcacagcaagca

SEQ ID NO: 670 - DNA, 1392 bp, Artificial Sequence
  derived and/or modified sequence
atggccagcgagtcaggtaaactgtggggtggtcgcttcgtgggagcagttgatcctattatggagaagttcaatgcctcaatcgcctacgatcgacatctgtgggaagtggacgttcaaggaagcaaggcctatagtcggggtctcgagaaggcaggtttgctgaccaaagcggaaatggatcagatcctgcacggacttgacaaggtggcagaggaatgggcccagggtaccttcaaactgaattccaacgacgaggatatccacactgcgaacgagcgtcgtctgaaggagctgatcggcgctacggcaggcaaattgcataccggccgcagccgtaatgatcaggtggtaaccgacctgcgactgtggatgcggcagacctgttctacgctgagcggactgctgtgggagctgatccgcacgatggtggatcgcgctgaagccgaacgggacgtcctgttccctggttatacccacctgcaaagagcacagcctatccgctggtcacactggatcctctcccacgcagtggccctgactcgcgatagcgagcgccttctggaagtgaggaaacgcatcaacgtgctacctttaggcagcggtgcgattgcagggaaccctctaggtgtggatcgtgaattgttgagagcagaactgaatttcggtgctatcacactaaactccatggatgccaccagcgagcgcgattttgttgcagaatttctgttttgggcgagcctgtgcatgactcacttgagccgcatggctgaggatctaattctgtactgcacgaaggagtttagctttgtccaactgagtgatgcctacagcacggggtctagtctgatgccacagaagaaaaatccagatagcctggagctcattcgctccaaagcagggcgcgtgtttggccggtgtgcaggactgctgatgaccctgaaaggcctcccgagcacgtataacaaggatctgcaggaagacaaagaggcagtcttcgaagtcagcgacaccatgtccgccgtgctacaggtcgctaccggtgtgatcagcactctccagatccaccaggagaatatgggtcaggccctgtcccctgatatgctggcgacggacctggcctattatctggttcgcaaaggcatgccttttcgtcaagcccacgaagccagcggcaaagcggttttcatggccgagaccaagggtgtagctctgaaccaactgtctctgcaagagctgcaaaccatcagcccactcttcagcggggatgtaatttgcgtgtgggactacggtcacagcgtggagcaatacggtgcgcttggtggcacagcacgcagctctgtggattggcaaattaggcaggtccgcgccctgctgcaggcgcagcaggct

SEQ ID NO: 671 - DNA, 1392 bp, Artificial Sequence
  derived and/or modified sequence
atggcctcagagagcggcaagttatggggtggccgttttgtgggggccgtagaccctattatggagaaatttaacgctagcatcgcctacgataggcatctgtgggaggtcgatgtgcagggaagcaaggcgtacagcagaggcctggagaaggccggcctgttgacaaaggcagagatggaccaaatcctacacggattggacaaagtggccgaggagtgggcacaggggacttttaagctgaattccaacgacgaggacatacataccgccaatgagcggcggcttaaagaattgattggcgctactgctgggaagctgcatacgggaaggtcaagaaacgaccaggtggttactgatctccggctctggatgagacagacctgcagcactctgtcaggcttactgtgggaactgattcgtaccatggttgatcgcgctgaggcagagcgcgatgtccttttcccagggtatacacatctccagagggcccagcctatacggtggtcccactggatattgtctcacgctgttgcgcttacgcgggactccgaacgcctgttagaggtgcgcaaacgcattaatgtcctccctctcgggtcgggcgctattgcagggaaccctctcggcgtggaccgagagctcctgcgagctgaacttaatttcggggctatcactctgaattcgatggacgccacaagcgaaagggactttgtggcagagttccttttttgggcttcattgtgcatgacccatctgagtcgtatggccgaagatctgatcttgtattgcacaaaggaattctccttcgtgcagttgtccgacgcatatagcactggtagcagtcttatgccacaaaagaaaaatccagattccctcgagctcatcaggagcaaagcaggtcgggtgtttggcaggtgtgcgggcctgttgatgacactgaagggcctaccctcgacatacaataaagatctgcaggaggacaaggaggccgtattcgaagtgagtgatacaatgagcgcggtgctgcaggtggccacgggggtgataagtaccctccagatccatcaggagaatatgggacaagctttatctccagatatgcttgccacggatttggcctactatctggttcggaagggcatgcctttccgccaagcgcacgaggcttctggcaaagccgtcttcatggcagaaacgaagggcgttgctctcaaccagcttagtctgcaggaactgcagaccataagcccactatttagcggggacgttatctgcgtgtgggactacggccactctgtcgagcaatatggcgccctcggggggacagccaggtcttccgttgactggcagatccgccaagtgcgagccctacttcaggcacagcaggct

SEQ ID NO: 672 - DNA, 1392 bp, Artificial Sequence
  derived and/or modified sequence
atggcatcggagtccggtaagctgtggggaggacggttcgtgggcgctgtggacccgattatggaaaagttcaatgcatcaatcgcctacgaccgccatctgtgggaagtcgacgtgcaagggagcaaagcctactcccgcggacttgaaaaggccggtctgctgaccaaggctgagatggaccaaattctgcatggacttgataaagtcgccgaagaatgggcccagggaactttcaagctcaactcgaacgacgaggacatccacactgctaatgaacggcgcctgaaggagctcatcggcgcgaccgccggaaaactccataccggccggtcacgcaatgaccaggtcgtgaccgatctgcgcctttggatgcggcaaacctgctcgaccctttccggacttctgtgggagttgatccggaccatggtcgatcgagccgaagcggaaagggatgtgcttttccctggatacacccatctgcagagagcgcagccaatccgctggtcgcattggatcttgtcccacgcggtggcacttacccgtgactcggagcgcctcctggaggtgcgcaaacgcattaacgtgctgccgctgggctccggggccattgctggcaatccgctgggagttgacagagaactcctccgggccgaattgaacttcggagccatcacgttgaatagcatggatgccaccagcgaacgcgacttcgttgcggaatttctcttttgggcctcactctgtatgacccacctcagccggatggcggaagatctgatcctctactgtaccaaggaattcagctttgtgcagctgtccgacgcctacagcactggatcttccttgatgcctcagaagaagaatcccgactccctcgaactgatccgatcaaaggccgggcgcgtgttcggtaggtgcgccgggctgctgatgacccttaagggactgccttctacctacaacaaggacctgcaggaggataaggaggcggtctttgaagtcagcgataccatgtcagcggtgctgcaggtggcaaccggagtcatctcgactctccagatccatcaggagaatatgggacaagcgctctcgccggacatgctggcgactgacctcgcgtactacctcgtccgcaagggtatgccttttcgccaggcgcacgaagcgagcggaaaagcggtgtttatggctgaaactaagggagtggcccttaatcagctgtcactccaagagctgcaaaccatctccccactgttctccggagatgtgatttgcgtgtgggattacggccactcggtggagcagtacggagcccttggaggaacggctcggagcagcgtggattggcaaattcgccaggtcagggcccttttgcaagcgcagcaagca

SEQ ID NO: 673 - DNA, 1392 bp, Artificial Sequence
  derived and/or modified sequence
atggcatcggagagtgggaagctatggggcggaagattcgttggagccgtggaccccatcatggagaagttcaacgccagcattgcttacgacagacatctgtgggaagttgacgtgcaggggtccaaggcatactccagaggactggagaaggcaggactcctaacaaaagctgaaatggaccagattctgcatggtttggacaaagtggcagaggaatgggcccaagggaccttcaaactgaactctaatgacgaggacatccataccgctaacgaacggaggctgaaggaattgattggtgctaccgccggcaagctgcataccggaaggagtcggaacgaccaggtagtgaccgatttgaggctttggatgaggcagacatgcagcacattgtctggattgttgtgggaactgatcaggacgatggtcgaccgggcggaagccgaaagagatgtactttttcctggctacacacacttacaaagagcccagcctatccgatggtcacattggatcctctcccatgccgtagccctgaccagggacagcgaacgtctcctagaggtccgaaaaagaatcaacgtgctacctctgggcagcggcgccattgcaggcaatccactcggtgtagatagagagttgttgagggctgaactgaactttggggctatcacgctgaactcaatggacgcgacctctgagcgggacttcgtggcggagtttttgttctgggcctccctgtgtatgacccatctttcgcggatggctgaggacctgatcctgtactgcacgaaggaattcagctttgtgcagctcagtgacgcttactctaccgggagctcgctaatgccccagaagaagaaccccgacagcctagagctcatcagatccaaggccgggagagtcttcggtaggtgtgccggcctccttatgaccttgaaagggctcccctcgacctacaataaagacctccaggaggataaggaggccgtctttgaggtgagcgatactatgtccgccgttctgcaagtggctactggagtcattagcaccctgcagattcaccaggagaatatgggccaggcactctcacccgatatgctggccacagatcttgcttattacctagttcgaaagggtatgcctttccgacaggcccatgaagctagcggtaaagctgtgtttatggcagagacgaagggtgtggctctcaatcagctgagtctgcaggagctgcagactatatcgccgctcttcagtggggacgtcatttgcgtgtgggattatggccactccgttgaacagtatggggccctggggggtactgccaggagctccgtggattggcagatcaggcaggttcgcgccctgctgcaggctcagcaggcc

SEQ ID NO: 674 - DNA, 1392 bp, Artificial Sequence
  derived and/or modified sequence
atggctagtgagtctggaaaactgtggggcgggcggtttgtcggtgcagtcgaccccataatggaaaagtttaacgcttcaatagcatacgacagacatttgtgggaggtcgacgtgcagggtagtaaggcgtactccagaggtctcgaaaaggcggggcttttgacgaaggcagagatggatcaaatattgcacgggcttgacaaggtagctgaggagtgggcccagggaactttcaaactaaatagcaatgacgaggacatccacacagccaacgaacgaagactgaaggaattgatcggtgccactgccgggaaactccataccgggcgatctagaaatgatcaggtggtgacagatctccgcctatggatgagacagacatgctctacgctttctggcttgctgtgggagctgattcgcactatggtggacagagccgaggcagaaagagacgttctcttcccaggttatacacacttacagcgcgcacagcccatcaggtggtcgcactggatcctgtcgcatgcagtggctcttactcgagactcggaacggctgctcgaggtccgcaaaagaatcaacgtgctgccgctgggatcaggagcaatcgcaggcaatcctctcggcgtagacagagagctcttaagagcagagctgaatttcggcgccattacactgaacagtatggacgctacgagcgaacgtgattttgtggctgaatttctcttctgggcctcactttgcatgactcacctgagcagaatggcggaggaccttattctctattgtacaaaggaattttctttcgtgcagctgtcagatgcttattccactgggtcttcacttatgccccagaagaaaaatcccgattcccttgagctgatccgtagcaaagccggccgagtctttggacgatgtgcaggcctgctgatgacactaaaagggctcccctcgacttataataaggacttgcaggaagacaaagaggctgtatttgaggtgagcgatacaatgtccgctgtgctccaggtggccacaggagtaataagcacattacagattcatcaggaaaacatggggcaggcccttagtccagacatgttggcaacagatttggcctattaccttgtcaggaaggggatgcctttccgtcaagcacatgaggcaagtggtaaagcggtattcatggccgagaccaagggagtcgccctgaatcagttgtctcttcaggagctacagacgatttctccattattttcaggggatgtcatctgcgtttgggactacggccactcagtggagcagtacggtgctctgggcggaacagcccggtccagcgtggactggcagatcaggcaggttagagccttgctgcaggcacagcaggcc

SEQ ID NO: 675 - DNA, 1392 bp, Artificial Sequence
  derived and/or modified sequence
atggcatcggagtctggtaagctctggggaggtcgtttcgtgggtgcagtggatccgattatggagaagttcaatgcaagtattgcttacgatcgccatctgtgggaagtggatgtgcagggatctaaagcatacagcagagggctcgagaaggcaggacttctgactaaagcagaaatggatcagatactgcacggcctggacaaggtcgctgaagaatgggcacaagggacttttaagctgaacagcaacgatgaagatatccatacggctaacgaacgacgcttgaaagaacttattggagcaactgcggggaagctgcacactgggcggtccagaaatgaccaagtggtcacggatctgagactgtggatgagacaaacttgctcaactctgtcaggccttctttgggagcttatccgaaccatggtcgacagagcagaagcagagcgtgatgtgctgttccccggttacacccatctccagcgcgcccaacctatccgatggtcccattggatcctttcacacgcagtcgccttgacccgggattccgaacgcttgcttgaggtgcgtaaacggataaatgtactgccactcggctcgggcgcaattgcagggaaccctctgggtgtggaccgcgaacttcttagagctgagctgaatttcggtgcaattaccctgaattcaatggacgccacctcggaacgggactttgtcgcagaatttctgttctgggcatccctgtgtatgactcatctttcaagaatggcagaagatctgattttgtattgtactaaggaattttcatttgtgcaactgtcagacgcatactcgaccggcagttcgcttatgccacagaagaagaacccggattccctggaactgatacggtcgaaggcgggccgcgtgtttggtcgctgcgcagggctcctcatgaccctcaagggtttgccatcgacctacaataaggatctgcaagaagataaagaggccgtgttcgaagtgagcgacactatgtccgccgtccttcaagtggcaaccggtgttatttccacccttcaaatacatcaggaaaacatggggcaggcattgagccctgacatgctggcaactgatctggcttactaccttgtgcgcaagggcatgccttttagacaagcgcacgaggcatcgggtaaggccgtgtttatggccgaaacgaagggtgtggcgctcaaccaactcagcctccaagagctccagaccatttcacctctttttagcggggatgtgatctgtgtctgggattacggacattccgtggaacagtacggtgctctcggaggcactgcacgttcgtctgtcgactggcagataagacaggtgagggcgcttctccaggcacaacaggcc

SEQ ID NO: 676 - DNA, 1392 bp, Artificial Sequence
  derived and/or modified sequence
atggcatctgaatctggcaaactgtggggaggtcgctttgttggagccgttgaccccataatggagaagttcaacgcttctattgcctacgatcgtcacctctgggaggtggacgtgcagggcagtaaggcttactcccgcgggctggagaaggcgggtttgttgaccaaggctgaaatggaccagattctgcacggcctcgataaggtcgctgaggagtgggctcaaggtaccttcaagcttaattcaaacgatgaggatatccacaccgcaaacgagcgtcgcttgaaggagctgattggagcgaccgctggtaagctccatacgggccgttcccgtaacgatcaggtggtgacggacttgcgcctttggatgcgccagacgtgctcgacgttgtccggcctgctgtgggagctcattcgcaccatggtcgaccgtgccgaagcggagcgtgatgtccttttccccggatacacccacctccagcgcgcccagccaatccgctggtcgcactggatcctttctcatgctgttgctctcactcgcgattccgagcgcttacttgaggttcgcaagcgcattaacgtccttcccttgggttccggcgctattgctggaaatccgcttggtgtcgacagagagctgctccgtgccgagctgaatttcggcgccatcacgctgaactcgatggatgcgacctcggaacgcgattttgtcgccgagttcctcttctgggctagtctgtgcatgactcatctctcccgtatggccgaggacttgatcctttactgtacgaaggagttcagcttcgtccaactgtccgacgcctactccaccggtagcagcttgatgcctcagaaaaagaacccagacagcctggagttgatccgaagcaaggctggccgtgtctttggccgttgcgcagggcttctcatgacccttaagggcctccccagcacctacaacaaggatttgcaagaggataaggaagcagtattcgaggtctcggacacgatgagcgccgtcctgcaagttgcgaccggtgttatttcgaccctccagattcaccaggagaacatgggacaggctctctcacctgacatgctggctaccgacttggcctattacctggttcgtaagggcatgcccttcaggcaggcccatgaggctagtggcaaggctgttttcatggctgagaccaagggtgttgctttgaaccagctgagcctgcaagagctgcaaaccatttctcccttgttctctggtgacgtgatctgcgtgtgggactatggccactccgttgagcagtatggtgccctgggcgggacggcccgttcgtcggtagattggcagatccgtcaggtgcgggcccttctgcaggcccagcaggcc

SEQ ID NO: 677 - DNA, 1392 bp, Artificial Sequence
  derived and/or modified sequence
atggcttccgagtcgggcaagctgtggggtggtcggtttgtgggagcagtcgatcccatcatggagaagttcaacgccagtatcgcatacgatcggcacctctgggaagtcgacgttcagggcagcaaagcttactcacgcgggttggagaaagccggacttctgaccaaggctgaaatggaccagatcctccatggtctggacaaggtggcagaggagtgggctcaagggactttcaagttaaattcaaatgatgaggatatccatacggccaatgaaagacggcttaaagagttaattggtgcaacggcgggtaagctacacaccggccgatcgagaaacgatcaagttgtaacagatctgcgcttgtggatgcgccaaacctgctccaccttgtcgggtcttctttgggaacttatcagaaccatggtcgatcgcgcggaagccgagcgggatgtcctattcccgggatacactcatctgcagagggctcagccaatccgatggagccactggattcttagccacgctgtggcgttaaccagagattcagagcgcttgttggaagtgcgcaaacgaatcaatgtgctccctctgggctccggagccatcgccggtaaccccttaggtgttgatagagagctgctgcgtgccgaactgaactttggagccattactttgaacagtatggatgccactagtgaacgagactttgtcgctgagtttttgttttgggcgtctctgtgcatgactcacctcagtcgtatggctgaagacctaatcctgtactgcaccaaggaattctcttttgttcagttaagcgacgcctacagcacgggcagttcgttgatgccccagaagaagaacccagattcccttgagttaatccgatctaaagctggacgcgtcttcggccgatgcgccgggctcttgatgactctcaagggtttgcctagtacctataacaaggatttacaggaggataaagaggccgttttcgaggtcagtgacaccatgagcgctgttctccaggtggctacaggtgtgatcagcacgttgcagattcatcaggagaatatggggcaagctctgtcccctgatatgctggccactgatctcgcctattatttggttcgtaagggaatgccctttcgccaagcacacgaggccagcgggaaagctgtgtttatggctgagacaaagggcgtcgcattgaaccagctatctttgcaggaactccaaacgatctcgccccttttttccggggacgtgatttgtgtgtgggattatggtcacagcgtggaacagtacggggcgctgggaggtacggcacggtcaagtgttgattggcagatccgacaagtaagggccttactacaggcacagcaggcg

SEQ ID NO: 678 - DNA, 1392 bp, Artificial Sequence
  derived and/or modified sequence
atggccagtgaaagcgggaagctctggggggggcggtttgtcggggcagtagatccaattatggagaaattcaatgcctcaatcgcatacgacagacacctgtgggaagtggatgtgcagggttccaaagcctactcacgcggactcgaaaaggctggacttctcacaaaggctgagatggaccagatcctccatgggttggataaggtggctgaggagtgggctcagggaacttttaagctcaattccaacgacgaagacattcacactgctaacgagaggcgacttaaggaactgatcggggctaccgccggcaagctgcatacagggcggagccggaatgatcaggtggttacggatctgaggctgtggatgagacagacctgttctacactgtcagggttgctgtgggaactcataagaacaatggtcgacagggctgaagcagaacgcgacgtgctgttcccgggctatacccatctgcagagagcccaacccatcaggtggagccattggatcctgtctcatgcggtagctctgacaagagattcagagcgcctcctggaggtgaggaaaagaatcaacgtattgcctttgggatccggcgctatcgcgggaaatccgctgggcgtggaccgggaacttctgcgagccgagctgaactttggcgcaattaccttgaattccatggacgccacatccgagcgcgactttgtggcagagttcctcttttgggcatccctgtgtatgacacatctctctcgaatggctgaagacctcatactgtattgcactaaggagttctctttcgtgcagctgtccgatgcatacagcaccgggtcttccctgatgcctcagaagaagaatcctgatagcctggaacttatccgatcaaaagcaggacgggttttcgggcgctgtgctggccttctcatgacattgaagggtctgccctcaacttacaataaggatctccaggaggacaaggaagccgtatttgaagtcagcgataccatgagtgccgtccttcaggttgctactggtgtcatttctacattgcagattcaccaggaaaatatgggacaggccttgagccctgacatgctcgcgacggatctggcttattatttggtccggaaaggcatgccgttcaggcaagcacacgaggcctctgggaaagcagtgttcatggcagagaccaagggggtagccctgaaccagctttctctgcaggaactgcaaaccatctcccccctgttcagcggagatgtaatatgcgtgtgggactatggccactccgtcgaacaatacggcgccttgggcgggaccgccaggtcctccgtggactggcaaatacgccaggtccgagcactgcttcaggcacagcaggca

SEQ ID NO: 679 - DNA, 1392 bp, Artificial Sequence
  derived and/or modified sequence
atggcctctgaatctggcaaactttggggaggtaggttcgtgggtgctgtggatcccatcatggaaaagttcaacgcatccatcgcctacgaccgtcatctgtgggaagttgacgtgcagggtagcaaggcctattctcggggactggaaaaggccggcctcctgacaaaagccgaaatggaccagattctgcatggtctcgataaggtggcggaggagtgggcgcagggcacatttaagctgaactccaatgacgaagatatccacaccgctaatgagcgccgactgaaggagctcatcggggctacggccggaaagctgcacactggtcgaagccgcaacgaccaggtggtgaccgatcttcggctttggatgagacaaacctgttctacactctccgggcttctgtgggaactgatcagaaccatggtggaccgcgcggaagccgagcgggacgtcctctttccaggctatacccatctccagcgtgcccagcctatccggtggagccactggattctgtcacacgccgtcgctttgaccagagatagtgaaaggctgttggaggtgaggaagagaatcaatgtgctcccccttggcagtggcgccatcgcaggtaaccctctaggcgtggatagagagttgctgagggccgagctgaactttggagcaataacgctgaacagcatggacgctaccagcgaaagagacttcgtggcagagttcctattctgggcatctctctgcatgacacacctttcacggatggccgaggatctcatcctctattgtaccaaagagtttagctttgtccaactgtccgatgcctatagcacagggtcctcccttatgcctcagaagaagaatcctgactccctagaactcatcaggtccaaagctggcagggtttttggccggtgcgctgggctcctgatgactttgaaaggactgccttcaacatacaacaaggatcttcaggaggacaaagaggctgtgttcgaggtgtctgatacaatgtctgcagtcctgcaagtggcaacaggtgtgatctctactttgcagattcaccaagagaacatggggcaggccttatcccctgatatgctcgccactgacttagcctactacttggtccggaagggtatgccgtttagacaggctcatgaagcttccgggaaggccgtcttcatggccgaaacaaagggggtcgccctgaaccaactgtctctgcaagaactccaaacaatatccccactcttctccggagatgtaatctgcgtgtgggactatggccacagcgtcgaacagtacggcgccttagggggcaccgcccggtccagtgtggactggcagatccggcaagtacgggccctcctccaagcacagcaggcc

SEQ ID NO: 680 - DNA, 1392 bp, Artificial Sequence
  derived and/or modified sequence
atggcaagtgaaagtggcaagctgtggggcggtaggttcgtgggagccgtcgatccaatcatggaaaagtttaatgccagtatcgcttacgatcgccacctgtgggaggtcgatgtccagggcagcaaggcatacagcagaggactcgaaaaagcagggctcctcacaaaagcagaaatggatcaaatcttacatggcctggataaggttgccgaagagtgggcccaaggcaccttcaaacttaactccaacgacgaagatattcacaccgcaaacgaacgccgcttgaaggagctaatcggggctactgcagggaagctgcacacgggaagatctcgaaacgaccaggtggtgacggaccttcgattatggatgcgacagacctgctctactttgagcggcctgctgtgggaattaatccgtactatggtcgaccgcgcagaagccgaacgggacgtgctgttccctggatacacccacctgcagcgggcccagccaatcaggtggagccactggatacttagccatgcggtggcactcacgcgagattccgaaaggctacttgaggtccgcaagcggataaatgtgctgccacttggaagcggagcgattgcaggtaacccactgggtgtggacagagagctactgcgcgcagaacttaacttcggggcaatcaccctgaatagcatggatgcaacctccgagagagatttcgtggctgaatttcttttctgggcgtctctgtgcatgactcacttatcacgcatggctgaggatttaatactgtattgtaccaaggagttcagtttcgtgcagctgagtgacgcttattctaccggatcctctctgatgccccagaagaaaaaccccgatagcctggagctgatcaggtcaaaggccggtagagtttttgggcgatgtgctgggctgcttatgactctgaaaggcctcccttcaacctataataaagatttgcaggaggacaaggaagccgtctttgaggtgagtgataccatgtctgcggttctccaagtggctacaggggtgatatcgacactccaaattcatcaggagaatatgggccaagccctatcacctgatatgcttgccactgacttagcatactatctggtaaggaaggggatgccatttaggcaggcccacgaggcatcggggaaggcggtgttcatggctgaaaccaagggtgtggcactgaatcagctgagcctgcaggagcttcaaaccattagccccctcttctccggcgacgtgatatgtgtttgggattacgggcatagcgttgagcagtacggagctctagggggcacagcacgcagtagtgttgactggcagattaggcaggtacgcgccttgctgcaagctcagcaggca

SEQ ID NO: 681 - DNA, 1392 bp, Artificial Sequence
  derived and/or modified sequence
atggcaagcgagtccggaaagctgtggggtggacggtttgtcggggcagtcgatccaatcatggagaagttcaatgcttcgatagcttacgacagacatctgtgggaagtggatgtccagggttcaaaggcatattccagagggctcgaaaaagcaggactgcttactaaggctgaaatggatcagattcttcacggtcttgacaaggtggcagaagaatgggcgcaaggaacttttaagctcaactcaaatgatgaagatatccatactgctaacgaaaggaggctgaaagagctgatcggagccaccgcaggaaagttgcacactggcagatctaggaacgatcaggtcgtcaccgatctgcgtctttggatgcggcaaacctgttctacgctttcgggactgttgtgggagctcatcaggactatggtggaccgagcggaagcggaacgagatgtcctgttccctggttacacccatctgcaacgagcccagccaatccgttggagccattggatactcagccatgcggtcgctcttacccgggactcagaaaggctcctcgaggtgcgaaagaggataaacgtgctgcctttgggttcgggggccatcgcaggcaatcctctcggagtcgatagggaacttctgagagcagaactgaacttcggggccatcactcttaactccatggacgcgactagcgaaagggattttgtggcagaatttctcttttgggccagcctttgtatgactcacctctcccgtatggctgaggatctgattctctactgcactaaggaattctcatttgtccaacttagcgatgcatacagcacgggatcttcactgatgcctcagaaaaagaaccctgattcactcgaattgattcgctcgaaggctggtcgcgttttcggccgctgtgcgggccttctcatgacgcttaaggggctgccttcaacctacaacaaggaccttcaggaggacaaagaagcagtgtttgaagtttccgacacgatgtctgcagtgctccaggtggcaaccggagtcatttcgaccctccagattcaccaagagaatatgggccaagcgctgtcccccgacatgctcgcaactgacctggcttactatctggtgagaaaaggtatgccctttcggcaagcacatgaagcctccggtaaagcagtctttatggccgaaaccaagggagttgcccttaaccagctcagccttcaggaactgcaaaccatctcgcccctgttttcgggcgatgttatatgcgtgtgggattacggtcattcggttgagcaatacggagcgttgggaggtactgcacggagcagtgtggactggcagatacgtcaagtgagagcacttttgcaagcacaacaagcc

SEQ ID NO: 682 - DNA, 1392 bp, Artificial Sequence
  derived and/or modified sequence
atggcttccgaatctggcaaactgtggggcgggcgattcgtcggcgcggtcgacccaatcatggaaaagtttaacgcttcaatcgcatacgatcgacatctttgggaagtcgacgtccaggggtctaaagcctacagccgtgggctcgagaaagctggtttactgactaaggcagagatggatcagattctgcatggcctagacaaggttgctgaggagtgggcacagggaacctttaaactgaacagtaatgacgaggacattcacaccgctaatgaacgccggctgaaagaacttataggtgcaactgcgggcaaactgcataccggccgttctaggaacgaccaggtcgtgactgacctgaggttatggatgagacaaacttgtagcactctcagcggtctgctgtgggagttaataagaaccatggtggatcgcgcagaggccgaaagggacgtgctcttcccagggtacacccatctacagcgggcccagccgatacggtggtcacactggatcctgtctcacgccgtggcactgacgcgcgacagcgagcggctgctggaggtgagaaaaagaattaatgtgctgcccctaggttcaggggcgatagcaggaaaccctctcggggtcgacagagagctactgcgcgcagagctaaacttcggtgccatcaccttgaattccatggatgctacatcggagcgggattttgtggctgagttcctgttctgggctagtctttgtatgacacacctctcaagaatggccgaagatctgatcttgtattgtacgaaggagtttagtttcgtgcagttgagtgatgcctactctacagggtccagcctgatgccacagaaaaagaaccctgactccctcgagctgattcgctccaaagcaggcagggtatttggacggtgtgcaggactgctcatgaccttaaaggggttgcctagcacctacaacaaagatttgcaggaggacaaagaggctgtgttcgaggtgtcagacacaatgtccgctgttctgcaggtcgccacgggggtgatctctacactccagatccaccaggaaaatatggggcaagctctctctccagatatgcttgcgactgatctggcctattatctggtgcggaagggcatgccattcagacaggcccacgaagctagtgggaaagcagtcttcatggcggaaactaaaggcgtcgcactgaaccagctctctctccaggagttgcagacgatctcacctctgttcagcggcgacgtgatctgtgtttgggactacggacattcagtggaacaatacggtgctctcggagggactgcccggtcctcagtggactggcagataagacaagtcagagccttgcttcaagcccagcaggca

SEQ ID NO: 683 - DNA, 1392 bp, Artificial Sequence
  derived and/or modified sequence
atggcatctgagagtggcaagctttggggaggccgttttgtaggcgcagtggaccctatcatggaaaagttcaatgccagtatcgcctacgacagacatctgtgggaagtagacgtccaggggtcaaaagcttattcaagggggctagagaaggcaggcctgttgacaaaggctgaaatggatcagatcctgcacggactggacaaggtggccgaggagtgggcgcaggggactttcaagctaaacagtaatgatgaagacatccacaccgctaacgaacgacggctgaaggaactgatcggcgccacagcagggaagctccacacgggtagaagccgcaacgaccaggtggtgaccgatcttcgactgtggatgcgccaaacatgctccactctgtctggattgctttgggaactgatccgaaccatggttgaccgagcagaggcagagcgagacgtgttattcccagggtacacccacctgcaaagggcacaaccaataaggtggtcacactggattctcagccatgccgttgctctgacacgggactccgaacggctgctggaggtcagaaagcgaattaatgtcttgccactgggatctggtgctattgcaggcaatccactcggtgttgaccgggagctgttaagggcagagttgaactttggagcgataaccctgaattccatggatgctacatctgagagggattttgtcgccgagttcctcttttgggccagtctatgtatgacccacctgagtcgaatggccgaagatctgatcttatactgcaccaaagagttcagcttcgtgcagctgagcgacgcctattccactgggtcatctctgatgccccagaagaaaaaccccgattcacttgagctgattcgatcaaaagcaggcagggtcttcggacgttgtgcagggttactgatgaccctgaaaggccttccatctacctacaacaaagatctccaggaggataaggaggccgttttcgaggtctcagatacaatgtcagcagtattgcaggttgccaccggcgtcatcagtaccttgcaaatccaccaagagaacatgggtcaggcactaagtcccgacatgctggcgacggacctggcatactacctagttagaaaaggaatgccctttcgacaggcgcacgaagcttccggcaaagcagtgtttatggccgagaccaagggcgtggcactgaatcagctgtctttgcaggaactgcagacaatctcacctctgttttctggggacgtcatctgcgtgtgggattacggacacagcgtggagcagtatggggccctgggcgggaccgcgcggtcttccgtcgactggcagatcagacaagtccgtgctctccttcaggcccagcaggca

SEQ ID NO: 684 - DNA, 1392 bp, Artificial Sequence
  derived and/or modified sequence
atggcctctgaaagtgggaaactttgggggggacgctttgtaggggctgtggatcctataatggaaaaatttaatgcctctatcgcctatgatcgccacttgtgggaagtggacgtgcagggaagtaaagcctatagtcgggggctcgaaaaggctgggctccttacaaaagccgagatggatcagatcctgcacggattggataaagtagcagaagaatgggcgcagggaactttcaaactcaactccaatgatgaagacatacatacagcaaatgaacggcgattgaaagagctaatcggagccactgccgggaaactgcacacagggcggtctcggaatgatcaggtggttactgatctcaggctttggatgaggcagacttgttctacactgagtgggcttttatgggaactaattagaacaatggttgatcgagccgaagccgaacgcgatgttctttttccaggatatacacatttgcagcgcgcccagcctatcagatggagtcattggattctctcacacgctgtggctctcactcgggatagtgaaaggttgctggaagtaagaaaacgcatcaacgtcttgcccctcgggtccggggcaatagcagggaaccccctgggagtggatcgggaactccttcgggcagaacttaatttcggagcaatcactctgaactctatggatgcgacatccgaacgggattttgtggctgagtttctgttctgggctagtctatgcatgactcacctgtctcgcatggccgaggatctaattctctactgcacaaaagagttttcatttgtccagctctccgacgcttacagtactggatcgagtctgatgccccagaagaagaacccagattcacttgagctgatacgaagtaaagcagggcgcgtcttcgggcgctgtgctgggctgctcatgactctgaaaggactgccttcgacatataacaaagaccttcaggaagataaagaggctgtatttgaagtaagtgatacaatgtccgccgtgttacaggtggctacaggagtgatttctactctacagatccaccaggaaaacatggggcaggccctgtctccagatatgctagctacggacctggcttactacctcgttaggaaagggatgccattcaggcaggcacacgaagccagtggaaaggctgtttttatggctgaaacaaaaggggtggcccttaaccagttatctctccaggagcttcagactatctctcccctgttttccggagatgtgatctgtgtgtgggattacgggcattccgttgaacagtatggagcactgggaggaacagcaagatctagtgtggactggcagattcgacaggtcagagccctcctgcaggcgcagcaggcc

SEQ ID NO: 685 - DNA, 1392 bp, Artificial Sequence
  derived and/or modified sequence
atggcttctgaaagcggaaaattgtggggggggcgctttgtcggagcagtggaccccatcatggaaaagttcaacgcctctatcgcttacgaccggcatctgtgggaagtggacgtgcagggtagcaaggcatatagccgcggcttggaaaaggcaggattgctaacaaaggccgaaatggaccagatactccatggattagataaagttgctgaagaatgggctcaaggcaccttcaagctcaacagcaacgacgaagacatccacaccgctaacgagaggaggttgaaagagctgatcggggctactgctggtaaacttcatacgggccgcagtagaaacgaccaggtggtgaccgacctgagattatggatgaggcaaacatgctcgacccttagcggactgctctgggaattaatcaggacaatggtggacagagcagaagctgaacgcgatgttctgttcccgggatacactcatctgcaaagagctcagcccatccgctggtcccactggattctgtctcacgctgtggcgctcacaagggatagcgagcgactgctggaggtcaggaaaaggatcaacgtgctgcccctcggaagcggtgccatcgcaggaaacccattgggggtcgacagggaactgctccgcgcggagctgaattttggagccattactctcaatagcatggacgctacaagcgaaagggacttcgtggctgaatttctcttttgggcgagcctgtgtatgacccacctgagccgaatggccgaggacctgattctgtactgcaccaaagaatttagcttcgtacagctgtctgatgcgtactcaactgggtccagcctgatgcctcaaaaaaagaaccccgatagcctggagctcatacgctccaaagctggcagggtgttcggcaggtgcgcgggactcctcatgacgctgaagggcctgccaagtacatacaacaaggatttgcaggaggacaaagaggccgtgtttgaggtgagcgatacaatgagcgcagtgctccaagtagcgaccggagttatctccactctccagatccatcaagaaaatatgggacaagcccttagtcccgatatgttggcgactgatctcgcttattacctagtcaggaaaggaatgcccttcagacaggctcacgaggcttccggaaaagctgtgtttatggctgaaaccaagggagttgctctgaaccagctgagtctgcaagaactgcagactatcagccctctgttttcaggggacgtcatctgcgtgtgggactatgggcactctgtcgaacagtacggtgcgctgggcggaaccgcccgctcttccgtcgattggcagatccgtcaagtccgtgctctcctgcaggctcaacaagca

SEQ ID NO: 686 - DNA, 1392 bp, Artificial Sequence
  derived and/or modified sequence
atggcctcagagagcggaaagctatggggaggaagatttgtgggagctgttgaccctattatggaaaagtttaacgcgtctatagcatacgaccggcatctatgggaggttgacgttcaggggagtaaagcttactcccgagggctggagaaggcggggctgctcacaaaagccgagatggatcaaatcctgcacggactggacaaggtggctgaagagtgggctcaaggaactttcaaacttaactctaatgatgaggatatccacaccgcgaatgagaggaggctgaaagaactgatcggtgccacagcaggtaaactccatactgggcgctctaggaacgaccaggtcgttaccgacctgcgtctatggatgcgccagacctgtagcacgttatcaggacttttatgggagctgatccggaccatggtggaccgcgcggaggccgaaagagacgtgctcttccccgggtacacacatctgcagcgcgcccagccaattaggtggagtcattggattctgagtcacgcagtggcactcacacgggactccgaacggctgctagaggtcaggaagaggattaacgtactaccactaggatcaggggccatcgcggggaacccgttgggggtcgaccgcgagctgctcagggccgagctcaatttcggggccatcacattaaatagcatggacgcaacatcagaacgggattttgtggccgaatttctattttgggcctccctttgtatgactcacctgtcccggatggcagaagacttaatcttatactgcaccaaagagttctctttcgtgcaattatccgacgcctactccaccggtagctccctcatgccacagaaaaagaatccggactcccttgagctgatacgaagcaaagctggtagggtgttcggtagatgtgcaggcctactgatgaccctcaagggcctgcccagcacgtacaacaaggacctacaagaagataaggaagccgtgtttgaggtatctgacacgatgtcagccgtgctccaggtagccaccggggtcattagtactctccaaattcaccaagaaaatatgggccaggcgcttagccctgatatgctcgcgacagatctggcctactaccttgtgaggaagggaatgcccttccgccaggcccacgaagcgtctgggaaggcagtgttcatggccgagacaaagggtgtggccttgaaccagctgtcgttacaggagctccagaccatctctcctctattcagtggagacgtgatctgcgtctgggactatggacactctgtggaacagtatggggctttaggaggcaccgcacggagcagtgtggactggcagatccgccaagttcgcgccttgctgcaggcccagcaggca

SEQ ID NO: 687 - DNA, 1392 bp, Artificial Sequence
  derived and/or modified sequence
atggctagtgagagcggcaagctgtggggcggccggttcgtcggcgctgtggatccgataatggagaaattcaacgcaagtattgcatacgaccggcacctatgggaggtggacgttcagggaagcaaggcgtactctcgcgggcttgaaaaggcaggacttctgactaaagccgaaatggaccagattctccacggccttgataaagtcgccgaggagtgggcacagggcacttttaagttgaacagcaacgatgaggatatccacaccgctaacgagcgccgactgaaggagctgatcggtgccaccgcaggaaaattacatactggacggagtcgcaacgaccaagtagttacagacttgcgattatggatgagacaaacatgctctaccctctcaggcctgctctgggagctcatccggactatggtcgacagagcagaggcggagcgcgatgttttgttcccgggctacactcatctccagcgcgctcaacccattcggtggtctcactggattctgtcccatgcagttgccctcacgagggatagcgaaaggcttctcgaggtgcggaagagaatcaacgtactcccattgggcagtggagccatcgcaggtaacccactaggcgtggaccgtgaactcttgcgcgctgagctcaactttggcgccatcactcttaattccatggacgctacttccgagcgggacttcgtcgctgaatttctgttttgggccagtctctgcatgacccacctctctcgcatggctgaagacttgatcctttactgcaccaaagagtttagcttcgtgcaactcagcgacgcctactccaccggcagcagcctaatgcctcagaaaaaaaatcctgacagcctcgagctaatacgaagcaaggcgggcagagtgtttggacgatgtgccggtctgctgatgaccctcaagggcctcccatctacatacaacaaggacctgcaggaggacaaagaggcagtgttcgaagtctctgacacgatgtcagcagttctccaggtggctacaggcgtgatatcaactctgcagatccaccaggagaacatggggcaggccctttctcccgatatgctggctaccgatcttgcctactatctcgtccgcaagggcatgccatttaggcaggcgcatgaagcctctggtaaagccgtatttatggctgagaccaagggcgttgctctcaaccagctgtcactgcaggaattgcaaacaatctcacctctgttcagtggcgacgttatttgcgtctgggactatggacacagcgtggagcaatacggagccctgggagggactgccagatcatctgtggattggcagatcagacaggtgcgggctttgcttcaggctcagcaagca

SEQ ID NO: 688 - DNA, 1392 bp, Artificial Sequence
  derived and/or modified sequence
atggcatcagagtctggcaagctatgggggggacgcttcgtgggggccgtggaccctatcatggaaaaattcaacgctagcattgcttacgataggcacctctgggaggttgatgtccaaggatcaaaagcctattctcgaggcctggagaaagcaggactgctaacaaaggccgagatggatcaaatcttgcatggtctggacaaggtggccgaggagtgggcacaggggacatttaaattgaactccaacgatgaggatatccatactgctaacgaacgacggcttaaggagctcataggcgccaccgccgggaaacttcatacaggaagatccaggaatgatcaggtagtgaccgacttgaggctgtggatgcgccaaacttgctcgaccctgtctggcctgctgtgggagctgatcaggacaatggtggatagggcagaggctgagagggacgttctctttccgggatatacacatttacagcgggctcagccaatccgatggagtcactggatcctctcccacgctgtggccctgacccgcgattctgagaggttactggaagtgcggaaaagaatcaatgttctgccacttgggagtggggctattgcgggaaaccctctgggggtggatcgagagctgctgagagccgaattgaacttcggagctataactctcaacagcatggatgccactagtgaaagagatttcgtggccgagtttttgttttgggcttccctttgcatgacgcacctgagtagaatggcggaggaccttatactgtactgtacgaaggaattttcattcgtgcagctttctgatgcttacagtactgggtctagcctcatgcctcaaaagaagaacccggattcgctggagctgattagaagtaaagctggtagggtcttcggacggtgcgcagggctgctgatgaccctaaaggggctaccaagtacatacaataaggacctgcaggaggataaggaagcagtatttgaagtgtccgatactatgagcgccgtcctgcaggtcgcaacaggagtaatcagcacccttcagatccaccaggagaatatgggccaggcgttgtcgcccgatatgttggctactgatctggcgtactacctagttcgaaaggggatgcctttccgccaggcccatgaggcatctggcaaggctgtgtttatggcagaaaccaagggcgtcgccctgaaccagttaagcctgcaggagctgcagactatttcgccgctgtttagtggagatgtgatttgcgtgtgggactacgggcactcagtcgagcagtacggagctcttgggggtaccgcccgcagctccgtggattggcagattcgtcaggtcagagcccttcttcaggcacagcaggcc

SEQ ID NO: 689 - DNA, 1392 bp, Artificial Sequence
  derived and/or modified sequence
atggcttcagaatctggcaaactgtggggaggaaggttcgtaggcgctgttgaccccataatggaaaaattcaacgcttcaatcgcatacgatcgtcatctgtgggaggtagacgttcagggctccaaggcatattctagaggcttggagaaagccggtcttcttactaaagctgaaatggaccagatccttcatggtctggacaaagtggcagaggagtgggcccagggtacttttaaactgaacagtaacgatgaagacatccacacagctaacgagcgtcgtctgaaggagttgatcggagctacagccggcaagctccatactggtcgttcacgcaacgaccaggtcgttactgatctcagactgtggatgaggcagacctgttccactctctccggcctcctctgggaactgattagaaccatggtggatcgtgccgaggccgagagggacgtcctcttcccaggctacactcaccttcagcgcgcccagccaatcaggtggagtcactggattctgtctcatgctgtggcacttacaagagactctgagaggctcctggaagtaagaaagagaattaacgtgctccctctcggctccggcgccatcgccggcaaccctttgggagtggaccgcgagttgctcagggccgagctgaacttcggtgcaattaccctcaactcaatggatgctacatccgaacgtgacttcgtggctgagttcctcttttgggcttccctctgtatgacacacctgtcaaggatggctgaggacctgattctgtactgcactaaggagttttcatttgtgcagcttagcgacgcctactctactggctccagcctcatgccccagaaaaaaaacccagactcactggagcttattaggtccaaggctggaagggttttcggccgttgcgctggcttgctgatgaccctcaagggtctgcctagtacctacaataaggatctgcaggaggataaggaagccgttttcgaagtgagcgacaccatgtcagctgtgctgcaggtggctacaggagtcattagcaccctccagatccaccaagaaaacatgggacaggccctctccccagacatgctcgccacagatctggcctattacctggtgcgtaagggaatgccttttcgtcaggctcatgaggctagcggaaaggcagtgttcatggcagaaactaaaggtgttgctctgaatcagctgagcttgcaggaactgcagactattagtcctttgttctccggagacgtgatttgcgtttgggactacggtcattcagtcgagcagtacggagctttgggaggtactgctcgttcttcagtcgactggcagatccgtcaggtgagagctctgttgcaggcacaacaggcc

SEQ ID NO: 690 - DNA, 1392 bp, Artificial Sequence
  derived and/or modified sequence
atggcttcagaatctggaaaactgtgggggggacggtttgtcggggcagttgaccccattatggagaaatttaatgccagtattgcctatgacaggcatctgtgggaagtagatgttcaggggtcgaaagcctactctcgcggacttgaaaaagccggacttctgacaaaagctgagatggatcagatactacacggacttgacaaagtcgcagaagaatgggcccaaggaacattcaaactgaattccaacgacgaagatattcatactgccaatgaaaggcgcctcaaagaacttataggagctacagctggaaaactgcatacagggcgatccagaaatgatcaggtggttacagatctgagattgtggatgcggcagacttgctctactctcagtgggttactgtgggagctcatacgtactatggtagatcgggcagaagccgaacgagatgtactctttcctggatatactcacctgcagagggcccagcccataaggtggagtcattggatcctgtcccatgcagtggctctaacaagggactctgaacgcctcctggaggtgagaaaaaggataaacgtcctcccattaggatctggggccatcgccgggaatcctctcggggtagatagggaactccttcgggcggaacttaactttggggccattactctaaatagtatggatgctacatctgaaagggatttcgtggccgaattcctcttctgggcttcactgtgcatgactcacctctcgaggatggccgaagatctcattctgtattgcactaaagaattttcatttgtacagctctctgatgcttattccactgggtcttctctaatgccacagaaaaaaaaccccgattcactggaactaataaggagtaaggccggacgcgtcttcggaaggtgcgccgggctactcatgactctgaaagggttaccatctacatataacaaagatctccaggaagataaagaagccgtctttgaggtgtcagatactatgtccgctgtgttgcaggtcgctacaggagtgatctcaactctccaaattcatcaggaaaatatgggacaggctctgtcacctgatatgctagccacagacctagcatattatctagtccgaaaaggaatgcctttcagacaggcccatgaagcttccgggaaggctgtattcatggccgaaactaaaggagtcgctctgaaccagctctcacttcaggaacttcagactatctccccactgttctccggggatgtaatctgtgtctgggattatgggcattccgtggaacagtacggagcccttgggggaacagctcgatcttccgtggattggcagatcaggcaggtgagggctctccttcaggcacagcaggcc

SEQ ID NO: 691 - DNA, 1392 bp, Artificial Sequence
  derived and/or modified sequence
atggccagcgaatcaggaaaactgtggggcggacggtttgtcggcgctgtggatccaattatggaaaagtttaacgcgagcattgcgtatgatagacacctgtgggaagtggatgtgcaaggatctaaagcatatagccgaggtcttgagaaagccggcttgctaaccaaggcagaaatggatcagatcttgcatggattagataaagtggccgaggaatgggctcaggggacttttaaactgaactccaacgacgaagatatccacactgcaaacgagcggcggctcaaggagctcatcggagctactgctggcaaactccacacagggcgatcacgtaatgaccaggtcgtaaccgatctacgcctgtggatgcgccagacatgtagtactttgtctggcctgctgtgggagttgattcggacgatggtggacagagcagaggctgaaagggatgtcctctttcccgggtacactcatttgcagagagcacagcctatcagatggagccactggatactgtcccacgccgtggctctaactagggattcagaacgtctgttggaagtcaggaagcgcatcaatgtgctgcccttaggctcgggggccatcgccgggaaccctctgggcgtcgatagggagctactccgagcggagctgaactttggtgcaattaccctgaatagcatggatgccactagtgagcgagattttgtagcggagtttcttttttgggcgagcttgtgcatgacccacctgagcaggatggctgaggaccttattctgtactgcaccaaagaatttagtttcgtacagttgtccgatgcctacagcaccggcagtagcctgatgcctcaaaagaagaaccccgacagcctggagcttataaggtctaaggccggacgcgtctttggacggtgcgccggactgctaatgacgctcaaagggctgcccagcacctataataaggacctgcaggaagacaaagaggcggtttttgaggtctctgacacaatgtcggccgtgttgcaagttgccaccggagtgatttccacattacaaatccatcaagagaacatgggccaggccttaagccctgatatgctggcaacggatttggcttattatctagtgaggaaaggaatgccattccggcaggcccacgaggcaagcggtaaagcagtgtttatggccgaaaccaagggggtagccctcaatcagctctcactgcaggagctccagactatttcaccgctatttagcggcgacgttatctgcgtgtgggactacggtcactccgttgagcagtacggcgccctgggggggaccgcccgttcatctgtggactggcagattcggcaggtgagggcactgctgcaggctcagcaagcc

SEQ ID NO: 692 - DNA, 1392 bp, Artificial Sequence
  derived and/or modified sequence
atggcatcagaatccgggaagctatggggcggcagatttgtaggcgcagtggatcccatcatggaaaaatttaatgcctccatcgcctacgatcggcacctttgggaggttgatgtgcagggttcaaaggcgtacagcaggggcctcgagaaagcgggtctcttgactaaagccgagatggatcagatcttgcacgggcttgataaagtggccgaggaatgggctcagggcaccttcaaactcaacagtaatgatgaagacatccatacggccaacgaacgaaggctcaaagaactcattggtgcaactgccggaaagctccacacagggcgctctcggaatgaccaggtggtgacagatctaaggctctggatgcgacagacctgctccaccctgagcggactcctgtgggagcttatccggaccatggtggaccgcgctgaggcggagagagacgtcttgttccctgggtacacccatttgcagagggcccagcccatccggtggagccactggatcctatcccatgctgtagctctgacacgcgactctgagagactactcgaggtgcgcaaacgaatcaacgtgttgccactgggatccggcgccattgccggcaaccccctaggcgtagatagggaattgcttagggctgaattgaattttggtgctatcacactcaactcgatggatgccacatccgaaagagacttcgtggccgagtttctcttctgggctagcctgtgcatgacccacttgagtagaatggctgaggatctcattctgtactgtacgaaagagttttcatttgtacagctgtccgacgcctacagtaccggctcaagtctcatgccacagaagaaaaacccagatagcctggagctgatcaggtcaaaggccggtagggtattcggtaggtgtgcggggctgctgatgactttaaaaggccttcctagcacctacaacaaggacctgcaggaggacaaggaagcagtattcgaggtcagcgacacaatgagcgcagtcttgcaggtggccacaggtgtgatttctacactgcagattcatcaggaaaatatggggcaggcactgtcacctgatatgctcgcgaccgacctcgcctattatttggtccggaagggaatgccattcagacaagcccacgaggcctcagggaaagccgtcttcatggccgagaccaagggagtggcactgaaccagctttctcttcaggagttacaaacaattagtcccttgtttagtggcgatgtgatctgtgtgtgggattatggacacagtgtggagcagtatggcgctcttgggggaacagctcgctcctccgtggattggcagatcaggcaggtgagggctctgctgcaggcacagcaagcc

SEQ ID NO: 693 - DNA, 1392 bp, Artificial Sequence
  derived and/or modified sequence
atggctagtgaatctggcaagctgtggggcggacgcttcgtgggtgccgtcgacccaattatggagaaattcaacgcatctatcgcttacgacaggcacctatgggaggtcgatgtccagggttccaaggcatatagccgaggactcgagaaggcaggtctgctgactaaggcggagatggaccagatactccacggtctggataaggtcgctgaagagtgggcccaaggaactttcaaactgaactccaatgatgaggacattcacactgctaatgagcgccgcctcaaggagctgatcggcgctaccgctggtaagcttcataccggccgcagccggaacgatcaggtcgtcactgacctgagactttggatgcgccagacctgttccactctcagcggtcttttgtgggagttgatccgtaccatggtcgaccgtgctgaggccgagcgtgatgtcctgttcccgggctacactcacctgcagcgtgcccagccaatccggtggtcccactggatcttgtcccatgccgttgctcttactcgtgactccgagcgtctcctggaagtgaggaagcgcatcaacgttctaccgctgggctccggcgctatcgccggaaaccccctgggtgttgaccgcgagttgctgcgcgctgaattgaatttcggcgccatcaccctcaactccatggatgcaactagcgagcgcgacttcgtcgccgagttcctgttttgggcctccctttgcatgacccatctcagcagaatggcggaagacttgatcctctattgcaccaaggagttctccttcgtccaactctccgacgcctactcgacaggaagctccctgatgccacagaaaaagaaccctgatagtttggagctaatccgctcgaaggccggtcgggtgttcggccgctgcgctggacttttgatgaccttaaagggtttgccctccacctacaacaaggaccttcaggaagataaggaggcggttttcgaggtatcggacaccatgtcggctgtcttgcaggttgctaccggcgtgatttcaacactgcaaatacaccaggagaacatggggcaagctctctccccagacatgcttgctaccgatcttgcctactatcttgtccgcaagggaatgccttttcgccaagcgcacgaggccagcggcaaggctgtcttcatggcagagaccaagggcgtcgcgttgaatcaactgtcgctccaggaactccagaccatctcgcccctgttctccggcgacgtgatctgcgtgtgggattacgggcacagtgtcgagcaatacggcgcactgggcggcactgcccgttcttccgtggactggcagatccgccaggtccgtgctttgctccaggcgcagcaagcc

SEQ ID NO: 694 - DNA, 1392 bp, Artificial Sequence
  derived and/or modified sequence
atggcgagcgagtcaggcaaactgtggggcggccgctttgtaggcgccgtggaccctataatggaaaaatttaatgcatccatcgcgtatgaccgacatctgtgggaagtggatgtacaaggctcgaaagcgtattcaaggggactcgaaaaagccggcttactgaccaaagccgaaatggatcaaatcttgcatggtctggacaaagtggcagaggagtgggcgcaaggaacattcaaactcaactctaacgatgaggatatccatacagccaacgaaaggagattaaaagagcttattggagctacagctggcaaactgcacactggtcgctcgagaaatgaccaggtagtgacagacttgcgtctctggatgcgacagacatgctccacactgagcggtcttttatgggagttgatccggaccatggtagatcgcgccgaagcggaaagagatgtgttatttcccggatatacccatttacaacgcgcgcagcctattcgctggtcgcattggatactgtcccatgcagtggctctgacaagagacagcgaaaggctgttggaggtgcgaaaaagaatcaatgtgttgccgcttggatctggcgccattgcgggtaatcctcttggggtcgatagagaactgctcagggctgagctgaattttggggccattacattgaactcaatggatgctacaagcgagcgcgattttgtggctgaatttcttttttgggcgtcgctgtgcatgacgcacctcagccgaatggcagaggacttgattctttattgtacgaaagaattctcttttgtgcaacttagtgatgcgtatagcacgggttcaagcttaatgccgcaaaaaaaaaatccagattcccttgagctcatccgctctaaagctggacgagtatttggcagatgcgcaggattgctgatgacattaaaagggcttccctcaacgtataataaagatctgcaagaagataaggaagcagtttttgaagtttcagatacgatgtctgcggtactgcaggtagcaacaggagtcatttcaacattgcagatacatcaggaaaacatggggcaggccctgtcacccgatatgctggctacagatcttgcctattaccttgttagaaaagggatgccctttagacaagcgcatgaagcgagtggtaaagccgtgtttatggctgaaactaaaggcgtagccttaaatcaactgtctttgcaggagctgcaaacaatttcaccgctctttagtggagacgtgatctgcgtttgggattatggccactctgtcgaacaatatggcgcgcttggcggaacagcccgatcttcggtggattggcagatcagacaggttcgcgcgctgctgcaagcccaacaagcc

SEQ ID NO: 695 - DNA, 1392 bp, Artificial Sequence
  derived and/or modified sequence
atggcgtccgagagcggcaagctttgggggggacgttttgtgggggctgtcgaccccatcatggaaaagttcaatgcttccatagcctatgaccgtcacctgtgggaagttgatgtccagggaagtaaggcctacagccgtggtctggaaaaggccggactcctgacaaaggctgaaatggaccagatcctgcacggactcgacaaagtcgcagaggagtgggcacaggggacttttaaactgaattccaatgacgaggatatacacaccgctaatgaacgtcgactgaaggaacttattggtgccactgccgggaagctccatacaggtaggtcccgcaacgatcaggtcgtcaccgatttgaggctgtggatgcgacagacctgcagcacattatccggcctgctttgggagctgattagaaccatggtcgatcgtgcagaagcagagcgagatgtgctgttccccggctatacccacctgcaacgagcccagccaattcggtggtctcattggattctgtcacatgccgttgccctcacgcgtgacagtgagagactgctggaggttaggaaacgaatcaacgtattgcccctgggcagcggagccatagccggaaaccccttgggtgtggatagagagctcctccgcgcggagctgaacttcggcgccattaccttaaatagtatggatgcgacttcggagcgggatttcgtagccgagtttctgttctgggcctcactctgtatgacgcatctttcccggatggcagaggacctcattctgtactgtactaaggagttcagttttgttcagctctccgacgcctacagtaccggatcgtccctgatgccacagaagaaaaatccagactccctggagctcattaggtccaaggccggacgtgttttcggccgctgtgccggcctgttaatgacgttgaagggtctcccttcgacgtacaacaaggatctgcaggaagacaaggaggctgtctttgaagtgtccgacacaatgagcgcagtgttgcaggtggcaacaggagtcatttccacgctacagatccaccaggaaaacatgggccaagccctgagcccagacatgctcgccaccgatctggcatactatttggtgcggaagggtatgccgtttagacaggcgcacgaggcctcggggaaagctgtcttcatggcggaaaccaaaggagtggcccttaaccagctgagcttgcaggagctccagacgatctccccactgttctctggggacgtaatatgcgtctgggactacggtcactcggtggagcagtacggggctttggggggcaccgcaagaagctccgtggattggcagatcagacaggtgcgcgcactgctgcaagcccagcaggct

SEQ ID NO: 696 - DNA, 1392 bp, Artificial Sequence
  derived and/or modified sequence
atggcttccgagagcggtaagctatggggaggacggttcgtgggtgctgtagaccctatcatggagaagtttaacgccagcatcgcctacgatcgccacctgtgggaggtggacgtacaaggttcaaaagcctacagtcgcgggctggaaaaggccggactgctcactaaagcagagatggaccaaatcttgcacggccttgacaaagtggctgaagagtgggcacaaggcacttttaagctcaattcaaacgacgaggatatacacacagcaaacgaaagacgtttgaaggagcttattggcgctacagccggtaaactgcataccggaagatcacggaatgaccaggtggttaccgacctgaggctgtggatgagacagacctgtagcacactgagtggattattgtgggaactgatccggactatggtggacagagcggaagctgagagagatgtgctgttccccgggtatacgcacctccaacgagcccagcctatccgttggagccactggattttgtcccacgctgtggctctgacaagggactcagaacgtctgctcgaggtgcgaaagcgaatcaacgtcctgcccctgggctccggcgccatcgccggaaatcctctcggtgtagaccgggaactgctgagggccgagctgaacttcggggccattaccctgaactccatggacgccacttccgaacgtgactttgtcgccgagttcttgttttgggccagtttgtgcatgacccacttgagccggatggctgaggatctgatcctatactgtaccaaggagttcagtttcgtgcaactcagcgacgcttacagtactggctccagtcttatgccacagaaaaagaacccggatagcctagaactcattcgtagtaaagcagggcgcgtgtttggaaggtgtgcaggcctgctcatgacccttaagggactaccctctacatacaataaagacctccaggaggataaggaagctgtatttgaagtgtccgacactatgtccgcagtccttcaggtggcaaccggggttatcagcactctgcaaatacaccaggagaatatggggcaggcgctgtccccagacatgctggcgacagacctcgcctactatcttgtgagaaagggaatgcctttcaggcaggcacacgaggcttctgggaaggccgtgtttatggcagaaactaaaggggtggccttaaatcagcttagcctgcaggaattgcagaccataagcccactatttagcggggatgttatttgcgtttgggactacggacattcagtggaacagtatggggcactgggcggcactgcacgttcaagtgttgattggcagatcagacaggtgagggccctgctgcaggcacagcaagcc

SEQ ID NO: 697 - DNA, 1392 bp, Artificial Sequence
  derived and/or modified sequence
atggcttctgaatcaggaaaattatggggagggagatttgttggggctgttgatcctataatggaaaaatttaatgcttcaatcgcatatgatagacatctttgggaagttgatgttcaaggatctaaagcatattctagaggattagaaaaggctggattattaactaaagccgaaatggatcaaattttacatggattagataaagttgctgaggaatgggctcaagggacttttaaattaaatagtaatgatgaagatattcatacagctaacgaaagaagattaaaagaattaattggggcaacagctggaaaattacatacaggaagaagtagaaatgaccaagttgttacagaccttagactttggatgcgtcaaacatgttctacacttagtggattgttatgggaattaattagaacaatggttgatagagctgaagctgaaagagatgttttatttcctggatatactcatcttcaaagagctcaaccaatacgttggtctcattggattttatctcatgctgtggctctaacaagagattcagaaagattgttagaagtaagaaaacgtattaatgtattaccattaggaagtggtgcaatagcaggaaacccattgggagtagatagagaattattaagagctgaacttaattttggagctattactttgaatagtatggatgctacaagtgaaagagatttcgtagctgaatttttattttgggcatcattatgtatgacacatttatctcgaatggctgaagacttaattctttattgtacaaaagaattctcatttgtacaactttcagatgcctattcaacaggaagttcattaatgcctcaaaaaaagaatccagatagtttagaacttattagatcaaaagccgggagagtttttggaagatgtgccggattattaatgacattaaaaggattaccttcaacttataataaagatttacaagaagataaagaagctgtttttgaagtttctgatactatgagtgctgttttacaagttgctactggtgttatatctactttacaaattcaccaggaaaatatgggacaagctcttagtcctgatatgttagctactgatttagcttattatttagttagaaaaggtatgccatttagacaagcacatgaagcttctggaaaagctgtatttatggctgagacaaaaggagtggctttaaatcaattatcattacaagagttgcaaaccatttcaccattattctcaggagatgttatatgtgtatgggattatggacattcagtagaacaatatggtgcattaggaggaactgctagatcaagtgtagattggcaaattagacaagtcagagcattattacaagcacaacaagca

SEQ ID NO: 698 - DNA, 1392 bp, Artificial Sequence
  derived and/or modified sequence
atggcctcggagagcggaaagctctggggagggagattcgtgggggccgtggatccgatcatggagaagttcaatgcctcaattgcttacgacagacacctctgggaggtggacgtgcaggggtcaaaggcctactcccggggactcgaaaaggctggactgctcactaaagcagaaatggatcagattttgcacggactcgacaaagtggcggaagagtgggcccagggaaccttcaagctgaattccaacgacgaagatatccatacggctaacgaacggcgcctcaaggaactgatcggcgccactgctggcaaactgcacaccggacggagccgtaacgaccaggtggtgactgacctgcggctgtggatgcgccaaacctgctccactctgagcggactgctctgggagctcattcgcacgatggtggacagggccgaggcagaaagagacgttctgtttccgggctatacccacctccagcgcgcacagccaatccggtggtcacattggatcttgtcacatgcggtcgcccttaccagggactccgagcgccttctggaagtccgcaaacggatcaatgtgctgccgctgggttcgggagcaatcgccggcaaccccttgggtgtggatagagagctgctgcgcgcggagttgaacttcggagccatcacgctgaattcgatggatgcgacctcagagcgggatttcgtggcagagttcctgttctgggcatccctctgcatgacccacctgtccaggatggctgaagatctcatcctgtactgcactaaagaattttccttcgtccagctctcggatgcctactcgactggcagctcgctgatgcctcagaagaagaacccagattccctggagctcatccgctctaaggcgggccgcgttttcggaaggtgtgcgggtttgctgatgaccctgaaggggcttcctagcacctacaacaaggacttgcaagaggacaaagaagctgtctttgaggtgagcgacaccatgtcggccgtcctgcaggtcgccactggagtgatctcaaccctgcaaatccaccaagaaaatatggggcaagccctgtcaccggatatgcttgcaactgacctcgcatactacctcgtgcgcaagggtatgccgttccgacaggcgcacgaagcctcggggaaggcagtgttcatggcggaaaccaagggagtcgctctgaaccagctgtcccttcaggaactgcagactatctctccactcttttcgggcgacgtgatctgcgtctgggactacggacatagcgtcgaacagtacggagcccttggaggcactgcgagatcgtccgtggactggcagattagacaagtgcgggccctgcttcaagctcaacaagcg

SEQ ID NO: 699 - DNA, 1392 bp, Artificial Sequence
  derived and/or modified sequence
atggcatcagaaagcggcaaactctggggggggcgattcgtgggagctgtggacccaattatggagaagttcaacgcaagcattgcctacgatagacacctctgggaagtagatgtgcaaggctccaaagcttatagccgtgggctcgagaaagcgggtttactcactaaggccgagatggaccagattctccatggccttgacaaggtggctgaagaatgggcacagggtaccttcaagctgaacagcaatgatgaggatatccacactgcaaacgaacgcagattgaaggaattgattggagccacggcagggaagttgcataccggccggagcagaaacgatcaggttgtcacagatttgagactatggatgcgtcaaacttgtagtacgctctctgggttactgtgggagctgatccggacgatggttgatcgcgctgaggccgagagagatgtcctgttccccggctacacacacttacaacgagctcagcccattagatggtcgcactggatcctgagtcatgctgtggcgctcactagagatagtgaacgacttctggaagttcgaaaaaggataaacgtcctgcccctgggatcgggcgccatcgcaggaaatcctttgggcgtggacagggagcttctacgcgccgagctgaactttggggccattacattgaactctatggatgccacctctgagcgcgattttgtagccgagttcctcttctgggccagcctatgtatgactcacctttctcgtatggccgaggacttgatcttgtattgtacgaaggaattttctttcgtgcagctgagcgatgcttactctaccggttcttctctaatgcctcaaaaaaagaaccccgacagccttgaattaattaggagtaaagcgggcagagttttcggacgttgcgctggactgctgatgaccctaaaggggcttccgagtacttacaataaagaccttcaggaggacaaagaagctgtgttcgaagtgtctgacactatgtccgcagtgctgcaggtggcaaccggtgtgatttctacacttcaaatacaccaagaaaacatgggccaagctctctctcccgacatgctggctacagatttagcatattatctcgtccggaaaggaatgccctttcggcaagcacacgaggcctcaggaaaagcagtttttatggcagagaccaaaggagtggccctgaaccagttgtccctacaagaattgcaaacaatctccccactgttcagcggagacgtaatctgcgtctgggattacggtcactccgttgaacagtacggtgctctcggcggcactgccaggagctccgtggactggcagatacgacaagtccgggctctcctgcaagcacagcaggcc

SEQ ID NO: 700 - DNA, 1392 bp, Artificial Sequence
  derived and/or modified sequence
atggcttccgaatccggtaagctgtggggtggtcggtttgtgggcgctgtggacccaataatggagaagtttaacgcatctatagcgtatgaccggcatctgtgggaagttgatgtgcagggatctaaagcctacagccgcggcctggagaaggctgggttgcttactaaagctgagatggatcagattctgcacggattagataaggtcgctgaggagtgggcacaaggaactttcaagctcaatagcaatgatgaagatatccacacagccaatgagagacgcctgaaagagctcatcggtgcgaccgcaggtaagctgcacacaggtcggtccagaaacgaccaggttgtcacggatttaagattatggatgcgacagacgtgctcaactctgagtggactcttatgggagctgataaggactatggttgatagagccgaagctgagcgggacgtcttattccccggttacacccatctgcagagggctcagcctattcgttggtcacactggattctgtctcatgcagtagccctgacaagggattctgaaaggctactggaggtcaggaagcgcatcaatgtgctaccactgggcagcggtgctatagcaggcaaccccctcggcgttgatcgagagttgctccgcgctgagctgaacttcggtgccattacgctaaacagcatggacgccacatctgaaagggacttcgtcgctgaatttctcttttgggcttccctctgcatgacccatctctcgcgtatggctgaggacctcatcctctattgcaccaaagaattctcttttgtccagctgtccgacgcatacagcaccggttcttctttgatgccacaaaaaaagaacccagactcattggagttgatccgatccaaggcaggccgcgtgtttggcagatgcgccgggctgttaatgacactgaaagggctcccgtctacctacaacaaagacctgcaggaagacaaagaggccgtgtttgaagttagcgacacaatgagcgctgtcctacaggtggcgactggagtgatatccaccctgcaaatccaccaggaaaatatgggacaagctctgagtcccgacatgcttgcaacagaccttgcatactatctggtgcggaaaggcatgccctttaggcaagcccacgaagcttctggcaaggccgttttcatggctgagacgaaaggggtggcactaaatcagttgtccctgcaggaacttcagacaatctcccccttgttttcgggagatgttatctgcgtctgggattacgggcactcagtggaacagtacggagcactgggcggaactgctcgaagctcagttgactggcagattcgccaggtgcgcgctctgttgcaggctcagcaggct

SEQ ID NO: 701 - DNA, 1392 bp, Artificial Sequence
  derived and/or modified sequence
atggccagcgagagtgggaagttgtggggcggaagattcgtgggagctgtggatccgattatggaaaaattcaatgcttcaatcgcttacgataggcacttgtgggaggtcgatgtgcagggttccaaggcctactcccggggtctcgaaaaagccggcctcctgaccaaggctgagatggatcagatacttcatgggctagacaaagtggctgaagaatgggcccagggaacttttaaactcaactccaatgacgaggatattcatactgcaaacgagcgcaggctaaaggaacttattggagccaccgcgggtaagctgcataccgggagaagccggaatgatcaggtggtcacggatctgcgtttatggatgcgccagacttgttccaccttgtccggactgttgtgggaattgatcaggaccatggtggaccgtgcagaagcggagcgggacgtgctctttccaggctacacccatctccaaagggcccaacccattcggtggagccattggatcttgtcccatgccgtggcgctcaccagggacagtgagcggttgctagaagtgcgcaaaagaatcaacgtgctaccactggggtccggtgcgattgcaggcaacccactaggcgtggaccgcgaattgcttcgggcagagctgaatttcggggcaattaccctgaatagtatggatgccacttccgagcgcgatttcgtggctgagtttttgttctgggcctctttgtgtatgactcatctgagcagaatggctgaagaccttattctgtactgcacgaaggaatttagttttgtgcagctgagtgatgcctacagcaccggttcaagcttgatgccccaaaagaagaacccagacagcttggagctgatacgaagcaaagccggccgcgtctttgggcgttgcgccgggctgcttatgactctgaaaggcctgccctccacatacaataaggatctgcaagaggacaaggaagccgtgtttgaggtgtcagataccatgagcgccgtgctgcaggtggcaaccggcgtgatctccacattgcagatccaccaggaaaatatggggcaggctttaagccccgatatgctggcaacagatctggcgtactatttagtgagaaaaggaatgccttttcggcaggcccacgaggccagcggcaaggccgtattcatggcggagaccaagggagtggctctcaatcagctgtcactgcaggaactgcagacaatctctcctctgttttccggagacgtcatttgtgtgtgggattacggccactctgttgaacaatacggcgccctcggtggtacagcaaggtccagcgtggactggcagatcagacaggtgagagcccttttacaggcccaacaagcc

SEQ ID NO: 702 - DNA, 1392 bp, Artificial Sequence
  derived and/or modified sequence
atggccagtgagtccggcaaattatggggcggccgatttgtgggcgctgtcgaccccatcatggagaagtttaacgcatccatcgcttacgatagacatttgtgggaggtggatgtgcaaggttcaaaagcctattcaagaggccttgagaaggccgggctgcttaccaaggccgaaatggaccaaatccttcatggattggataaagtcgcggaggaatgggcgcaaggaactttcaagctgaactcaaacgatgaggatatccatacagcaaacgagcggcgactaaaggagctgatcggagctactgcggggaagcttcacactggacgatcccgcaacgatcaggtggtcaccgatctgagactgtggatgagacagacttgctcgacgctgtccggcttgctgtgggagctcataagaactatggtagatcgtgccgaggcagaaagggatgttttatttcctggatatacacaccttcagagggctcaacccatcaggtggtcccactggatattgtcacatgccgtggccctaaccagggactcagagagattgctcgaggttaggaagaggattaacgtgctacccctgggatcaggagcaatcgccggtaatcccttaggggtggatcgggagcttcttcgggcagaacttaatttcggcgccatcactctcaacagcatggatgccacatcagagcgcgacttcgtcgctgagtttctgttttgggcatcactttgcatgactcacctgagtagaatggccgaggatctcatcttgtattgtaccaaggaattcagcttcgtccagctttcagatgcatacagcactgggtcctccctgatgccccagaagaaaaatcctgactcgctggagttgatcaggtctaaggccggaagagtgttcggaagatgcgccgggctgctgatgacgttgaaaggacttccatctacgtataacaaagatcttcaggaggacaaagaggcagtgtttgaggtatcagatactatgtcagcggtactccaggtggctaccggagtgatatctactctgcagatccaccaggaaaacatggggcaggccctgtcccctgacatgctggctacagacctcgcatattacctggtgcgtaaagggatgccatttagacaagcacacgaggcttcagggaaggcggttttcatggcagagaccaaaggtgtggccctaaaccagctgtccctgcaggagctgcagacgatctcaccgctatttagtggagacgtgatatgtgtttgggattacggccattctgtcgagcaatatggcgcgctgggcggaaccgccaggagcagtgtggactggcagatacggcaggttcgcgctctcctgcaggcacaacaggca

SEQ ID NO: 703 - DNA, 1392 bp, Artificial Sequence
  derived and/or modified sequence
atggctagcgagtccgggaaactttggggaggacgattcgttggagccgttgatccgattatggagaaatttaatgcgtctatcgcatacgatcgccatctctgggaggttgatgttcagggttcaaaggcgtactctcgtgggcttgagaaagcgggcctactgacgaaggcggagatggatcagatcctgcatggattggacaaggttgcagaggaatgggctcaaggcacttttaagctaaatagtaatgatgaggacattcataccgccaacgaacgaagactgaaagaactgattggagcaacggccggaaagttgcatacaggtcgttctaggaatgaccaagtcgtgaccgatctcaggctctggatgagacaaacttgtagtacactgtctggattgctttgggagcttatccgcaccatggttgaccgggctgaggctgagagagatgtgctatttccagggtacacccatctgcagagagctcaacccattcgttggagccattggatcctctcgcacgcagttgcattaacccgcgatagcgaacgtctgctcgaggtacgcaagcggattaatgtactcccactcggttctggcgctatcgcgggcaaccctttgggtgtggatagagaactcctgcgagctgaactcaatttcggggccattacgttaaactccatggacgcaacatctgagcgagatttcgtggccgaattcctgttctgggcctcgctttgcatgacacacctctctcgcatggccgaggatctaatcttgtactgtacaaaggagttctctttcgttcagctctccgacgcgtactcaaccggctcctccctgatgcctcagaagaagaatccagattctctagaactaatacgctctaaggctggtcgtgtttttgggcgttgcgcaggcctacttatgacactcaagggtttaccatcaacttataacaaggacctccaggaagacaaggaggcagtttttgaagtcagcgacacgatgtctgctgtcctccaggttgcaactggcgttatatctaccctgcagattcaccaagagaacatgggccaggcgctaagtccagacatgttagcaaccgacctcgcgtattacctggtcagaaaaggcatgccctttcgccaagctcatgaggcctctggtaaggccgtttttatggctgagacaaaaggtgttgcattgaatcaacttagcctgcaagagcttcaaacaatctctcctctctttagtggtgacgtaatttgcgtttgggattacggtcacagcgttgagcaatatggggcgctgggcggaacggcccggagttcagttgactggcaaattcggcaggttcgagcattgcttcaagcgcagcaagcc

SEQ ID NO: 704 - DNA, 1392 bp, Artificial Sequence
  derived and/or modified sequence
atggcctcggagtctggtaagctatggggaggacgattcgtcggcgccgttgatcctattatggagaaattcaatgcctccattgcctacgaccgacatctgtgggaagtggacgtgcagggctcgaaagcctacagtaggggactcgaaaaagcaggattgttgacaaaggctgaaatggatcagattctgcacggactggataaggtcgcagaagagtgggcgcaggggacattcaagttaaatagcaatgatgaggacatccatactgccaatgagcgacgcttgaaagagttgatcggagctactgccggaaagttgcataccggtcggtcaaggaacgatcaggtggtgacagatcttcggctgtggatgcgacagacatgtagcacactaagcgggctcctgtgggagctcattcgcacaatggtggatagagccgaagctgaacgtgatgttctttttcccggctacacccacctccagcgagcgcaaccaattcgatggtctcattggattctttcccacgcagtggctctgactagggatagcgagaggcttttggaggtccggaagcggattaacgttcttccccttggctcaggagcaattgctggcaaccctttaggcgtggacagagaacttctcagagcggaattaaattttggtgccatcacactgaactccatggacgctacttccgaaagggactttgtagctgaatttttgttttgggcctctctatgcatgacacacctgtcacggatggctgaagatctgattctttactgtacgaaggaatttagctttgtgcagctgagcgacgcgtattctactgggagttcactgatgccccagaaaaagaaccctgactccttagagctgataagatcaaaagcaggtcgggtgttcggacgctgtgcaggtctgctgatgacactcaagggtctgccatctacttacaataaagatctgcaagaagataaagaggccgttttcgaggtatcagacacgatgagcgccgttctccaggtggctaccggggtcatctcgacgttgcagattcaccaagaaaatatgggccaggctctgtcaccggatatgctggcaacggatctcgcctactacttagtcaggaaaggcatgccgtttaggcaggctcacgaggcgtcgggcaaggccgtgttcatggccgagactaagggggttgccctcaatcagctttcacttcaggagctccagaccatctcacccctgttttccggcgatgttatctgcgtgtgggactacggacactccgttgagcagtatggtgcgctgggcggaacagcaaggtcgtccgtagattggcaaatcagacaggtgcgggcactgcttcaggcacaacaggct

SEQ ID NO: 705 - DNA, 1392 bp, Artificial Sequence
  derived and/or modified sequence
atggcatcagaatcaggcaaactttggggtggtcgattcgtgggggccgttgacccaattatggaaaagtttaatgctagcatcgcttatgatcgtcatctatgggaagttgatgtgcagggcagcaaggcctattcacggggactggaaaaagcagggctgctcacaaaggctgaaatggatcagatcctacacggattagataaggtggcggaagagtgggcacagggtacttttaaactgaattcgaatgatgaagacattcacactgcaaacgagaggcgccttaaggagttaataggagctaccgccggcaaattgcacactggaaggagcagaaatgaccaggtggttaccgatttgcgcctgtggatgcgacaaacttgttcgaccttatcgggccttttgtgggaattgattaggaccatggtcgaccgcgccgaggccgagcgggatgttttattccctgggtacacccacctgcagcgcgcacagcctataagatggagccattggatcctctcccatgccgttgccctgacgagagactccgagaggttgctggaggtgcgcaaacggatcaatgtgttgccattgggaagtggtgctattgccggcaatcccctgggcgtcgaccgtgaacttctgcgggctgaactgaatttcggtgcgataacattgaacagcatggacgctacttcggagcgcgacttcgtggccgaatttctgttttgggcctccctgtgtatgactcacctaagtagaatggctgaggacttgatcctgtactgtacaaaagagttcagttttgtgcagttatccgacgcatattccacgggatcgtccctcatgccacagaagaagaatccagattctctggaactcataagaagcaaggccgggcgcgtgtttggtaggtgtgccggtcttcttatgaccctcaaggggcttccctccacctacaataaagatctccaagaggataaggaagccgtttttgaggtgtcggatacaatgtcagcagtcctgcaggtggcgacaggagtgataagcacgctgcagatccaccaggagaatatgggccaggccctttcgcccgacatgcttgcgactgacctcgcatactacctggttaggaagggaatgcccttccgccaggcacatgaggcatcaggaaaggccgtttttatggccgagaccaagggagtagccctgaaccagctgtccctgcaagagttgcagaccatctctcccctgttttctggcgacgtaatatgtgtgtgggactatggccatagcgtagagcagtacggagcccttgggggaacggccagatcttctgtggactggcagatcagacaagtgcgcgcgctgctacaggcccaacaggca

SEQ ID NO: 706 - DNA, 1392 bp, Artificial Sequence
  derived and/or modified sequence
atggctagtgaatccggtaagttgtgggggggaagatttgttggcgccgttgaccctattatggagaagttcaacgcttctatcgcatatgatagacatctgtgggaggtagatgtccaaggatctaaggcatattcgcgtggtctcgaaaaggcaggattactgaccaaagcagagatggatcaaatcttgcatggtcttgacaaagttgcggaggagtgggcacaaggaaccttcaaattgaactctaatgatgaggatattcatacagccaatgagcggagattgaaagaactcatcggtgcaactgccggtaagttgcacactggcaggagtagaaatgaccaggtcgtgaccgatttgcgattatggatgagacaaacctgttctaccttgtctggtttgctttgggaattaattcgtaccatggttgatagggctgaggcagagagagacgtgttgttcccagggtatactcatctccaaagagcacaaccgatacgttggtctcactggatcttgtcgcacgctgtggccctgactagggactcagagcggctattggaagttagaaagagaattaatgtattgcctttgggttcaggtgctatcgcaggtaatcctcttggagtcgatcgagagttgttaagggcagaacttaatttcggagccataaccttaaacagcatggacgccacgagcgaacgtgatttcgtggccgagttcttgttttgggcttctctctgcatgacacatctgtccaggatggccgaagatctcatactttactgcacgaaggagttcagctttgtgcaattgtctgatgcttactctaccggttcctctcttatgcctcagaagaaaaaccctgacagtcttgagctcatcaggtctaaagcaggtagagttttcgggcgctgtgctggcttactcatgactttgaagggacttccaagtacctacaacaaggacctccaagaggacaaagaggctgtgttcgaggttagcgacacaatgtctgctgtccttcaagtggctactggcgttatttcaacccttcagatccatcaagagaatatgggtcaagctttgtctccagatatgttagcaacagatctggcatattatttagttagaaaggggatgccatttaggcaagctcatgaggcttccggaaaagctgtttttatggcagagaccaagggtgttgctttgaaccagctgtctctccaagaacttcaaacaatctcaccactcttcagtggagatgttatttgtgtatgggattatggtcactctgtggagcaatatggagcactcggaggaacggcaaggtcctccgtagattggcagatccgacaggtcagagctcttttacaggctcagcaagcc

SEQ ID NO: 707 - DNA, 1392 bp, Artificial Sequence
  derived and/or modified sequence
atggcctcggaatctggaaagctatgggggggacggtttgtgggagcagtcgatccaatcatggagaagttcaacgcatcgatcgcgtacgatagacacctctgggaagttgatgtgcaaggatcgaaggcatacagccggggattggagaaagcaggacttcttacaaaggcagagatggaccaaatattacatggattggacaaagtcgccgaagagtgggctcagggaacattcaaattgaatagcaatgatgaagatatccacacagctaatgaacgacgcttgaaggaactcattggagctactgctggtaaactccataccggaagatcgcgaaacgatcaagtcgtaacagatctgaggttatggatgcgacaaacctgttcgactttgtccgggctgctctgggaacttatcagaaccatggtcgaccgagcagaagccgaaagggatgttctcttcccagggtacactcatctccaaagagcgcaacctattcgatggtcgcattggattttgtcgcacgcagttgctctcacaagagattccgagagactacttgaagtgaggaagcgtattaatgttcttccacttggaagtggagctatcgccggaaatcctttgggagtggatcgggaattgcttagagcagagcttaattttggagctatcacactaaattctatggatgctacgagtgaaagagacttcgtcgctgagtttctcttctgggcatctttatgcatgacccacttaagtagaatggcggaagacctcattttgtactgtactaaagagttttccttcgtccaactctccgatgcttattcaaccggatcatcactgatgccacagaaaaagaatccagattcacttgaattaattcgttccaaagctgggcgcgtttttggacgatgcgcgggtctactgatgacactgaagggactgccgtcaacttacaacaaagatctacaagaagacaaggaagcagtctttgaagtatcagatactatgagtgcagttctgcaagttgctactggagtgatttcaaccctccaaattcatcaggaaaatatgggacaagctctttccccagacatgctcgccacagacttagcatattacttggttagaaaaggaatgccgtttagacaggcacacgaagcttcgggcaaagctgtttttatggctgagactaaaggtgtagcattgaatcaactctccttacaagagttgcaaacgattagcccattattttcgggagacgttatctgtgtttgggattacggacactccgtggagcagtatggagccctgggaggaacggctcgaagttcagttgattggcaaatacgccaggtcagagctttgcttcaggcacaacaggcc

SEQ ID NO: 708 - DNA, 1392 bp, Artificial Sequence
  derived and/or modified sequence
atggccagtgagtctggcaaactgtggggagggcgcttcgtgggcgccgtcgatccaattatggagaaatttaacgcctccatcgcctacgatcgtcatctgtgggaagtcgatgtccaaggtagtaaagcttacagtcgaggtttagaaaaggccgggctgctcaccaaggccgagatggatcaaatcctgcacggcctcgataaggtagctgaggagtgggcccagggtacctttaagctgaatagcaatgatgaggatatccataccgctaacgagaggagactcaaggaactgattggagccaccgcagggaaactgcacactgggcggagccgaaacgaccaagtcgtgactgacctgaggctgtggatgcggcagacatgttccaccctctccggcctgctgtgggagctgattagaaccatggtggaccgggccgaggccgaaagggatgttctgttcccagggtacactcatttacagagggctcaaccaatccggtggagccactggatactgtcacatgcagtggccctcacccgggattccgagagacttctggaagttagaaagaggatcaatgtcctgcctctgggctccggggccattgccgggaatccactgggtgtggatagagagctattgagagccgagctaaatttcggcgccattacactaaattcgatggacgccaccagtgagcgagactttgtggccgagtttttattttgggcatctctttgtatgacccacttgtcacggatggccgaagatctcatcctttattgtacaaaggaattttctttcgtgcaacttagtgacgcttactcgacaggcagtagcctgatgcctcagaaaaaaaatcctgacagtctcgagttgatccgctctaaggccgggagggtttttggacgctgtgctggcttgttgatgaccctgaagggcctgccatcaacttacaataaggacctccaggaagataaggaggcggtgtttgaggtatcggacacgatgtccgcagtgctgcaggtcgccacgggagtgatttccacccttcaaatccaccaagaaaacatgggccaggctttgtcaccagatatgctggcaaccgacctggcatattatctggtgcgtaagggtatgccttttagacaggcccatgaagcaagcgggaaagctgtgtttatggctgaaaccaaaggcgtggcactgaatcagttatcgttacaagagctccaaaccatttcacccttgttctctggcgatgtaatttgtgtgtgggactacggccactcagttgaacagtacggagcccttggcggcacagcacggtcatccgtggactggcagatacgccaggtgcgagcccttctgcaggcacagcaggcc

SEQ ID NO: 709 - DNA, 1392 bp, Artificial Sequence
  derived and/or modified sequence
atggcttctgagagcggcaagctgtggggagggcgctttgtaggcgcggtggatccgatcatggagaagtttaacgcatcaattgcatatgatagacacctctgggaagtggacgtccaagggtctaaggcctatagcaggggacttgagaaagccgggctcctgacgaaggctgaaatggatcagattctgcacgggctggacaaggtagctgaggagtgggctcaagggacttttaagttgaattctaacgacgaggacatccacacagccaacgaacgacgactgaaagaactgatcggagcaactgcaggaaaactgcatacaggacgctcaagaaacgaccaggtggtcaccgaccttagactttggatgaggcagacatgtagcactctctctggcctcctgtgggaactgattagaaccatggtcgatagggcagaggccgaacgcgacgtgcttttccctgggtatacacacctccagagagcccaacctatccgctggagtcattggatcctgtcccacgccgtggccctgaccagagattcagagcgactcctggaagtgaggaaaagaatcaacgtgctgccccttgggtccggcgccatcgccggtaaccctctgggtgtggatcgagagctgctccgcgcagagctcaacttcggcgccattacattgaacagcatggacgccacaagtgagcgggactttgtggccgaattcctgttttgggcttccctgtgcatgacacacctgtccaggatggcagaggacctgattttgtactgtaccaaagaattcagttttgttcagctcagtgatgcctatagcaccgggagctctcttatgccgcagaaaaagaatccagatagcttggaactgattcgctctaaggccggtagagtctttgggcgctgcgcgggcctgctgatgacactcaagggcctgccgtccacttacaataaagatctccaggaagataaggaagccgtctttgaggtcagcgacaccatgtccgctgtgctgcaggtggcaaccggtgtgatttccactttgcaaatacaccaggagaatatgggacaggccttgtcccccgatatgctcgctacagacctggcatattacctggtgcgcaaaggtatgccttttcggcaggcccatgaagcgtctgggaaggcggtttttatggccgaaactaaaggcgttgctcttaatcagctgagtcttcaggagctccagactattagcccactgttctcaggagatgtgatttgtgtttgggactacggacattccgtggagcagtacggtgctttggggggaactgcacgctccagtgtggactggcaaataaggcaggttcgagctctgcttcaggcccaacaagcc

SEQ ID NO: 710 - DNA, 1392 bp, Artificial Sequence
  derived and/or modified sequence
atggcaagcgaaagcggcaagctctgggggggtcgattcgtcggggccgtggaccccatcatggagaagtttaatgcctccattgcgtacgatcggcacctctgggaggtagacgtgcaggggagcaaagcgtattcacgtggactggaaaaagcggggcttctcactaaagcagagatggaccagattcttcacggtctggataaagtcgctgaagagtgggcacagggcacgttcaagctgaactctaacgatgaagatatccacactgcaaatgagcgcaggctgaaggagttgataggcgctacagccgggaagctccacacgggcagatcacgaaacgaccaggtggtgacagatttacggttatggatgcgtcaaacgtgttccactttatcagggctcttgtgggaattgattcgcactatggtcgatagggccgaagcggaaagagatgtgctgttcccgggctacactcacttgcaacgggcacagccaatccgctggtctcactggatcctcagccatgccgtagccttgacgagagattcagagaggctcctcgaggtgcgcaaacggattaatgtactgcccctgggcagtggcgccattgctgggaatcccttaggtgttgacagggagctgctccgagctgagcttaatttcggtgctatcactcttaattcaatggacgctactagcgagcgcgatttcgttgctgagtttctattctgggcctctctttgtatgacccatctttctagaatggcagaggatttaatcctctattgtacaaaagagttttcatttgtccaactgtcagatgcctactcaaccggctcttcgctgatgccacagaaaaagaaccccgactctcttgagctgattagaagcaaggcggggagggtgtttggtcgatgtgcaggtctgctgatgacattgaagggcttgccgagtacttacaataaagacctccaggaggataaagaggctgtatttgaagtgtctgatacgatgtccgccgtgttacaagtggctactggggtcatctctaccttgcagatacaccaagagaatatggggcaggcactgagtcccgatatgttggctaccgatttagcctactatctggttcgaaaaggtatgcctttccggcaggcccacgaggcctccggaaaggctgtcttcatggccgaaaccaagggtgtcgctctaaaccagttgtcgctgcaggagctccagactatctccccactatttagtggcgacgtgatctgcgtgtgggattacggccactcagtggaacagtatggagctctgggcggcactgcccgctccagcgttgactggcaaatcaggcaagtccgagcgttgctgcaagctcaacaagcc

SEQ ID NO: 711 - DNA, 1392 bp, Artificial Sequence
  derived and/or modified sequence
atggcttccgagtccggaaagttatggggaggacgtttcgtaggcgcggtggaccccatcatggaaaaatttaatgcctctatcgcatacgacagacatctctgggaggtggatgtccagggctccaaagcttactcaaggggcctggaaaaggccggccttcttacaaaggctgagatggaccagatcctgcatggcctcgacaaggtggcagaagagtgggcccaggggacattcaagttgaacagtaatgacgaggacattcacaccgccaatgagcgtcggttgaaggagctgattggcgcaacagcaggcaagcttcatactgggagatctcgtaacgatcaggtggtgacagacctgcgcctgtggatgcggcaaacatgttccacacttagcggattactgtgggaactgatcagaaccatggtggatagagctgaggcagaaagagatgtgctcttcccaggctatactcacctgcagcgcgctcagccaatccgatggagtcactggattttgtcacatgcagtggctttaaccagagattccgaacggctgcttgaggtgagaaagagaatcaatgtcctgcccctgggttccggggccattgcaggcaatcctctgggggtggatcgggagctgctcagagccgagctgaatttcggggctatcactctgaattctatggacgcaacaagcgaacgggacttcgtggccgaatttttgttttgggctagtttgtgtatgacccatctgagtaggatggcggaagacctaattctgtactgcaccaaagaattctcttttgttcagctgtctgacgcatactctacagggtcaagcctgatgccccagaagaagaaccctgattccttggagctaatccggtccaaagcaggccgggtttttggtagatgtgctggactgctcatgaccttgaagggcttgccaagcacctataacaaggacctgcaggaggacaaagaggctgtctttgaggtgtccgacactatgtctgcagtcctgcaggtcgctactggtgtaatctccacattgcagatccaccaggagaacatggggcaggcattgtcccctgatatgctggcaactgatttggcttactaccttgtgcgtaaaggaatgccctttcggcaggctcacgaggcttcggggaaagctgttttcatggccgaaacgaaaggcgtggctctgaaccaactgtctctacaggagctccagacgatcagcccattattcagcggtgacgtaatctgcgtgtgggactacgggcattcggtagagcagtacggagctctggggggcacggccaggagttccgttgactggcagattcgacaggtgcgcgccctgctgcaggcccagcaagcc

SEQ ID NO: 712 - DNA, 1392 bp, Artificial Sequence
  derived and/or modified sequence
atggcgtcggaatcgggtaaattatggggtggtcgttttgtaggtgcggttgatccgataatggaaaaatttaatgcgtcgatagcgtatgatcgacatttatgggaagtagatgttcaaggttcgaaagcgtattcgcgtggtttagaaaaagcgggtctattaacgaaagcggaaatggatcaaatactacatggtttagataaagtagcggaagaatgggcgcaaggtacgtttaaactaaattcgaatgatgaagatatacatacggcgaatgaacgtcgattaaaagaattaataggtgcgacggcgggtaaattacatacgggtcgttcgcgaaatgatcaagttgttacggatctacgtctatggatgcgtcaaacgtgttcgacgctatcgggtctactatgggaattaatacgaacgatggttgatcgtgcggaagcggaacgtgatgtattatttccgggttatacgcatttacaacgtgcgcaaccgatacgatggtcgcattggatattatcgcatgcggttgcgttaacgcgtgattcggaacgtctactagaagttcgtaaacgtataaatgtattaccgctaggttcgggtgcgatagcgggtaatccgttaggtgtagatcgagaattactacgagcggaactaaattttggtgcgataacgttaaattcgatggatgcgacgtcggaacgagattttgttgcggaatttttattttgggcgtcgctatgtatgacgcatttatcgcgtatggcggaagatctaatattatattgtacgaaagaattttcgtttgtacaattatcggatgcgtattcgacgggttcgtcgttaatgccgcaaaaaaaaaatccggattcgctagaattaatacgttcgaaagcgggtcgagtatttggtcgttgtgcgggtctattaatgacgttaaaaggtttaccgtcgacgtataataaagatttacaagaagataaagaagcggtttttgaagtttcggatacgatgtcggcggtactacaagttgcgacgggtgtaatatcgacgttacaaatacatcaagaaaatatgggtcaagcgctatcgccggatatgctagcgacggatttagcgtattatttagttcgtaaaggtatgccgtttcgtcaagcgcatgaagcgtcgggtaaagcggtatttatggcggaaacgaaaggtgtagcgttaaatcaattatcgctacaagaattacaaacgatatcgccgctattttcgggtgatgtaatatgtgtttgggattatggtcattcggttgaacaatatggtgcgttaggtggtacggcgcgttcgtcggttgattggcaaatacgtcaagtacgtgcgttattacaagcgcaacaagcg

SEQ ID NO: 713 - DNA, 1392 bp, Artificial Sequence
  derived and/or modified sequence
atggccagtgagtctggtaagctgtggggggggcggttcgtgggagccgttgaccccattatggagaaatttaatgctagtatcgcttacgacagacatctgtgggaagtggatgtgcagggctccaaggcttacagccgggggctggagaaggccgggctgcttaccaaggccgaaatggaccaaattcttcatggcttagataaagtggctgaggagtgggcccaaggaacctttaagctaaattccaacgacgaagacatacatacagcgaacgagagaaggctaaaggaattgatcggagccacagccggaaagctccataccgggcgaagtagaaatgatcaggtggtgaccgacctgagactatggatgagacagacctgcagcaccctgtctgggcttttatgggagttgatccgtacaatggtagacagagccgaagctgagcgggacgtgctcttccccggttacacgcacctccaacgcgcacagcccattagatggtcacactggattttatctcacgcggttgcactgactcgtgattcagaacgactgcttgaagtccgtaaacgcattaacgtgctacccctcggtagcggggccatcgcaggcaatcctttgggggtggatagggagctgctacgggcagagctcaatttcggagccatcaccctgaatagcatggatgcaactagtgaaagagacttcgtcgcagagttcctgttctgggcctcactgtgtatgactcatctttcccggatggctgaggacctcatattgtactgtactaaagaattcagcttcgtccagctgagcgatgcctacagcactgggagcagcctgatgccacaaaaaaagaatccggacagcctggaactgatacgctccaaagctgggcgggtcttcggacggtgcgccggactgctgatgaccctaaaaggcctacctagtacctacaataaagacttgcaggaggacaaagaggctgtattcgaggtcagtgatacaatgtccgcggttttacaggtggccacaggcgtgatctcgacattgcagattcatcaggaaaacatggggcaggctctttcccctgacatgttggctactgatctggcttattatcttgttcgcaagggaatgccttttcgacaggctcacgaggccagcggcaaagccgtgttcatggccgagacgaaaggtgtcgccctgaaccagttaagcctccaggagctacagacaatttcccccttattcagtggagacgtgatatgtgtctgggactacgggcattctgtggaacaatacggcgcactcgggggaacagcccgtagcagtgtagactggcagatcaggcaggtgcgggcactcctgcaggcacagcaggct

SEQ ID NO: 714 - DNA, 1392 bp, Artificial Sequence
  derived and/or modified sequence
atggcctccgagtcggggaagctgtggggtggacgattcgtgggagcagttgacccaattatggagaagttcaacgcatccatcgcatatgaccgccatctctgggaggttgatgtacaagggtctaaggcatattctaggggtttggagaaggcaggcctgctaaccaaagcagagatggaccagattcttcacggtctggataaagtggccgaggagtgggctcaagggacattcaagctgaacagcaacgacgaagatatccataccgcaaatgagcgtcggcttaaagagttgatcggagctaccgcaggaaagctgcacactggtaggagccgaaacgatcaggtggtgacggacctccgtctatggatgcgacagacgtgtagcaccctgtccggcctgctctgggaactgatccggacgatggtggacagggcagaggccgagcgtgatgtgctttttcccggttacactcatctgcaaagagctcaaccaatacggtggagccactggatcctgtcccatgcggttgcgcttactagagacagtgaaaggctgttggaggttaggaagaggatcaacgttctgcctctcggatcaggggcaattgccggaaaccccctcggcgttgatcgggaactgctcagggctgagctgaattttggggcaattactctgaactctatggacgccacatcagaacgggatttcgtggctgagtttttgttctgggcttccttgtgtatgacccatctgtctcgcatggctgaggacttgattctctattgtactaaggagtttagcttcgtgcagcttagtgatgcttactccaccggatccagcctaatgcctcaaaagaaaaaccccgattcactcgagctgattcgcagtaaagccgggagagtctttggcagatgcgcaggcctcctgatgacactcaaggggctacccagcacttataacaaggatcttcaagaagataaagaagcagtcttcgaagtttccgatactatgagcgcagtcttgcaagtggcaaccggagtcatttcaactctgcagatccaccaggagaatatgggccaggccctatctccagacatgctcgctacagacttagcctattatttggtgcgcaagggcatgccttttaggcaggcgcacgaagccagcggcaaggccgtttttatggctgaaacaaaaggcgtggctctcaaccagctctcactacaggagctgcagacaatatctccactgttttcaggggatgtcatatgcgtctgggactacgggcactcagtggagcagtatggtgccctgggcggaactgcgcgatctagcgtggactggcagattcggcaagttagagcacttttgcaggcccagcaagca

SEQ ID NO: 715 - DNA, 1392 bp, Artificial Sequence
  derived and/or modified sequence
atggcgtccgagtccggcaagttgtggggcggccggtttgtcggagctgtggaccccatcatggaaaaattcaacgcttcaattgcctacgaccggcatctctgggaggtagacgtgcagggtagtaaggcgtattcccggggtctggaaaaagccgggctgcttacgaaggcagagatggaccagattctgcatggcctcgacaaagtagccgaagaatgggctcagggaaccttcaaacttaacagtaatgatgaggacatacatactgccaatgaaagaaggctgaaggaactaataggtgctacggcggggaagcttcatactggaaggtcgcggaatgaccaagtcgttaccgatctgaggttgtggatgcggcagacttgctccacactgagcggacttctgtgggaattgatcagaaccatggttgatcgcgccgaagccgagcgtgacgtgttattccccggatacactcaccttcagcgcgcacagccaattcgctggtcccactggattctgtcacacgctgtcgcactgacaagggattcagagcgactgctggaggtaaggaagagaatcaacgtactacccctgggctccggcgccatcgctggaaatccgcttggggttgaccgcgagctcctgcgagccgagttaaacttcggggctataactctgaattctatggacgctacgtccgagcgtgacttcgtcgcagagtttttgttttgggcatctctgtgcatgacacatctaagccgcatggccgaagatttgatcctctattgcactaaagagttctcttttgtccagttgagtgacgcatatagtaccgggagctccctgatgcctcagaagaagaatccagactctctggaacttattcggagcaaagctggaagagtattcggccgatgtgcagggctgctgatgactctgaaaggcctgccatccacttacaacaaagatcttcaagaggacaaagaagctgtgttcgaggtgtctgatacgatgtcagctgtactacaggtggctaccggagtgatttctacactccagattcaccaagagaatatggggcaagctctcagtccggacatgctcgccaccgacctcgcctactatctggtgcgtaaggggatgcctttcagacaggcccatgaggcaagcggcaaagccgtgtttatggcagaaactaagggtgtggctctcaaccagctcagcctgcaagaacttcaaaccatcagtccgctattttctggagacgtgatatgcgtctgggattatggacactccgtggaacagtacggcgctctcggaggcacagctcggagcagcgtggactggcagatacggcaggtgagagccctcttgcaggcccagcaagca

SEQ ID NO: 716 - DNA, 1392 bp, Artificial Sequence
  derived and/or modified sequence
atggcatctgagtccggaaaactgtggggcggcaggttcgtaggggccgtagacccaatcatggaaaagtttaacgcgtcaattgcatatgacagacacttgtgggaggtggatgtgcaggggagcaaagcatatagtagagggctggagaaggccggcctactgacaaaagcagagatggaccagatactacatggactggacaaggttgctgaggagtgggcccagggcaccttcaaactaaactcaaacgatgaggacatacatacggcgaacgaacgcagactgaaggaactaattggtgcaactgctggtaaattgcatacggggcgaagcaggaacgaccaggtcgtaacagacctgcgtctgtggatgcgacaaacatgctccacgttgtcagggctgctatgggaacttatccgaacgatggtggatcgcgccgaggcggagcgagatgtcctcttccctggatatactcaccttcagagagctcagcctattcgctggagtcactggatcctctctcatgccgtggctttgactagggatagtgagagactgctggaggtcagaaaaagaatcaacgtgcttcccctgggtagtggcgcaattgccggtaatccacttggggtagaccgagaattacttagggcagaactcaactttggcgcgatcaccctcaatagcatggacgctaccagcgaacgagactttgtggctgagttcctgttctgggcatctctatgtatgacgcacctgagtagaatggccgaggatctaattctgtattgcaccaaggagttctcattcgtgcaactgtccgatgcctactccacaggctcatcgctgatgccccaaaagaagaacccggacagtctggaactgattagaagtaaggcaggaagagtgttcggccgttgtgcaggactcctgatgaccctgaagggactcccgtccacttataacaaagacctgcaggaggacaaggaggccgttttcgaggttagtgacactatgtctgccgttctccaggtcgcaacgggtgtgatctcaactttgcagattcaccaggagaacatgggacaggcactttccccagacatgttggccacagatctggcctactatcttgtgcgtaagggcatgcctttccgacaggctcacgaagcaagcgggaaggccgtgtttatggccgaaactaagggagtagcattgaatcagttgtcgctgcaggagctgcaaaccatctctccgctattttcgggagacgtgatctgcgtctgggactatggtcacagtgtcgaacagtatggagcgttgggtggcaccgcaagatcatcggtggactggcaaatccgacaagtcagagccctgctgcaagcccaacaggct

SEQ ID NO: 717 - DNA, 1392 bp, Artificial Sequence
  derived and/or modified sequence
atggcttctgagagcggaaagctgtggggcggcaggttcgtgggagccgttgaccccataatggagaagttcaacgcgtcgatagcatatgatcggcacctgtgggaggtggacgtccagggctccaaggcctactcacgaggacttgagaaagcaggactcctaacaaaggctgaaatggaccagattttacatgggctcgataaggttgccgaagagtgggcccagggtaccttcaagctgaactctaatgatgaagatatccataccgcgaacgaaagaaggttgaaggagttaatcggggcgactgctggcaaactccacacgggcagaagccggaacgaccaagtggtcacagatctgaggctttggatgcggcagacatgttctactctcagcggtttgctttgggagctgataaggactatggtggaccgcgcagaggctgaacgagatgtgctgtttcccggctatacacacctacagcgggcccagccaatccgctggtcacactggattttatctcatgcggtagctctgactcgcgacagcgagaggctgttagaggtgaggaaacggattaatgtgctgcctctcggctcgggggctatagctggcaatcccttgggcgtggatagagagctgctgcgcgccgaacttaatttcggtgccatcaccttgaactcaatggacgccacaagcgagagagacttcgtggctgaattcttgttctgggctagtttgtgcatgacacatctgtcccgtatggcagaggaccttattctgtattgcaccaaggaattcagtttcgtgcagctctccgacgcttattctactggaagtagcctgatgccgcagaagaagaaccctgatagcctggaattgatcaggtctaaggctggacgcgtgttcggtagatgtgcaggactattgatgacgctgaagggcttgccctctacgtacaataaggacctgcaggaagataaagaagccgtgtttgaagtgagcgatacaatgtctgccgtcctccaggtggcaactggggtgatctctacgctgcaaatccatcaagagaacatgggccaagccctgtctcctgacatgctggctacagacctcgcgtattaccttgtgaggaaggggatgcccttcagacaagcccacgaagcgtctggtaaggctgtattcatggccgaaacgaagggagttgctctcaatcagttaagcttgcaggagttgcagacaatcagtcctctgttttctggagacgtaatatgtgtttgggattacggacattccgtagagcagtatggtgcgcttggcgggactgcccggtctagtgttgactggcagatcagacaggtccgagccttgttacaggctcagcaggct

SEQ ID NO: 718 - DNA, 1392 bp, Artificial Sequence
  derived and/or modified sequence
atggccagcgaatcagggaagctgtggggcgggcgattcgttggtgccgtggatcctatcatggagaagttcaacgcctctattgcctacgaccgccatctgtgggaagtcgatgtacaaggctctaaagcatacagcagaggcctggagaaggccggtctgttaaccaaggcagagatggatcagattctacatggcttagataaggtcgccgaagagtgggcccaaggaacattcaaactcaacagcaacgacgaggatatccatactgcaaacgagcgccggcttaaagaattaataggggctacggcgggtaagttgcataccggccggagccgcaacgaccaagtcgtgacggatctgcgcttgtggatgcgccagacttgtagtactcttagcggactgctttgggaacttataagaactatggttgaccgtgctgaggcagagagagacgtgctattcccaggttatacacatctacaaagagcacagcccattcggtggagtcattggatattgtctcacgctgtggctctgacaagggactcagagagactgttagaggtgagaaaacgcatcaatgtgcttccgttgggctccggtgccatagcaggcaacccactgggcgtggatcgggaactactgagggcggaactaaattttggagctataacacttaactctatggatgcaaccagcgaaagggattttgtggcggagttcctattttgggctagcctatgcatgacacatcttagcagaatggcagaagatctgattctttactgcactaaagagttctcatttgtccagttgagcgacgcttattcaacaggatccagtttaatgcctcaaaaaaagaaccccgacagtctggaactgattagatctaaggctggccgcgtctttggcaggtgtgctgggctattgatgacattgaagggcctgcccagcacttataataaggacttacaggaggataaagaggctgtttttgaagtgagtgatactatgagtgcagtgcttcaggtcgccacaggggttatttcaacattgcagatccaccaggaaaatatgggacaagctctgtctccggatatgctggccaccgaccttgcttattaccttgttcgtaaagggatgccatttaggcaggcccacgaggccagtggcaaggcagtattcatggcagagaccaaaggggtcgccctgaaccagttgtccctgcaagaactccagacaatctccccactgttcagtggcgacgtgatatgcgtgtgggattatggccatagcgtggagcagtacggggctctgggaggcacggctcggtcaagtgtggactggcaaattagacaggtgagggcactactacaagctcagcaagcc

SEQ ID NO: 719 - DNA, 1392 bp, Artificial Sequence
  derived and/or modified sequence
atggctagcgagagcgggaagctgtgggggggaaggttcgtgggtgctgtagatcctataatggaaaaatttaacgcatctatcgcttacgatagacatctgtgggaagtggacgttcagggatctaaggcctactctagggggctggagaaggctggcttgctgactaaggctgagatggaccagattcttcacgggttggacaaggtagccgaagagtgggcacagggcacctttaaactaaacagcaatgatgaggacatccataccgccaatgagaggaggctaaaagagctgataggagccacagcagggaagctgcataccggcagatcccgaaacgaccaggtcgtgacagatctgaggctttggatgcggcagacttgtagcacattgtctggactgctgtgggagctgattcgcacaatggtcgatagggctgaggctgaacgggacgtgctattccctggttacacgcatttacaacgagctcaacctatccgttggagccattggattttaagccacgccgtggctcttactagagattccgagcgattattggaggtcaggaagcgtatcaatgtcctgcctcttggcagtggcgccattgctggcaatcccctgggcgtggacagagagttgcttagggctgagttgaattttggcgctatcaccctgaactcgatggatgcaactagtgagagagacttcgtggcagaattcttgttctgggcctcactttgtatgacccacttgagccggatggcggaagacctgatattgtactgcaccaaggaattctccttcgtccagttgagtgacgcttattcgaccggttcaagtctgatgccccaaaagaaaaacccagacagcctggaactcattagatcaaaagcagggcgcgtcttcggccggtgtgccgggctactgatgaccctcaaaggtttaccaagcacttataacaaggatctgcaagaagacaaggaagcggttttcgaggtgtccgacacaatgtctgctgtgctgcaagtggccacaggcgttatctctacccttcaaatccatcaggagaacatgggccaggctctcagcccagatatgctcgccaccgaccttgcttactacctggtcagaaagggcatgccctttcggcaagcacatgaggcttcgggaaaagccgtgttcatggccgagactaagggcgtggcattgaatcagttgagtctgcaggagctccagactataagccccctctttagcggcgacgtgatttgtgtctgggattacggacactccgtggagcaatatggggccctcggaggcactgcaaggtctagcgtcgactggcagatcagacaggttcgggcgctgctgcaggctcagcaggct

SEQ ID NO: 720 - DNA, 1392 bp, Artificial Sequence
  derived and/or modified sequence
atggcttctgaatccgggaaactgtggggcggtagatttgtgggtgccgttgatccaattatggagaaatttaacgcatctatcgcctatgatagacacctatgggaggtggacgtccagggatcaaaggcgtatagtagggggctcgagaaggctggactgcttactaaagcggagatggatcagattttgcacggcctggacaaggtcgcagaggaatgggcacagggcactttcaagctcaatagtaatgacgaagatattcatacagcaaacgagcggagacttaaggaattgatcggagccaccgcaggcaagctccatactggtcggtcccggaacgatcaggtcgtcactgatctaaggctgtggatgcgtcagacatgcagcacactgagcggcctgttgtgggaacttatccggaccatggttgaccgagccgaagctgagagggacgttctttttcccggctacacccatctccaacgcgcccagcctattaggtggagtcactggatactgagccatgccgtggccctgacaagggattcggagcgcttgctggaggtgcgcaaacgaataaatgtcctacccctgggctcgggcgcaatagcaggcaaccctctgggggtagacagagagctgttgcgggcagagctgaacttcggcgcaatcactctgaactcgatggatgccacgtccgagagggacttcgtggcagaatttcttttctgggcatcgctctgcatgacccatttgagccggatggctgaagacttgatcctgtactgtactaaagagttctctttcgttcagctctcagacgcctattccaccggatcttctctgatgccgcagaagaagaatccagattcactggagctcatccggtctaaggcaggcagagtgtttggaaggtgtgccggcctgttaatgaccctcaaaggcctccctagcacatacaacaaggaccttcaagaagacaaagaagcagtgttcgaagttagcgacacaatgagtgccgttctccaggtggctacaggagtaataagcactttgcagatccaccaggaaaatatgggccaggcgctctcccccgatatgctcgcgactgacctggcatattatctggtacgtaagggtatgccttttaggcaagctcacgaggcctctggtaaagcagtttttatggctgagaccaaaggagtcgctctcaatcagctgagtctccaggagctgcaaactattagcccactgttcagcggagatgtaatctgcgtctgggattatgggcattccgtagaacagtacggcgcgctaggggggaccgcaaggtcctccgtggattggcagatccgtcaggtgcgcgccctcctccaagcccaacaggca

SEQ ID NO: 721 - DNA, 1392 bp, Artificial Sequence
  derived and/or modified sequence
atggcctccgaaagtggcaagctttgggggggaagatttgtgggagccgtggacccaattatggaaaagttcaatgcctcaatcgcgtacgaccggcatctctgggaggttgacgttcagggaagcaaggcctattcccgcggcctggagaaggccgggctcctgaccaaggcagagatggaccagattctgcatgggctggacaaggtggccgaagaatgggcccaaggaacttttaagttgaatagtaatgacgaggacattcacacggccaatgagcgccggttgaaagaactcatcggagctacagcaggaaagctccacaccggccggtcaagaaacgatcaggttgtgacagacttgcggctgtggatgagacagacctgctcaactttgtctgggcttctgtgggagctgatccgcaccatggtcgaccgcgctgaagcggagcgcgatgtcctgttccccggctatactcatctgcagagagcgcagccgatccgatggtcccattggatactgagtcatgcagtcgctctcactcgagacagtgagcggctgctggaggttaggaaacgaatcaacgtgctccctttgggttccggagccattgccggaaatcccctgggagtggatcgcgaactccttcgggccgaactgaatttcggagcgatcacgctgaactctatggacgcaacttctgagcgggactttgtggctgagttcctgttttgggcctccctgtgcatgacacatctgagccggatggctgaggatctcattttgtattgtacgaaggagttttccttcgttcagctttcagatgcttatagcacgggatccagcttgatgccccagaaaaagaaccctgactctttggaactgattcggagcaaagccggtcgagtgtttggcaggtgtgccggcctgctcatgacactcaaaggcttgccatccacatataacaaggatttgcaggaagacaaggaagcagtgtttgaggtgagcgacactatgtccgcggtgctgcaagtggccactggggtaatcagcaccctgcagattcaccaagagaacatgggtcaggctctgtcacccgatatgctggctacagatctggcttattatctcgtgagaaaagggatgccctttagacaggcccacgaggctagcggcaaggccgtgttcatggcagagacgaagggagtcgccctcaatcagttgtccttgcaggaactgcagaccatttctcctcttttctccggtgacgtaatctgtgtctgggactatgggcatagtgtggaacagtacggggcactcggcggaactgccagatcatccgtcgactggcagattcggcaggtgagggcgctcctgcaggcccaacaagcc

SEQ ID NO: 722 - DNA, 1392 bp, Artificial Sequence
  derived and/or modified sequence
atggccagcgaaagcgggaagttatgggggggaaggttcgtaggagcagtagatcctattatggaaaagtttaacgcatccatagcatatgacagacacctgtgggaagtagatgtgcagggaagtaaagcttactcaaggggtttggaaaaggcaggacttttgactaaagctgagatggaccagattcttcatggactcgacaaggtggccgaagaatgggctcagggcacattcaaactcaattcgaacgatgaggatatccataccgcaaacgagcggaggctaaaggaactaatcggtgcaacagcaggtaagctccacaccggaaggtcacgaaacgaccaggtggtaacagacctccgcttatggatgcgacagacgtgtagcacgctaagcggcctgctgtgggagctgatccgcactatggtggacagggcggaagccgaacgtgatgttctcttccccggctacacgcacctgcagagggctcagcccatcaggtggagtcactggatcctttcccacgccgtggccttgaccagggacagcgaaaggctgctggaagtgaggaagcgtattaatgtgctcccactgggatcaggagccatcgcaggcaatcccctgggcgtagacagagagcttttgagggcggagctaaatttcggtgcgattacacttaattcgatggacgccaccagtgagcgtgacttcgtcgcggaattcctgttttgggcttcgttgtgcatgacccatctgagtagaatggcagaagacctgattctgtactgcactaaagaattcagctttgtgcagctctcagacgcttattcaacaggctcgagtttgatgccacaaaagaagaacccagattctctcgaacttatccgctcaaaagctggcagagtgtttggcaggtgcgctggcttactgatgaccttgaaaggcctgccctctacatacaataaagatctgcaggaagataaagaggccgtatttgaagtgtccgatacgatgtctgccgtactgcaagtggctacaggcgtcatctccactttgcagatccatcaagaaaatatgggccaagcacttagtcccgacatgctcgctacagatctggcctattacctggtaagaaagggcatgccgtttcgccaagcccacgaagcctcaggcaaagctgtttttatggctgaaacgaaaggagtggcacttaaccagctctcccttcaggagttgcagacgattagccccctgttctcaggcgacgtcatctgcgtgtgggattatggacactcagtggaacagtacggcgctctgggcggaacagcaaggagcagcgtagattggcagatccgccaggtccgcgcactattgcaagcccaacaagct

SEQ ID NO: 723 - DNA, 1392 bp, Artificial Sequence
  derived and/or modified sequence
atggcgagcgagagcgggaagctgtgggggggccggttcgtgggggctgtggacccgatcatggaaaagtttaacgcatccattgcctacgataggcacttgtgggaagtggatgttcaaggctcaaaggcttactcccgcggcctggaaaaagccggcctgctgacaaaagcggagatggaccagattttgcacgggcttgataaagttgcagaggaatgggctcagggaacattcaagctgaactccaacgatgaagacatacacactgccaatgaaagacgactgaaggagctcatcggggccactgcaggtaaactgcataccggcaggtcccggaatgaccaggtggtcactgatctgcggctgtggatgcgccagacctgcagcacactgtcagggcttttatgggaactgatcaggaccatggtcgatagagctgaggcagagcgcgatgtgctttttccagggtatactcacctgcaacgcgcccagccaattagatggagtcactggattcttagtcacgctgtcgccttaacccgcgattctgaacgcctcctggaggtcaggaagagaatcaacgttctgcctctgggttccggtgccatcgccggcaatcccctgggggtggatcgagagctcctcagggccgaattgaattttggagcaatcacccttaactcaatggatgcaacatctgaacgtgattttgtggccgagtttctcttctgggcttctctgtgcatgactcacttatccaggatggccgaggacctgatactgtactgcacaaaggaattctcatttgttcaactgtcagacgcctactcaactggatcatctttaatgcctcagaagaaaaacccggacagtctcgaactcatccgcagcaaggcagggcgggtttttggacgatgcgctggcctgctgatgacgctgaagggcctgccttctacgtataataaggatctgcaggaagacaaggaggcagtattcgaagtctccgacacaatgtccgccgtccttcaggtcgctacgggagtgattagtaccttacagatccaccaggagaacatggggcaggctctttcccccgacatgctagcgactgatttggcgtattatctcgtgaggaaaggcatgccttttcggcaggcccacgaggcctctgggaaggccgtgtttatggccgagacaaagggagtcgccctgaaccagctttccctccaggagctgcagactatcagcccactgttttcaggggatgtaatttgtgtttgggattatgggcactcagtcgagcagtatggtgccctaggtggcacagctaggtctagtgtagattggcagatccgccaggtccgcgctctgctgcaagcccagcaggcc

SEQ ID NO: 724 - DNA, 1392 bp, Artificial Sequence
  derived and/or modified sequence
atggcctccgaatctggaaaactgtggggcggacgcttcgtgggagccgtggaccccattatggaaaagttcaacgcctctatagcttatgatcgacacctgtgggaggtggatgtccaggggtcaaaggcctattctcggggactggagaaggcaggcctactgactaaggccgagatggaccagatcctccacgggctggataaagttgctgaggagtgggcacaaggcacattcaaactgaattcaaacgacgaggacatacacactgccaacgagcgtcgactcaaggagctgataggcgctactgccgggaagttgcatacagggaggtccaggaacgaccaggtcgttactgacctgcgcctgtggatgcgccagacttgttcaactctgagcggtttactctgggagctgattcgcactatggtggaccgcgctgaggctgaaagggacgtgttattcccagggtatacccacctccagagagcccagcccataaggtggagtcactggattctgtctcacgctgttgctctgaccagagactctgagcgactgctggaagttcggaagcggataaacgtattaccactgggctccggcgcaatcgctggcaaccctttgggggttgaccgggagcttctgagggctgagctgaatttcggggccattactctaaattccatggacgctacctccgagcgggacttcgttgccgaattcttgttctgggccagtctttgcatgactcacctgtctcgcatggccgaggatctaattctgtactgcacaaaggaattcagcttcgtgcagctgagcgacgcttactctaccggatcttccctaatgccccaaaaaaaaaatcccgattctttagagctgatacgcagtaaggccggtagagttttcgggaggtgtgctggcctgctgatgactctgaagggcctgccttcaacttataacaaggacctgcaggaagataaggaagcagtgttcgaggtgtccgacaccatgtccgccgttctccaggttgccactggcgtcatctccactttgcagatacaccaggagaatatggggcaggccctgtcccctgacatgttggctactgacctagcctattatcttgtacgcaaaggcatgcctttccgccaggcacacgaggccagtggcaaggccgtgttcatggcagagactaagggcgtcgccctcaatcagctgtccctgcaggagttacagactatctcaccactatttagcggggatgtcatctgcgtttgggactacggacattcagttgaacagtacggcgccctgggtggcaccgccagatcaagcgtcgattggcagattcgtcaggttagagctctgctccaggctcagcaagca

SEQ ID NO: 725 - DNA, 1392 bp, Artificial Sequence
  derived and/or modified sequence
atggctagtgagtctgggaagctctggggagggcgcttcgtgggtgcagtggatccgattatggagaaatttaatgcatccatagcttacgatcgtcacctgtgggaggtggatgtccaaggtagcaaggcttactcacgcggcctcgaaaaggctgggctgctcaccaaagcagagatggatcagattctacacggacttgataaagtcgccgaagagtgggctcagggtaccttcaagcttaatagtaatgatgaagacattcacacagcgaatgagcgccgactgaaagagctgattggggccacagccggaaagctccacacaggaagatccagaaatgaccaggtagtgacggatctcagactgtggatgaggcaaacatgctccactctcagcggcctgctgtgggaactaatacgcacgatggttgatagggccgaggcggaacgcgatgtactgttccccggctacacccatttgcaaagagctcagcccatcaggtggtcgcactggattctgtcgcacgcagtggcattgactagggactccgaacggttgctcgaggtccgaaagcgcataaacgtgcttccactgggctccggcgctatcgccggtaaccccctcggagtggaccgcgaattactgcgcgctgaattaaacttcggagctattaccctaaattctatggatgccacttcagaaagagattttgttgccgaattcttgttttgggcaagcttgtgtatgactcacctgtcacgaatggccgaggatctgatcttgtattgtactaaagagttttctttcgtacagctgtctgacgcttattctaccggcagctcactcatgcctcagaagaagaatcccgattccctcgagttaatccgctccaaagctgggagggtttttggacggtgcgccggattgctcatgacactgaaaggccttccgagtacctataataaagacctccaagaggacaaggaagcagtttttgaggtgtcagacacgatgagcgccgtactgcaggtggcgactggagtcatcagtacacttcagatccatcaagagaatatgggtcaggccctctcaccagacatgctggctactgacctggcatactatcttgtgaggaaagggatgccctttcgccaggcgcatgaggcctcgggaaaggccgtgtttatggccgagactaagggtgtggctctgaaccagctttctctgcaggagctccaaactatctcacctttattctctggagatgtaatctgcgtttgggactatgggcactctgtcgagcagtatggggcgctcggcggcacagctcgttcgagcgtggactggcagatcagacaagtgcgggctctactgcaggcccagcaggcg

SEQ ID NO: 726 - DNA, 1392 bp, Artificial Sequence
  derived and/or modified sequence
atggcttctgagagcggcaagctgtggggcggtcgatttgtaggcgccgttgatccaatcatggaaaaattcaatgccagtatcgcctatgacaggcatttgtgggaggttgatgtgcaggggtcaaaggcatatagccgcggactcgagaaagccggtctgctgacaaaggcagagatggaccaaatcttgcacggactggacaaggtcgccgaggagtgggcccaggggacctttaaactgaattcaaatgatgaggatatccatactgccaacgagcgccgcttgaaggaactcattggggcgacggccggcaagctgcacaccggtaggagccggaatgaccaggtggtgaccgatctccgcctgtggatgcggcagacttgcagcactctgagcgggctgctgtgggaactgataagaacgatggttgatagggcggaggctgaaagagacgtgctgtttcctggatacacccatctgcagcgggcccagccaattagatggagccattggattctctctcacgctgtggcacttacccgggactccgagaggttgctggaggtgaggaaaagaattaatgtcctcccattgggctcaggcgcgattgccggcaaccccttgggggtggatcgagagctccttagagcagagctgaactttggagccataacattgaattcaatggacgctacaagcgaacgcgacttcgtcgcagagtttctcttttgggcctctctttgtatgacccaccttagtcgcatggccgaagatctcatcctgtactgcactaaggaattttccttcgtgcagttgtccgatgcatactccaccggctcaagcctgatgccccagaagaagaacccagattccctggagttgataagatcaaaggcgggtagagtatttggtagatgtgccgggctgcttatgacgctcaaaggactgccgagcacgtacaataaggacctgcaggaggataaggaggccgtttttgaggtgtccgacacgatgtccgccgtgctgcaggttgccaccggggtgatcagtacactccaaatccaccaagagaacatggggcaagctctctctccagatatgctggccactgatctggcgtattatctggtgagaaaaggcatgccctttcggcaggctcacgaggcctccggcaaagcggtcttcatggccgaaacaaaaggtgtggcgttgaaccagctcagtttgcaggagctgcagacgatctcacctctgttttctggggatgttatctgcgtatgggattacgggcattcagtggagcaatacggtgccctcggggggacggccagaagctccgtggattggcagatcaggcaggtcagagcattgctgcaagcacagcaggcc

SEQ ID NO: 727 - DNA, 1392 bp, Artificial Sequence
  derived and/or modified sequence
atggcttcagagagtggcaagctttggggcggcaggtttgttggagcggttgaccctattatggagaaatttaatgcaagtatcgcctacgacagacatctttgggaagtggacgtgcagggtagtaaggcctacagcagggggcttgagaaggctggactgctcacgaaggcagagatggaccagatcctgcacgggcttgacaaagtcgccgaggagtgggcccagggaaccttcaaactgaactcgaatgacgaggacatccatacagcaaacgagcgaagactgaaggagctcatcggggcgacagctggtaaattgcacacaggtcgcagtcgtaacgaccaggttgtcacagatcttagattgtggatgaggcagacatgctccactctctcgggcctgctctgggaactcataagaacaatggttgatcgggcggaagccgaacgggatgtgctgtttcccggctacactcacctgcagagggctcagccaatccgatggtctcactggatattaagtcacgccgtcgctctgacacgcgactcagagcgactgcttgaagtcaggaaacggattaacgtgcttcctctcggatccggcgccatagcagggaatcctctgggggtggatcgagaattgctacgggcagaactgaatttcggagccatcacactcaactccatggacgcaacctcagagagggactttgtggctgagttccttttttgggcttcgctgtgcatgacccatctctcgaggatggccgaggacttgatcctctactgtaccaaagagttctctttcgtgcaactttctgatgcctattccacagggtcgagtttaatgccacagaagaagaacccagacagcctagagctgattcgcagcaaggccgggcgggtgtttggacggtgcgcagggctgcttatgaccctcaaggggcttccgagcacatataataaggacttgcaggaagataaggaggccgtctttgaagtgagcgatactatgtccgcagttctccaggtggccacaggcgtgattagcaccctgcagatccatcaggagaacatgggacaggccctcagtccagacatgctggctaccgacctagcctattaccttgtgagaaaggggatgccatttcggcaggcgcacgaggcctcagggaaggcagtgttcatggccgaaaccaagggtgttgctctgaatcagttgtccctgcaggaactccagaccatatcaccacttttctccggggatgtaatatgtgtgtgggactatggacactccgtggaacaatatggcgccttaggaggaacagcccgcagcagcgtggattggcagattcgccaagtgagggcactcctccaagcccagcaagcc

SEQ ID NO: 728 - DNA, 1392 bp, Artificial Sequence
  derived and/or modified sequence
atggcaagcgagtccggcaaactgtggggtggccggttcgttggggccgttgatccgatcatggaaaaatttaatgcgtccattgcctacgaccgtcacctgtgggaggttgatgttcagggcagcaaggcctactcacgcggtttggagaaagctggcctcctgaccaaagcagagatggaccaaatccttcacggactggataaagtcgccgaagagtgggcgcaaggtacctttaagctcaactccaacgacgaagatatccacacggcgaacgagaggcggctgaaagaactgatcggagccaccgccggtaagcttcacacaggcagatcacgtaatgaccaagttgtcacggatctgcgactctggatgcgccagacttgcagcaccctaagcggcctactttgggagctgattagaaccatggtagatcgcgcggaagcggagcgtgacgtgttgtttcctggttatactcatctgcagcgcgcacagccgattaggtggtctcactggattttgtcgcatgccgttgctttgacccgcgatagcgaacgccttctggaggtccggaaaagaattaatgtgctgccgctgggcagcggtgccattgcgggcaacccactgggggtcgatcgcgagctgctgcgcgctgagctcaactttggagctattactttgaattccatggatgcaacctctgaacgggactttgtggctgagttcctattctgggcctcactgtgtatgacgcacttgtctcgtatggcggaagatctgattctctactgtaccaaagagttttcgttcgtgcaactgtctgacgcctattcaactggtagcagcctgatgccgcagaaaaaaaaccccgactcactggagttgatccgtagcaaagctggtcgcgtgttcggcaggtgtgccggattactgatgacgttgaaaggcctgccaagcacgtacaacaaggatttgcaggaagataaggaagctgtctttgaggtatccgatactatgagtgctgtgttgcaagtcgcaactggggtgatcagtactcttcagatccaccaggagaacatgggtcaagcactgagcccagatatgctagctaccgacttagcgtactaccttgtgcgcaaaggaatgcctttccgccaggctcatgaagcgtctggtaaagcggtgtttatggcagaaacaaagggcgtggcccttaaccagctgtccttgcaggagttgcagactattagtccgctctttagcggtgacgttatttgcgtttgggattacggccattcagtggagcagtatggggcgctaggtggcaccgctcggagcagcgtggattggcagatccggcaagtgagagcactcctgcaagcccaacaggca

SEQ ID NO: 729 - DNA, 1392 bp, Artificial Sequence
  derived and/or modified sequence
atggcatccgagtcaggaaagttgtggggcggcagattcgtcggagcagtggatccgattatggagaagtttaacgcaagcattgcttacgacaggcatttgtgggaggtagacgtccagggctctaaggcatattccagaggactggagaaggcgggccttctgactaaggccgagatggatcagatcttgcacggattggataaagtcgcagaggagtgggcgcagggcaccttcaagctgaacagcaacgacgaagatatccatacagctaatgagcgcagattgaaggaacttattggcgccacggctggcaagttgcacaccggtaggagcagaaacgatcaggtcgtcactgacctgagactttggatgagacagacgtgctccaccctgagcggcttgctctgggaactgattcgcacaatggtagacagggccgaggcagagagggacgttttgtttccaggatatacccacctgcagagggctcaacctatcaggtggtctcattggatcttgtcccacgccgtggcgcttactagggactccgagcgcttgcttgaagtccgcaagaggatcaatgtgctgccattgggatctggcgcaattgccggcaatcctctgggagtcgacagggagctcctgagggctgagcttaactttggagctataacattgaattctatggacgccacaagcgagagagatttcgtagcagaattcttgttctgggcttccctttgcatgacccaccttagtagaatggctgaagacctgatcctgtactgtaccaaggaattttctttcgtccaactctccgacgcttacagtactggctcctcactcatgccacagaagaaaaaccccgactccctggagctgatccgcagcaaggccggtagagtcttcggacgctgcgccggccttctgatgacgttgaagggattgccctcaacatataataaggaccttcaagaagacaaagaggcagtgtttgaggtctccgacacaatgtcagcagtgctgcaagtggctactggcgtcatctctacactgcagattcaccaggaaaacatgggacaggcactgtctcccgatatgctggctacagatctggcgtattacctcgtacgcaagggcatgccatttcgccaggctcacgaggcctctggcaaggcagtctttatggccgagacgaagggagttgcgcttaatcaattgtccctccaggagctgcagactatctcccctctcttctccggagacgtcatatgcgtgtgggattacggacacagcgttgagcaatatggtgctcttggtggaacagcacgctcttctgtcgactggcagatcaggcaggtgagagccctgctccaagcacagcaggcc

SEQ ID NO: 730 - DNA, 1392 bp, Artificial Sequence
  derived and/or modified sequence
atggcgtccgaaagtgggaaactctgggggggcagattcgtaggagccgttgaccccattatggagaaattcaacgcctctatcgcctacgacagacatttatgggaagtagatgttcagggctctaaggcttacagccgtggcctggaaaaagccgggctgctcaccaaggcagagatggaccagatactccatgggctggataaagttgctgaggagtgggctcagggcaccttcaagctgaattccaatgacgaagatattcacaccgcaaacgagcggagattaaaggaattaatcggtgccacagccggtaaactccacaccggaagatcaagaaatgaccaggttgtgacggacctgagattgtggatgcggcagacctgttctacgctgtccggacttctgtgggagctgattcgcacaatggttgatcgggccgaagcagaacgggatgtgctgttccctggatatacccacttgcagagagcgcaaccaatccgatggagccactggattcttagtcatgctgtagcactgactcgggacagcgagcggctgcttgaggtccggaagagaatcaatgtattacccctcggcagtggcgcaatcgcaggaaaccccctgggggtcgaccgtgagttgctgcgggcagagctgaattttggcgcgatcacactgaattctatggacgcaaccagcgagcgtgattttgtggccgagtttcttttctgggcctctctctgtatgacccatctgagtaggatggcagaggatttaattttatattgcaccaaagagttttctttcgtccagctgtcagacgcttactcaaccggatcaagcctgatgccccagaaaaaaaaccccgactcactcgaactgatcagaagcaaggctgggcgagtcttcgggaggtgtgctggcctgttgatgacgctcaaagggctcccttctacttacaacaaagatctgcaggaggataaagaggccgtatttgaagtgagcgacacaatgtctgcggttctgcaggtggcaaccggggtcataagcaccctgcagattcaccaagagaacatgggccaggccctcagtccagatatgctggccacagacctggcatattacctcgtgcggaagggtatgccctttaggcaagctcacgaagcctccggcaaagctgtgtttatggcggagaccaagggggtcgcgctgaatcagcttagcttacaggagttacagaccatttctccattattcagcggcgacgtgatctgcgtgtgggactacgggcacagcgttgaacagtatggcgctctcggaggcactgcacgttcctcagtcgactggcagatccgccaggtgcgcgccctgttgcaggcgcaacaagcg

SEQ ID NO: 731 - DNA, 1392 bp, Artificial Sequence
  derived and/or modified sequence
atggcttcggaatctggtaagctgtggggaggtcgcttcgttggagcagtggacccaattatggagaaattcaacgccagcattgcgtatgatcgccacctgtgggaagttgacgtgcaaggctcgaaggcatacagtaggggcttggagaaggcgggcctcttgacaaaggcggaaatggatcaaatattgcacggcctggacaaagttgcagaggagtgggctcaaggtactttcaagctgaactcgaatgatgaggatatccataccgcgaatgagaggagactgaaggaactgataggcgcgacggctggcaagctgcacaccggccggagtcgcaacgatcaggttgtgaccgacttgcggctgtggatgaggcagacttgctccacgttgtcgggtctgctttgggaattgatacgcaccatggtggatcgcgccgaagccgaacgggatgtactgtttcccggctatactcatctgcagagagcgcaacctattcgttggagtcattggatcctgtcgcatgcggtagccctgacgagagattctgagcgcttgctagaggtgcgaaaacgaattaatgtacttccactaggaagtggtgccatcgccggtaacccactgggagtcgatagagagctcttgcgagcggaactgaattttggagcgataacactgaactccatggatgcaacctcagagcgcgacttcgtggccgaatttctgttttgggcaagcctctgcatgacccacctgtctcgcatggctgaagacctgatcctctactgcaccaaggaattctcgtttgttcagctcagcgacgcgtactcgaccggatcgtctttgatgccgcaaaaaaagaatccggatagtctcgagcttatccgttcgaaggcgggccgcgtctttggaaggtgtgctgggctcctgatgactctgaaaggcctgccttccacttacaacaaggatcttcaagaggataaggaggccgttttcgaggtgagcgacactatgagtgcagtcctgcaggtcgccacgggcgtgatcagtacactgcagattcatcaggaaaacatgggccaggcattgtcccccgacatgctggcaacggatctggcctactatctggtacgcaagggtatgcccttcaggcaggcacacgaagcgagcggaaaagcggtgttcatggcggagaccaaaggagttgccttaaaccagctgagcctacaggaactccagacgatcagtcccctatttagtggagatgtgatctgtgtttgggattatgggcatagcgtggagcagtacggagccttaggaggaactgctcgttcctcagtggattggcagatacggcaggtacgagccctgctgcaggcccaacaggcg

SEQ ID NO: 732 - DNA, 1392 bp, Artificial Sequence
  derived and/or modified sequence
atggcttctgagagcggaaagctgtggggagggcggttcgtcggtgcggtggaccccatcatggaaaagtttaatgcctcaatcgcgtatgataggcacctatgggaggttgacgtacagggtagcaaggcttacagtagaggcctagaaaaagcaggcctgctgaccaaagcagagatggatcagattctgcacggcctggataaagtggctgaagaatgggcacaggggaccttcaaactgaactcaaatgacgaagatattcatactgccaacgaaaggcgcttgaaagagttgatcggcgcaacagcgggtaagcttcacaccggacggtccagaaacgatcaggtggtgacagacctgcgtttgtggatgagacagacgtgctccaccctgtctgggttgttgtgggagctgatacgaaccatggttgaccgagccgaggccgagcgcgatgttctgtttccaggttacacacatctgcagagggcacagccaataaggtggagccactggattttaagccacgcagtggctctgacacgggactctgagcgcttgctggaagtgcgaaagcgtatcaacgtccttcctttgggctctggcgcaattgcaggaaaccctcttggtgttgatagagagctcctgagagccgagctgaattttggggctatcaccttgaatagcatggatgccacaagcgagcgcgatttcgttgccgagttcttattctgggcatcactctgtatgacacacctttctcgcatggctgaggatttgatactttactgcactaaggaattttcatttgtgcaactgagcgacgcctatagcactgggagcagcctgatgccacagaaaaagaaccccgactcattagaacttattcggtccaaagccggacgggttttcggaagatgtgcaggactcctgatgaccctcaagggccttccatcaacgtataataaggacctgcaggaagacaaggaggccgtcttcgaagtatctgatacaatgagcgcagtgctgcaagtggccacaggagtcatatccacactgcaaattcatcaggaaaatatgggacaagctctttcaccagacatgctggctacagacctggcttactaccttgttcggaaaggaatgccgttccggcaagcccacgaagcgtccgggaaggctgtcttcatggctgagacaaagggcgtagctttgaaccaactgtccctgcaggagctccagaccatatcccctttattctccggagatgttatttgcgtttgggattatggccatagcgtggaacagtatggagcattggggggtacagctagatctagcgtcgactggcagatccggcaagtgcgggccttgctgcaggcacagcaggcc

SEQ ID NO: 733 - RNA, 1538 nt, Artificial Sequence
  derived and/or modified sequence
gggaaauaagagagaaaagaagaguaagaagaaauauaagagccaccauggcgucggagagcgguaaacuuugggguggacgauucgucggggcaguagaccccaucauggagaaguuuaacgcgucgauugccuaugacagacaucucugggaaguagacgugcaaggauccaaagccuauucacgcgggcuggaaaaggccggacuguugacgaaggcagagauggaccagauccuucauggguuggauaaagucgcugaagagugggcccagggaaccuucaagcucaauucgaaugacgaagauauccacaccgccaacgagcgcagacuuaaagaacugauuggagcgacagccgguaaacugcacaccggaaggucacggaacgaccagguggucacugaucuuaggcuguggaugaggcagacgugcagcacgcugucgggguugcuuugggaguugauccggacgauggucgaucgagcugaggcagagagagauguacuuuuccccggguauacacauuugcaacgcgcccagcccauccgguggucccacuggaucuugucccacgcgguggcucugacacgcgauagcgaacggcuccuugaaguccgcaagagaaucaauguccucccuuugggauccggugcgauugccggaaauccacugggaguggaccgggaacucuugagggcagagcucaacuuuggcgcaauuaccuugaacucaauggacgcaaccucggagagggacuucguagcggaguuucucuuuugggcgucccuuugcaugacucauuugucacgcauggcggaggaucugaucuuguacuguacaaaagaguuuuccuucguccagcucucagacgcguacucgacgggaucgagccugaugccgcagaagaaaaacccagacucauuggagcucauccggucgaaggccgggaggguguucgggagaugcgcagggcuccuuaugacgcuuaagggacuuccgucaacuuacaauaaggaucuccaagaagauaaagaagccguguuugaagucagcgacacuaugagcgcaguguugcaaguagccacgggcgugaucucgacgcugcagauccaucaggagaauaugggacaggcgcuguccccggauaugcucgcgacagauuuggcuuauuaccucguccggaaggggaugcccuucagacaggcgcacgaggcgucgggaaaggcgguauucauggccgaaacaaaaggcguggcguugaaccagcugucgcugcaagaauugcagacgaucucgccucucuuuuccggugaugugauuuguguaugggacuaugggcacucgguggagcaguacggggcauugggcgguacagcgaggucaucaguggacuggcagauuagacaggugcgcgcucuccuucaagcgcaacaggccugauaagcugccuucugcggggcuugccuucuggccaugcccuucuucucucccuugcaccuguaccucuuggucuuugaauaaagccugaguaggaag

SEQ ID NO: 734 - protein, 1500 aa, Artificial Sequence
  derived and/or modified sequence
MDPSMGVNSVTISVEGMTCNSCVWTIEQQIGKVNGVHHIKVSLEEKNATIIYDPKLQTPKTLQEAIDDMGFDAVIHNPDPLPVLTDTLFLTVTASLTLPWDHIQSTLLKTKGVTDIKIYPQKRTVAVTIIPSIVNANQIKELVPELSLDTGTLEKKSGACEDHSMAQAGEVVLKMKVEGMTCHSCTSTIEGKIGKLQGVQRIKVSLDNQEATIVYQPHLISVEEMKKQIEAMGFPAFVKKQPKYLKLGAIDVERLKNTPVKSSEGSQQRSPSYTNDSTATFIIDGMHCKSCVSNIESTLSALQYVSSIVVSLENRSAIVKYNASSVTPESLRKAIEAVSPGLYRVSITSEVESTSNSPSSSSLQKIPLNVVSQPLTQETVINIDGMTCNSCVQSIEGVISKKPGVKSIRVSLANSNGTVEYDPLLTSPETLRGAIEDMGFDATLSDTNEPLVVIAQPSSEMPLLTSTNEFYTKGMTPVQDKEEGKNSSKCYIQVTGMTCASCVANIERNLRREEGIYSILVALMAGKAEVRYNPAVIQPPMIAEFIRELGFGATVIENADEGDGVLELVVRGMTCASCVHKIESSLTKHRGILYCSVALATNKAHIKYDPEIIGPRDIIHTIESLGFEASLVKKDRSASHLDHKREIRQWRRSFLVSLFFCIPVMGLMIYMMVMDHHFATLHHNQNMSKEEMINLHSSMFLERQILPGLSVMNLLSFLLCVPVQFFGGWYFYIQAYKALKHKTANMDVLIVLATTIAFAYSLIILLVAMYERAKVNPITFFDTPPMLFVFIALGRWLEHIAKGKTSEALAKLISLQATEATIVTLDSDNILLSEEQVDVELVQRGDIIKVVPGGKFPVDGRVIEGHSMVDESLITGEAMPVAKKPGSTVIAGSINQNGSLLICATHVGADTTLSQIVKLVEEAQTSKAPIQQFADKLSGYFVPFIVFVSIATLLVWIVIGFLNFEIVETYFPGYNRSISRTETIIRFAFQASITVLCIACPCSLGLATPTAVMVGTGVGAQNGILIKGGEPLEMAHKVKVVVFDKTGTITHGTPVVNQVKVLTESNRISHHKILAIVGTAESNSEHPLGTAITKYCKQELDTETLGTCIDFQVVPGCGISCKVTNIEGLLHKNNWNIEDNNIKNASLVQIDASNEQSSTSSSMIIDAQISNALNAQQYKVLIGNREWMIRNGLVINNDVNDFMTEHERKGRTAVLVAVDDELCGLIAIADTVKPEAELAIHILKSMGLEVVLMTGDNSKTARSIASQVGITKVFAEVLPSHKVAKVKQLQEEGKRVAMVGDGINDSPALAMANVGIAIGTGTDVAIEAADVVLIRNDLLDVVASIDLSRETVKRIRINFVFALIYNLVGIPIAAGVFMPIGLVLQPWMGSAAMAASSVSVVLSSLFLKLYRKPTYESYELPARSQIGQKSPSEISVHVGIDDTSRNSPKLGLLDRIVNYSRASINSLLSDKRSLNSVVTSEPDKHSLLVGDFREDDDTAL

SEQ ID NO: 735 - protein, 87 aa, Artificial Sequence
  derived and/or modified sequence
ECNEEIKMDPSMGVNSVTISVEGMTCNSCVWTIEQQIGKVNGVHHIKVSLEEKNATIIFYAHWFGFAALDGICSNGCFICFCSTFFS

SEQ ID NO: 736 - DNA, 4503 bp, Artificial Sequence
  derived and/or modified sequence
atggatccatccatgggggtcaacagcgtgacgatttcagtggaggggatgacatgtaacagctgcgtgtggacaattgagcagcagatcggcaaagttaatggtgtccaccatattaaggtctcactggaggaaaaaaacgcaaccattatctatgatccaaagctgcagacaccaaagacactgcaggaggctattgatgatatggggtttgatgccgtgattcacaacccagatcctttgcctgtgctcaccgatacgctttttctaacagttactgcttccttaacgctgccatgggatcacattcagagcacattgttgaaaactaagggggtcacagacataaaaatctacccgcagaagcgaacagtggctgtgactattatcccctcaattgtcaacgctaaccagatcaaagaactcgtgccagagttgtcactggatactggcacacttgaaaagaaatcgggcgcttgtgaagaccatagcatggctcaggccggagaagttgtgctgaaaatgaaggtggaaggaatgacgtgccatagctgcacttctaccatagaggggaagataggaaaactccagggagtacagcgcataaaggtgagcttggacaaccaggaagccacaatcgtctaccagccacacctgattagcgtggaagaaatgaagaagcagatcgaagctatgggcttcccagccttcgtcaagaaacagcccaaatatctgaagttgggcgccatcgatgtggaaaggctaaaaaacactcctgtcaagtctagcgagggctctcagcaacggtccccatcttatacaaatgacagcactgcaacgtttatcatagacggcatgcattgcaaaagttgtgtgtcaaacatcgaaagcacgctgagcgccctgcaatacgtgtcgagcatagttgtgtccttggaaaatcgctccgcaatcgttaagtacaacgcctcctcagtcacgccagagtctctcaggaaggccatcgaggcggtgagcccgggcctgtaccgcgtatcaattacctccgaagtggagtctacttccaattctcctagtagctcttcactccagaaaatccccctgaatgtggtttcccagccattgacacaggagacagtcatcaatatcgatggaatgacttgcaactcctgcgtgcagtccattgagggagtaatcagtaaaaagccaggcgtgaagtccataagagtaagcctggccaattctaatggtacagtggagtacgatcccttgctgacgagtccagaaaccctccggggagcaatcgaagatatggggttcgatgctaccctgtcagataccaacgaacctctcgtggtgattgctcagccgagcagcgaaatgcctctactaacctccactaatgagttctataccaagggtatgacgccagtgcaagataaggaagaggggaagaactccagtaaatgttacatacaggtgaccggaatgacctgcgcctcttgtgtagctaatatcgagagaaatttacggcgcgaagaggggatttatagcatcttagtcgccctaatggccggaaaagccgaagtgagatacaatcccgccgtgatacaaccccccatgatcgcagaattcatcagggagcttgggtttggcgcaacggtgattgaaaacgccgacgaaggggacggggttctcgagctggtcgtccggggaatgacttgcgccagttgtgtgcacaagattgagagtagcctcaccaaacacagagggattctgtactgttcagtggcactggctacaaacaaagcccacatcaagtatgaccctgagattatcggacctcgagacattatccataccattgaatcccttgggttcgaggcttctttggttaaaaaggaccgctccgctagccatcttgaccacaaaagagaaattaggcagtggcgccgctcatttctggtatcactgttcttctgcattcccgtgatgggactcatgatctatatgatggtgatggatcaccactttgccacattgcaccataatcaaaacatgtcgaaggaggagatgattaacctccattcctccatgtttctcgagagacagattctcccggggctgagtgttatgaacctgctcagttttcttctttgcgtgcccgttcagtttttcggcgggtggtacttctatatccaggcttacaaagccctcaagcacaagaccgccaacatggacgtgctcatcgtattggctacaacaatcgccttcgcgtactccctgattatcctacttgtggccatgtacgaacgcgccaaggtgaacccaataacctttttcgacactcctcccatgctatttgtgtttatcgccctcgggcgctggctggagcacatcgcaaagggaaaaacctcagaagcacttgctaagcttatcagcctccaggccacagaggctactatagtaacccttgacagcgacaacatcctgttaagtgaagagcaggttgacgtcgaactcgtgcagcgtggagacataatcaaggtggttcctgggggaaaatttcctgttgacgggagggttatcgagggacatagtatggtggacgaatcattaatcactggcgaggctatgcccgtggcaaagaagccggggtctacagtgattgcaggatccattaatcagaacggaagcctgcttatctgtgccacgcatgtgggcgcagacacaaccctcagccagattgttaaactggtggaagaagcacaaacctcaaaggcacccatccagcagtttgcagataaactgagtgggtactttgtcccctttatcgtatttgtgagcatcgccacattgctcgtctggatcgtgattgggttcctcaattttgagattgtggagacctactttccagggtataaccgatccattagccggacagagaccatcatccgatttgccttccaggcttcaatcacagttctgtgtatcgcttgtccatgtagtctggggttggcaacccccacggccgtgatggtcggaacaggtgttggtgctcagaatggtattctcatcaagggtggcgagcctctcgagatggctcacaaagttaaggttgtggtgttcgacaaaaccggaactataactcacggtacaccagtggtgaaccaggtgaaggttctcacagaaagcaaccggatttctcaccacaagatcctcgccatcgtggggactgctgaaagcaatagcgaacatccactgggcaccgcaatcacgaagtattgtaagcaggagctggacactgaaacccttggtacatgtattgattttcaggtggtccccggatgcgggatctcttgtaaggtgacaaacatagagggcctgctccataagaataattggaacatcgaagataacaatattaagaatgctagcctggtacagatcgatgccagtaacgaacagtcctcaacctcttccagcatgattatcgacgcccagattagcaatgcactgaatgcccaacagtacaaggtcctcatcgggaacagggagtggatgatccggaacggcctggttatcaataacgacgtgaatgacttcatgactgaacacgaacgcaaaggacgcaccgccgttctcgtggccgtcgatgacgagctgtgtgggttaatcgcaatcgccgacaccgtgaaaccagaagccgagctagccatccacatccttaagtctatgggcctggaggtcgtgttgatgaccggggacaatagtaaaacagctaggtccattgcgagccaggtagggatcactaaagtcttcgcagaagtcctcccaagccacaaagtagcaaaagtgaagcagttacaggaggaaggcaaaagagtcgccatggtcggagatgggattaatgattcacctgccctcgctatggcaaacgtggggattgcaattggaaccggaaccgatgtcgcgattgaagccgccgatgtcgtactcattcggaatgacttactggacgtagtcgcctctattgatctgagcagagaaacagtcaaacggattcggataaattttgtttttgctctgatatataacctggtcggaattccaatagccgccggagtgttcatgccaatcggcttggtgctgcagccctggatgggatctgccgctatggccgcgtcatcggtgtcggttgtgctgtcctcattgtttctgaagctgtaccggaaacccacttacgagagctatgaactgccggcgagaagccagattggacagaagtcaccctccgagatttctgtccatgtcggcatcgatgacaccagtcggaactccccaaaactggggctactggacaggatcgtcaactactcccgggcaagtattaacagtctattgtctgacaaaaggagtttaaacagtgtcgttacgtcagagccagataagcattcattactggtcggcgacttcagagaagacgacgacacagctctgtag

SEQ ID NO: 737 - DNA, 4503 bp, Artificial Sequence
  derived and/or modified sequence
atggaccccagcatgggcgtgaacagcgtgaccatctctgtggagggcatgacctgcaacagctgtgtgtggaccatcgagcagcagatcggcaaggtgaatggagtgcaccacatcaaggtgtccctggaggagaagaatgccaccatcatctatgaccccaagctgcagacccccaagaccctgcaggaggccattgatgacatgggctttgatgctgtgatccacaacccagaccccctgcctgtgctgacagacaccctcttcctgactgtgacagccagcctgaccctgccctgggaccacatccagagcaccctgctgaagaccaagggcgtgacagacatcaagatctacccccagaagaggacagtggccgtgaccatcatccccagcatcgtgaatgccaaccagatcaaggagctggtgcctgagctgagcctggacaccggcaccctggagaagaagagcggggcctgtgaggaccacagcatggcccaggccggggaggtggtgctgaagatgaaggtggagggcatgacctgccacagctgcaccagcaccatcgagggcaagattggcaagctgcagggcgtgcagaggatcaaggtgtccctggacaaccaggaggccaccatcgtgtaccagccccacctgatctctgtggaggagatgaagaagcagatcgaggccatgggcttccctgcctttgtgaagaagcagcccaagtacctgaagctgggcgccattgatgtggagcggctgaagaacacccctgtgaagagcagcgagggcagccagcagaggagccccagctacaccaatgacagcacagccaccttcatcattgatggcatgcactgcaagagctgtgtgagcaacatcgagagcaccctgagcgccctgcagtatgtgagcagcatcgtggtgtccctggagaacagaagtgccatcgtgaagtacaatgccagctctgtgaccccagagagcctgaggaaggccattgaagctgtgtccccaggcctgtacagagtgtccatcaccagcgaggtggagagcaccagcaacagccccagcagcagcagcctgcagaagatccccctgaatgtggtgtcccagcccctgacccaggagaccgtcatcaacattgatggcatgacctgcaacagctgtgtgcagagcattgaaggagtcatcagcaagaagccaggagtgaagagcatccgggtgtccctggccaacagcaatggcaccgtggagtatgaccccctgctgaccagccctgagaccctgcggggggccatcgaggacatgggctttgatgccaccctgagtgacaccaatgagcccctggtggtgattgcccagcccagcagcgagatgcccctgctgaccagcaccaatgagttctacaccaagggcatgacccctgtgcaggacaaggaggagggcaagaacagcagcaagtgctacatccaggtgacaggcatgacctgtgccagctgtgtggccaacatcgagaggaacctgcggcgggaggagggcatctacagcatcctggtggccctgatggccggcaaggccgaggtgcgctacaacccagctgtgatccagccccccatgattgctgagttcatccgggagctgggctttggagccaccgtgattgaaaatgctgatgaaggagatggagtgctggagctggtggtgcggggcatgacctgtgccagctgtgtgcacaagattgagagcagcctgaccaagcaccggggcatcctgtactgcagcgtggccctggccaccaacaaggcccacatcaagtatgaccctgagatcatcggcccccgggacatcatccacaccatcgagagcctgggctttgaggccagcctggtgaagaaggacagaagtgccagccacctggaccacaagcgggagatccggcagtggaggaggagcttcctggtgtccctcttcttctgcatccctgtgatgggcctgatgatctacatgatggtgatggaccaccactttgccaccctgcaccacaaccagaacatgagcaaggaggagatgatcaacctgcacagctccatgttcctggagcggcagatcctgcccggcctgtctgtgatgaacctgctgtccttcctgctgtgtgtgcctgtgcagttcttcggcggctggtacttctacatccaggcctacaaggccctgaagcacaagacagccaacatggatgtgctgattgtgctggccaccaccatcgcctttgcctacagcctcatcatcctgctggtggccatgtatgaaagagccaaggtgaaccccatcaccttctttgacaccccacccatgctgtttgtgttcatcgccctgggccgctggctggagcacatcgccaagggcaagaccagcgaggccctggccaagctgatcagcctgcaggccacagaggccaccatcgtgaccctggacagcgacaacatcctgctgtctgaggagcaggtggatgtggagctggtgcagagaggagacatcatcaaggtggtgcctgggggcaagtttcctgtggatggccgggtgattgagggccacagcatggtggatgagagcctcatcactggagaggccatgcctgtggccaagaagccaggcagcacagtgattgctggcagcatcaaccagaatggcagcctgctgatctgtgccacccacgtgggcgctgacaccaccctgagccagatcgtgaagctggtggaggaggcccagaccagcaaggcccccatccagcagtttgctgacaagctgagcggctactttgtgcccttcatcgtgtttgtgtccatcgccaccctgctggtgtggatcgtgattggcttcctgaactttgagatcgtggagacctacttccctggctacaacagaagcatcagcaggacagagaccatcatccgctttgccttccaggccagcatcaccgtgctgtgcatcgcctgcccctgcagcctgggcctggccacccccacagctgtgatggtgggcaccggggtgggcgcccagaatggcatcctgatcaagggcggggagcccctggagatggcccacaaggtgaaggtggtggtgtttgacaagacaggcaccatcacccacggcacccctgtggtgaaccaggtgaaggtgctgacagagagcaaccgcatcagccaccacaagatcctggccatcgtgggcacagctgagagcaacagcgagcaccccctgggcacagccatcaccaagtactgcaagcaggagctggacacagagaccctgggcacctgcatcgacttccaggtggtgcccggctgcggcatcagctgcaaggtgaccaacatcgagggcctgctgcacaagaacaactggaacatcgaggacaacaacatcaagaatgccagcctggtgcagattgatgccagcaatgagcagagcagcaccagcagctccatgatcattgatgcccagatcagcaatgccctgaatgcccagcagtacaaggtgctgattggcaaccgggagtggatgatcagaaatggcctggtgatcaacaatgatgtgaatgacttcatgacagagcacgagaggaaaggaagaacagctgtgctggtggccgtggatgatgagctgtgtggcctcatcgccatcgctgacacagtgaagccagaggccgagctggccatccacatcctgaagtccatgggcctggaggtggtgctgatgaccggggacaacagcaagacagcccggagcatcgccagccaggtgggcatcaccaaggtgtttgctgaggtgctgcccagccacaaggtggccaaggtgaagcagctgcaggaggagggcaagagggtggccatggtgggagatggcatcaatgacagccctgccctggccatggccaacgtgggcatcgccatcggcaccggcacagatgtggccatcgaggccgcagatgtggtgctgatcagaaatgacctgctggatgtggtggccagcattgacctgagccgggagaccgtgaagaggatccgcatcaactttgtgtttgccctgatctacaacctggtgggcatccccatcgccgccggggtcttcatgcccatcggcctggtgctgcagccctggatgggcagcgctgccatggccgccagctctgtgtctgtggtgctgagcagcctcttcctgaagctgtacaggaagcccacctatgagagctatgagctgcctgcccggagccagatcggccagaagagccccagcgagatctctgtgcacgtgggcattgatgacaccagcaggaacagccccaagctgggcctgctggaccgcatcgtgaactacagccgggccagcatcaacagcctgctgagtgacaagaggagcctgaacagcgtggtgaccagcgagccagacaagcacagcctgctggtgggggacttccgggaggatgatgacacagccctgtag

SEQ ID NO: 738 - DNA, 4503 bp, Artificial Sequence
  derived and/or modified sequence
atggaccccagcatgggcgtgaacagcgtgaccatcagcgtggaggggatgacttgcaattcatgtgtgtggaccatcgaacagcagatagggaaggtcaatggtgtacaccacattaaggtgagtctggaagagaagaacgccaccattatctatgatcctaaattacagacacctaaaacactacaggaggccatcgacgatatgggattcgacgccgtaattcataatcccgatcccttaccggtactgacagataccttatttctgaccgtgacagcgtccctcaccctgccgtgggatcatatccagtccacactacttaagactaagggcgtgactgacatcaagatctacccacagaagcgcactgtggccgtaacaatcataccaagcatcgtgaacgcgaatcagatcaaggaactagttcctgaattatccttggatactggcactcttgaaaagaaaagcggggcatgcgaagaccactcaatggcacaggccggggaagtcgtcctgaaaatgaaagtggagggcatgacttgtcattcttgcacctccactatcgaaggcaaaatcggtaagctgcagggtgtgcagaggattaaggtgtcacttgataaccaggaagccacgattgtatatcagcctcatctgattagcgtggaggaaatgaagaagcagatcgaagccatgggcttccccgcctttgtcaaaaagcagccaaaatacctgaagctgggggccattgacgtcgaaaggctcaagaatacgcccgtgaagagcagtgagggaagccagcagcgtagccccagctacactaacgactctacggctacctttatcatagacggcatgcattgtaaaagctgtgtgagtaatatcgagagcactctgtccgcgctgcagtatgtgagttcaatagtcgtgtcactggaaaacagatctgccattgtgaagtacaacgcgagctcggttacacccgagagtctgcggaaagctattgaggccgtgagcccggggctgtatagggtcagcataacatcagaggtggagagcacgagcaacagtccttccagttcatcactgcagaagatccccttgaatgtcgtctcccagccgctcacacaagagaccgttatcaacatagatggcatgacgtgtaactcctgcgtacagtctattgagggcgtcatctccaagaagccgggagtcaagagcattagagtctcccttgcaaactccaatgggaccgtggaatatgatcccttgctcacttctcccgagacacttagaggcgccattgaggacatgggatttgatgccaccctatctgacaccaatgagcccctggtcgtaatcgcccagcccagcagcgaaatgcctctactgacctctaccaatgaattttataccaagggcatgacaccagtgcaagacaaagaggaaggcaaaaactcatccaagtgctacatacaggttaccggaatgacctgcgctagttgcgtcgctaacattgaacgcaacctccgccgtgaagaggggatctacagtattctcgttgcgctaatggcaggcaaagctgaagtgcgatacaaccctgccgtgatccagcctcccatgatagccgagttcatcagagagctgggctttggggccaccgtcatcgaaaacgctgacgagggggatggcgttctggagctggtggtacgaggcatgacctgcgccagctgcgtgcacaagatcgagtctagcctcaccaagcacaggggcattctgtattgctcagtggcactcgccacaaataaggcccacatcaagtacgatcccgagattattggccctcgtgacatcattcataccattgaaagcctcgggtttgaggcaagcctcgtcaagaaagatagatccgcatcacacctggaccacaaacgggaaattcgccaatggcggcgatctttcctggtatctctgttcttttgcatccccgtcatgggtttgatgatctacatgatggttatggatcaccattttgcaaccctgcaccacaaccagaatatgtccaaagaggagatgattaacctgcatagcagcatgtttcttgagcgccagattctgcccggactctccgtgatgaacctgcttagctttctgttgtgtgtgcctgtgcaattctttggaggatggtatttctatattcaggcgtataaggccctgaaacacaagactgcaaacatggatgtgttgatcgttcttgctaccaccatcgccttcgcatatagcttgataattttgcttgtagcaatgtatgaacgggcgaaagttaatcctattacgttctttgacactcccccaatgttgtttgtctttatcgccctggggagatggttagagcacatcgccaagggtaagaccagtgaggctctggcaaagctcatctcactccaagctaccgaagccactattgtgacccttgactccgacaacattctcttaagtgaagagcaggtagacgtggagttagtgcagaggggggacataattaaggtagttcccggcggcaaatttcccgtcgacggcagagttatcgagggacattccatggtggatgagtctctcatcaccggtgaagccatgccggtggcgaaaaaacccggatcgaccgtaattgctggttcgattaatcaaaacgggtctctgctgatctgtgcaactcatgttggcgctgatacaaccctgtcacaaattgtaaaattagtcgaggaggcccagacatccaaggcccccattcagcagttcgccgataaactcagcggctactttgtgccattcattgtcttcgtgtccattgctacccttctcgtgtggattgtcattggcttcctgaatttcgagatagtggaaacttacttccctggatacaaccgaagcatttcgagaaccgagactattatcaggttcgcatttcaggcttccattacagtcctctgtatcgcttgtccatgttctctgggactggcgacaccaacagcagtgatggtcggaacaggtgtgggtgcacagaatggaatcctcatcaaaggaggcgagcctctggagatggcacacaaagttaaagtggtcgtgtttgataagacgggcacaattactcacgggacacccgtggtcaatcaagtgaaagtgctgactgagtcaaataggatttcacaccacaaaattctggctatcgtcgggaccgctgaatcaaatagtgagcaccccctgggaaccgcgattaccaaatactgcaagcaagagctggatactgaaaccctcggaacatgcatcgactttcaagttgtacctggttgtggcatcagttgcaaggttacaaatatcgaagggctgctgcacaaaaacaattggaacattgaggacaacaacatcaaaaacgcaagcctggtgcagattgacgcctcgaatgagcagagctcaaccagctctagcatgatcattgacgcgcaaatctcgaacgccctgaatgcacagcagtacaaggttctgatcggaaacagagagtggatgatccgcaatggacttgtgatcaacaacgatgtcaatgactttatgacagaacatgagaggaagggaaggaccgccgtcctggtggcagtggacgacgagttgtgcggactaattgccattgcagataccgttaagccggaagctgagctggcaattcatattttgaagtcaatgggccttgaagtagtcctaatgactggggacaactctaagaccgccagatccattgcctcccaggtgggaatcactaaggtcttcgctgaggttctgcccagtcataaggtcgcaaaggtgaaacaattacaggaggaggggaaaagggtcgctatggtgggcgatggcataaatgattcccccgccttggcaatggccaatgtcgggattgctattggcaccggaaccgatgttgctatcgaggccgccgatgtggtgctcatccgaaatgacctgctagacgtggtggcttctatagatttgagccgcgagaccgtcaaaagaatccgtattaacttcgtgtttgctctcatttacaacctcgtcggtatccccatagcagcaggagtcttcatgcccatcggtctggtgctgcagccgtggatggggtctgcagcgatggccgcgtcttcggtcagcgtcgtgctatcaagcttatttctgaagctgtaccgcaagcccacctatgagtcatacgagctgcccgctcgcagccagatcggacagaagagtcctagcgagatctcagtccacgtggggatcgacgacacaagtcgcaatagccctaaactagggttgcttgaccgcattgtgaattactcaagagcgagtatcaatagcctgttgtctgataagagatctctcaactctgtggtcacctctgaacccgacaagcactcgctcctcgtgggggattttcgggaagatgatgacaccgcattgtag

SEQ ID NO: 739 - DNA, 4503 bp, Artificial Sequence
  derived and/or modified sequence
atggatccttccatgggggtgaacagcgttaccatctcagtggagggcatgacatgtaacagttgcgtgtggactatagaacagcagataggaaaggtgaacggcgtccaccatattaaggtgtctctggaggagaagaacgccactatcatatatgaccctaagctgcaaactcctaagacccttcaagaagccattgatgacatgggcttcgacgctgtgatacacaatcctgaccctcttccggtattaacggacaccctctttcttactgttaccgcttctttgacactaccttgggaccacatccagtccacattgttgaagactaaaggcgtcacggacatcaagatctatccacaaaagaggactgttgcagttaccatcattcctagcattgtgaatgctaaccagattaaagaacttgtgcccgagttgtcccttgacactgggaccctggagaaaaaatcaggggcttgcgaggaccattccatggcccaagccggtgaggttgtgctaaaaatgaaagtggagggtatgacttgtcactcttgtacgtctactattgaggggaagatcggtaaactgcagggtgtacagagaatcaaggtaagcctagataatcaggaggctacgatcgtgtatcagcctcacctgatctccgtggaagagatgaagaaacagatcgaggctatgggcttccccgcattcgtaaaaaaacagccaaagtatctgaagcttggggctatagacgtcgaacgtctgaagaataccccagtcaaaagttcagaggggagccagcagcgaagccccagctatacaaacgattctacagcaacatttatcatcgatggcatgcattgtaaaagctgcgtcagcaacatcgagagcacccttagcgcattgcagtatgttagtagcattgtggtgtcgctcgagaacagatccgccatcgtgaaatacaatgcttcaagtgtgacacctgagtccctgcggaaggccattgaggccgtatcacccggactgtacagagtatccatcacaagcgaagtagaatccacttcaaattccccaagcagcagcagcctgcagaaaatccctcttaacgtcgtatcccagcccctgacacaggaaactgtgattaatatcgatggaatgacgtgtaattcttgtgtgcaatctattgagggagttatttccaaaaaacctggagtcaaatccatccgagtgagtctcgccaattcaaatgggacagtggagtatgatccccttctcacctcaccagaaactcttcgcggagccatcgaagatatgggattcgacgcaactctgagtgatacgaacgagccactggttgtgattgcacaacccagcagtgagatgcctctgcttactagtactaatgagttttacacaaaaggaatgacccccgtgcaggataaggaggaaggcaagaacagttctaaatgctatatccaggttaccggcatgacctgcgcctcctgcgtggcgaatatcgagagaaacttaagacgagaagaggggatttacagcattctcgtggcgctcatggcaggcaaagccgaagtgaggtacaacccggcagtgattcaaccacctatgatcgctgaattcattcgcgagctcggatttggcgcaacagttatcgaaaatgccgacgagggagacggtgtgctcgagctcgtcgtaagaggcatgacctgcgccagctgcgtgcataaaatcgagagttccctgacgaagcatagaggcatcctgtactgttctgtagcattggcgactaacaaggcacacattaagtatgacccggagattatcgggcctcgtgacatcattcatacaattgagagcctaggatttgaggcttcgctggtaaagaaggatcgttcagcatcacacctggaccacaagcgagaaattcggcaatggcgcagaagcttcttggtatctctctttttttgtatccccgtcatgggcctgatgatttacatgatggtgatggatcatcatttcgccaccctccatcataaccaaaacatgtccaaagaggaaatgatcaatttacattcatccatgtttctcgagagacagatcttgcccggtctgtccgtgatgaatctgctctcttttcttctttgtgtgccggtgcaattctttgggggatggtatttctacatccaggcatataaggccctgaaacacaaaaccgccaacatggatgtgttgatcgtgctggccactacaatcgccttcgcttactcgctcatcattctgctggtagcaatgtacgaacgagctaaagtaaacccaataactttttttgataccccacccatgctgttcgtctttatcgcacttggcagatggctggagcacattgcgaaggggaaaacctcagaagccttggctaaactgatatccctgcaggcaaccgaagcaacgatcgtgaccctggactccgacaatattctcctgtccgaggagcaagtcgatgtggaactcgtacagcggggtgacatcattaaggttgtgccgggaggcaagttccccgtggacggtagggtgattgaggggcattcaatggtcgatgagagcctcatcactggagaagccatgcctgttgctaagaagcctggaagtaccgttatcgcaggttccatcaatcagaatggctcactgctcatctgtgcaacccatgtgggagctgatacgactctaagccaaatcgttaaactcgtcgaggaagcccagacatcaaaagctcccattcagcagttcgctgacaaactttccggctatttcgttccatttattgtgttcgtgtccatcgccacattactcgtttggatagtaataggctttctgaatttcgagattgtggaaacctacttccccggatacaatcgatccattagccgtactgagactatcatccggtttgctttccaggcctctatcaccgtgttgtgcattgcttgcccatgcagtttgggcttggccacaccaaccgctgtgatggtcgggactggagtcggtgcccagaatggcatacttatcaagggcggagagccactagagatggcccacaaggtgaaggtggttgtgttcgacaaaaccggcactatcacgcacgggaccccagtagtgaaccaggtgaaagtcttgacggagtctaataggatatcccatcacaaaatcctggctatcgtgggaaccgccgagagcaattcggagcacccccttggcaccgccattaccaaatattgcaaacaggaactggatactgaaactctgggaacgtgcatcgactttcaagtggtgccaggatgtgggataagttgcaaagtaaccaacatagagggtctgctgcacaagaataattggaatattgaagataataacataaagaacgcttcattagtgcaaatcgatgcctccaatgagcagagctcaaccagtagttccatgattatagatgcccagataagcaacgcactgaacgcccaacagtataaggtactgatcggtaacagggagtggatgatccgtaatggactggtgattaacaacgacgttaatgattttatgacagaacacgagcgaaagggaagaaccgccgtgctggtcgcagtggacgacgagctctgcggtctcattgctatcgccgacacagtgaaacctgaggccgaactagccattcacatattaaagtctatggggctcgaagtcgtgctgatgactggagataattctaagaccgcgcgatcaattgctagccaggtcggcatcaccaaagtgttcgcagaggtcttgccttctcacaaagttgcgaaggtgaaacagcttcaagaagagggtaaacgagtggccatggtaggcgacggtatcaatgactcgcccgctctggcaatggcgaacgtcggtatagctatcgggaccgggacggacgtggcaatagaggctgctgatgttgtgcttatacgcaacgatctgttggacgtagttgccagcattgatctgagtagggagaccgtaaaaagaatccgcattaatttcgtgtttgccctgatttacaatctggtgggtattccaatagctgctggagtatttatgccaataggcctggttctgcagccttggatgggttcagctgccatggccgcaagttctgtttccgttgtgctgagttcattgtttctcaagctgtacaggaaacctacttacgaatcttacgaactgccggctaggtctcagattggccagaagtccccaagtgaaattagcgttcatgttggaattgatgacacatcccgcaactcccctaagcttgggctactggaccggatcgtaaattattcaagggcctcaatcaattctctgctcagcgacaagagaagcctgaactccgtggtgacatctgagcccgacaagcactctctcttggtgggggatttccgggaggatgacgacacggccttatag

SEQ ID NO: 740 - DNA, 8483 bp, Artificial Sequence
  derived and/or modified sequence
tgctgccgccgccgcagccgcagctactgtgacttctccgattgtgtgagctttgttggagcctgcgtacgtggatttatcgctgccacggtctgcgtagctccagaggtttaaccataggatagagaaaccaggaatgtaatgaggaaatcaaaatggatccaagtatgggtgtgaattctgttaccatttctgttgagggtatgacttgcaattcctgtgtttggaccattgagcagcagattggaaaagtgaatggtgtgcatcacattaaggtatcactggaagaaaaaaatgcaactattatttatgaccctaaactacagactccaaagaccctacaggaagctattgatgacatgggctttgatgctgttatccataatcctgaccctctccctgttttaactgacaccttgtttctgactgttacggcgtcactgactttgccatgggaccatatccaaagcacattgctgaagaccaagggtgtgacagacattaaaatttaccctcagaaaagaactgtagcagtgacaataatcccttctatagtgaatgccaatcagataaaagagctggttccagaactcagtttagatactgggacactggagaaaaagtcaggagcttgtgaagatcatagtatggctcaagctggtgaagtcgtgctgaagatgaaagtggaagggatgacctgccattcatgtactagcactattgaaggaaaaattgggaaactgcaaggtgttcagcgaattaaagtctccctggacaatcaagaagctactattgtttatcaacctcatcttatctcagtagaggaaatgaaaaagcagattgaagctatgggctttccagcatttgtcaaaaagcagcccaagtacctcaaattgggagctattgatgtagaacgtctaaagaacacaccagttaaatcctcagaagggtcacagcaaaggagtccatcatataccaatgattcaacagccactttcatcattgatggcatgcattgtaaatcatgtgtgtcaaatattgaaagtactttatctgcactccaatatgtaagcagcatagtagtttctttagagaataggtctgccattgtgaagtataatgcaagctcagtcactccagaatccctgagaaaagcaatagaggctgtatcaccggggctatatagagttagtatcacaagtgaagttgagagtacctcaaactctccctccagctcatctcttcagaagattcctttgaatgtagttagccagcctctgacacaagaaactgtgataaacattgatggcatgacttgtaattcctgtgtgcagtctattgagggtgtcatatcaaaaaagccaggtgtaaaatccatacgagtctcccttgcaaatagcaatgggactgttgagtatgatcctctactaacctctccagaaacgttgagaggagcaatagaagacatgggatttgatgctaccttgtcagacacgaatgagccgttggtagtaatagctcagccttcatcggaaatgccgcttttgacttcaactaatgaattttatactaaagggatgacaccagttcaagacaaggaggaaggaaagaattcatctaagtgttacatacaggtcactggcatgacttgcgcttcctgtgtagcaaacattgaacggaatttaaggcgggaagaaggaatatattctatacttgtggccctgatggctggcaaggcagaagtaaggtataatcctgctgttatacaacccccaatgatagcagagttcatccgagaacttggatttggagccactgtgatagaaaatgctgatgaaggagatggtgttttggaacttgttgtgaggggaatgacgtgtgcctcctgcgtacataaaatagagtctagtctcacaaaacacagagggatcctatactgctccgtggccctggcaaccaacaaagcacatattaaatatgacccagaaattattggtcctagagatattatccatacaattgaaagcttaggttttgaagcttctttggtcaagaaggatcggtcagcaagtcacttagatcataaacgagaaataagacaatggagacggtcttttcttgtgagtctgtttttctgtattcctgtaatggggctgatgatatatatgatggttatggaccaccactttgcaactcttcaccataatcaaaacatgagtaaagaagaaatgatcaaccttcattcttctatgttcctggagcgccagattcttccaggattgtctgttatgaatttgctgtcctttttattgtgtgtacctgtacagtttttcggaggctggtacttctacattcaggcttataaagcactgaagcataagacagcaaatatggacgtactgattgtgctggcaaccaccattgcatttgcctactctttgattattcttctagttgcaatgtatgagagagccaaagtgaaccctattactttctttgacacaccccctatgctgtttgtgtttattgcactaggccgatggctggaacatatagcaaagggcaaaacatcagaggctcttgcaaagttaatttcactacaagctacagaagcaactattgtaactcttgattctgataatatcctcctcagtgaagaacaagtggatgtggaacttgtacaacgtggagatatcattaaagtagttccaggaggcaaatttccagtggatggtcgtgttattgaaggacattctatggtagatgagtccctcatcacaggggaggcaatgcctgtggctaagaaacctggcagcacagtgattgctggttccattaaccagaacgggtcactgcttatctgcgcaacacatgttggagcagacacaaccctttctcaaattgtcaaacttgtggaagaggcacaaacatcaaaggctcctatccagcagtttgcagacaaactcagtggctattttgttccttttattgtttttgtttccattgccaccctcttggtatggattgtaattggatttctgaattttgaaattgtggaaacctactttcctggctacaatagaagtatctcccgaacagaaacgataatacgatttgctttccaagcctctatcacagttctgtgtattgcatgtccctgttcactgggactggccactccaactgctgtgatggtgggtacaggagtaggtgctcaaaatggcatactaataaaaggtggagagccattggagatggctcataaggtaaaggtagtggtatttgataagactggaaccattactcacggaaccccagtggtgaatcaagtaaaggttctaactgaaagtaacagaatatcacaccataaaatcttggccattgtgggaactgctgaaagtaacagtgaacaccctctaggaacagccataaccaaatattgcaaacaggagctggacactgaaaccttgggtacctgcatagatttccaggttgtgccaggctgtggtattagctgtaaagtcaccaatattgaaggcttgctacataagaataactggaatatagaggacaataatattaaaaatgcatccctggttcaaattgatgccagtaatgaacagtcatcaacttcgtcttccatgattattgatgcccagatctcaaatgctcttaatgctcagcagtataaagtcctcattggtaaccgggagtggatgattagaaatggtcttgtcattaataacgatgtaaatgatttcatgactgaacatgagagaaaaggtcggactgctgtattagtagcagttgatgatgagctgtgtggcttgatagccattgcagacacagtgaagcctgaagcagaactggctatccatattctgaaatctatgggcttagaagtagttctgatgactggagacaacagtaaaacagctagatctattgcttctcaggttggcattactaaggtgtttgctgaagttctaccttctcacaaggttgctaaagtgaagcaacttcaagaggaggggaaacgggtagcaatggtgggagatggaatcaatgactccccagctctggcaatggctaatgtgggaattgctattggcacaggcacagatgtagccattgaagcagctgatgtggttttgataaggaatgatcttctggatgtagtggcaagtattgacttatcaagagagacagtcaagaggattcggataaattttgtctttgctctaatttataatctggttggaattcccatagctgctggagtttttatgcccattggtttggttttgcagccctggatgggatctgcagcaatggctgcttcatctgtttctgtagtactttcttctctcttccttaaactttacaggaaaccaacttacgagagttatgaactgcctgcccggagccagataggacagaagagtccttcagaaatcagcgttcatgttggaatagatgatacctcaaggaattctcctaaactgggtttgctggaccggattgttaattatagcagagcctctataaactcactactgtctgataaacgctccctaaacagtgttgttaccagtgaacctgacaagcactcactcctggtgggagacttcagggaagatgatgacactgcattataaaaggccatggagagtgctgccagtttaacttgtcatgcactgacacagcattcatgatgttaccttcacttttcaaaatattgtagaaggatttttctcatgctcttatattagggattctatttgagttgcgtttatctgttggcaaaaatatctttttcaaggcatcagctctgaacctagctttatttaaactgaatttccagtatatttttgttttcactaacaacagataaggtagagcagtgaggtttacaacaagccctacaattagagattgctgaactgctgctaaagtgattttttttttatttgaccaaaaaaaaaaaggcccaagaagaagaaaatgaaaaatttgaagatttgagagcatgaagatattcatgcttttgaactcaaaatattgaagatactctcaagcctgtatccctgccccactggggagcaatgactttcaaagcactgtgtataaaacatctagttttagaagggaaacagttgaaactgtttaaaaatagatgtgccttatttattgcaggctttctttcccccattctccctgcatccttgtccttgcaggtgcttttttagatgctccaatatgtcttcttttgttattttctttcgagctaaccaagtttaggtggtttttcattgattaaaaataactgacaactgttctaatattttgctcctttttaaattttgtagctcaaaagaccttaaaggtctgtagggttccctgcctcccatctttccactgttgtaaaaagtatatcaaattattccttcaagtttcctagctctgtgctcagtttcagttcactcctgccaagttggactctaagttattcttcatgtagtctgctgatctcagtctggaaacttaacattatgagccttttctgctcaaaaaattttcaaagattaaaactattatacatatacaggtcatataaaattacctggattcactaaatttgtttgttgttgttgttgttgttgttgttgttgttgagacagagtcttgttttgcagcccaggctggagtgcagtggcaccatcttggctcactgcaacctctgcctaccggattcaaggaattctccctgcctcagcctcctgagtagctaggattacaggtgcctgccaccacacccggctaattttcatatttttcagtagagacggggtttcgccatgttggctagcctggtcttaaactcctaacctcaggtgatccacccgccttggcctcccaaagtgctgggattacaggtgtgagcctccatgcccagcctaaatttgtattttttgaattgagtataatcactttgctagtatatataatttaatagattttatttatcttttagtgtttcagataacctctcaaaaagactttaaaataatgctattacacaaagctgcatttaccaaaaaatacagtaaaatcataatacagaaactaaaatttccctaggttatgacgctttttagctaaatatatactcttctctagtttaaaacatttgaacttgcctagttagtgtggttggcaaatttaggagcttgttcccattgccaaatggatttagaaattcccttgtgagtgcctggtagctaatacactggtcagagatctggtacttgtaagactatttaaatttctttgttagttgcaagatggatttcatatgcagaatatgtaaatgaagaggactcataagtaaattcctaacattttgttcccattaccagaagcaaagctgctgctaacccaacatctggcacataggatttgtactcggtaaatgttagttcttttctccccttgaggtcagtaataaatacaaaaaaatcatttttctagagcagagtcttaaaatcaggtgggggtaggggatggagttcttcctttcctaccccttttctcttttatcctttcatatatacacatgcaaagtttacaaccttattccatgctgtctttcagatttagaaaagatctaatttctgtctcagctgtcttaaagagagaactgaagcttttgatgaaggtgctattaatctagaaaggcaaacccatttcactgaaatatcaatgggtttgcatatctaggccctttttttagaccaatgcctatgccatcctccatgctttcagtttgagttttattatttattattttaattccagtggcccatcttataatacaacttgtttcttctagaagacagagctgatagggtaaatgttgaaaaaagaagcatgcctccttctccctcccacccacctcaagcagttgaacacagccagttattcttccattattatgtgtaccttggagtcatcctcttggtcttgtattcatattgtgggacagtgggaatagcagcttgtagtattgaaataatcaaagagataatttcagctcttacaacaagaacagaaaacatgctaattagaaaaagtcctgctttaagtaatatgtagccacatttgaatcctctaccacaagtcttttttgcaatcttgaactttcattagcttcaaagagaagctgtatttacaggagaaagaggtgattatggagggaatcaaaaatactgctttcagttagtagctagctttaagtcaggagttagtaatgagaaattttataaatgtgtatttctgtgtattcacatacatatatatatacacacatatatatgtacatacacatacatacatattaccatactgaagggaaatggatttatatttgaatttgatatttgaatatttgaagttctctatttatatttcatttatcactcttctgtattcactcagcaaccatgcccttagtctgaagataacaaggatactttaatatccagtgccggttcagactcacctatgtggcaccttaaacttaaatatccaaagatgccttttgaatttcaaagattaaaacacagctagagtagtagtattgtagtctcaagatgtatggtgtgtcatttgtgaaaatagaaacgttatttttcctagtttagtatcaacattttagaatgtcaaatttgatgccttgtgaacaagtaattttatattgtgctttaattttttaaaaagtattctttattcatatgtatagaatgcttaaaatagcactgtagacaagatgtttccaaaactttaagtgcgcatatcttttctgtatacagcttaaaatcaaaaatgtatgttaagagaattttttctattacttatggatcatgctttaaaatgatttttcttgatatttattttactccattttgtttttttctctgggtgaggcatctggttactggttattttaaaaagaataaagacattcctggaatcactccttttgggtttttgtttgttttgtttcttttctacatttttaagtattattttacaaaatagaaaaaatatagattcatgccaaattattacctatttttacactaactttctgcagtccctccatctggtatgagtaaccagatagagcacaaagcatgagttcttgttcttcagttaaaagagcttctttcacagtgttgataacaaatgccttttgtagccaaaaccaggcgtctcaaccttacgtttttagttaaagaaatgtttagctaaacgttgttgaacattgattgtttggtaccgaaaacagcagtggacgatgttgtgcaatatccatctactgtagttaagatattcagtagtttgtttttcataagcatgtaattgatcatatttctgccaaggatgtgccttcaactttataattatagtgttgtaaaata

SEQ ID NO: 741 - DNA, 4775 bp, Artificial Sequence
  derived and/or modified sequence
actgtgacttctccgattgtgtgagctttgttggagcctgcgtacgtggatttatcgctgccacggtctgcgtagctccagaggtttaaccataggatagagaaaccaggaatgtaatgaggaaatcaaaatggatccaagtatgggtgtgaattctgttaccatttctgttgagggtatgacttgcaattcctgtgtttggaccattgagcagcagattggaaaagtgaatggtgtgcatcacattaaggtatcactggaagaaaaaaatgcaactattatttatgaccctaaactacagactccaaagaccctacaggaagctattgatgacatgggctttgatgctgttatccataatcctgaccctctccctgttttaactgacaccttgtttctgactgttacggcgtcactgactttgccatgggaccatatccaaagcacattgctgaagaccaagggtgtgacagacattaaaatttaccctcagaaaagaactgtagcagtgacaataatcccttctatagtgaatgccaatcagataaaagagctggttccagaactcagtttagatactgggacactggagaaaaagtcaggagcttgtgaagatcatagtatggctcaagctggtgaagtcgtgctgaagatgaaagtggaagggatgacctgccattcatgtactagcactattgaaggaaaaattgggaaactgcaaggtgttcagcgaattaaagtctccctggacaatcaagaagctactattgtttatcaacctcatcttatctcagtagaggaaatgaaaaagcagattgaagctatgggctttccagcatttgtcaaaaagcagcccaagtacctcaaattgggagctattgatgtagaacgtctaaagaacacaccagttaaatcctcagaagggtcacagcaaaggagtccatcataccaatgattcaacagccactttcatcattgatggcatgcattgtaaatcatgtgtgtcaaatattgaaagtactttatctgcactccaatatgtaagcagcatagtagtttctttagagaataggtctgccattgtgaagtataatgcaagctcagtcactccagaatccctgagaaaagcaatagaggctgtatcaccggggctatatagagttagtatcacaagtgaagttgagagtacctcaaactctccctccagctcatctcttcagaagattcctttgaatgtagttagccagcctctgacacaagaaactgtgataaacattgatggcatgacttgtaattcctgtgtgcagtctattgagggtgtcatatcaaaaaagccaggtgtaaaatccatacgagtctcccttgcaaatagcaatgggactgttgagtatgatcctctactaacctctccagaaacgttgagaggagcaatagaagacatgggatttgatgctaccttgtcagacacgaatgagccgttggtagtaatagctcagccttcatcggaaatgccgcttttgacttcaactaatgaattttatactaaagggatgacaccagttcaagacaaggaggaaggaaagaattcatctaagtgttacatacaggtcactggcatgacttgcgcttcctgtgtagcaaacattgaacggaatttaaggcgggaagaaggaatatattctatacttgtggccctgatggctggcaaggcagaagtaaggtataatcctgctgttatacaacccccaatgatagcagagttcatccgagaacttggatttggagccactgtgatagaaaatgctgatgaaggagatggtgttttggaacttgttgtgaggggaatgacgtgtgcctcctgcgtacataaaatagagtctagtctcacaaaacacagagggatcctatactgctccgtggccctggcaaccaacaaagcacatattaaatatgacccagaaattattggtcctagagatattatccatacaattgaaagcttaggttttgaagcttctttggtcaagaaggatcggtcagcaagtcacttagatcataaacgagaaataagacaatggagacggtcttttcttgtgagtctgtttttctgtattcctgtaatggggctgatgatatatatgatggttatggaccaccactttgcaactcttcaccataatcaaaacatgagtaaagaagaaatgatcaaccttcattcttctatgttcctggagcgccagattcttccaggattgtctgttatgaatttgctgtcctttttattgtgtgtacctgtacagtttttcggaggctggtacttctacattcaggcttataaagcactgaagcataagacagcaaatatggacgtactgattgtgctggcaaccaccattgcatttgcctactctttgattattcttctagttgcaatgtatgagagagccaaagtgaaccctattactttctttgacacaccccctatgctgtttgtgtttattgcactaggccgatggctggaacatatagcaaagggcaaaacatcagaggctcttgcaaagttaatttcactacaagctacagaagcaactattgtaactcttgattctgataatatcctcctcagtgaagaacaagtggatgtggaacttgtacaacgtggagatatcattaaagtagttccaggaggcaaatttccagtggatggtcgtgttattgaaggacattctatggtagatgagtccctcatcacaggggaggcaatgcctgtggctaagaaacctggcagcacagtgattgctggttccattaaccagaacgggtcactgcttatctgcgcaacacatgttggagcagacacaaccctttctcaaattgtcaaacttgtggaagaggcacaaacatcaaaggctcctatccagcagtttgcagacaaactcagtggctattttgttccttttattgtttttgtttccattgccaccctcttggtatggattgtaattggatttctgaattttgaaattgtggaaacctactttcctggctacaatagaagtatctcccgaacagaaacgataatacgatttgctttccaagcctctatcacagttctgtgtattgcatgtccctgttcactgggactggccactccaactgctgtgatggtgggtacaggagtaggtgctcaaaatggcatactaataaaaggtggagagccattggagatggctcataaggtaaaggtagtggtatttgataagactggaaccattactcacggaaccccagtggtgaatcaagtaaaggttctaactgaaagtaacagaatatcacaccataaaatcttggccattgtgggaactgctgaaagtaacagtgaacaccctctaggaacagccataaccaaatattgcaaacaggagctggacactgaaaccttgggtacctgcatagatttccaggttgtgccaggctgtggtattagctgtaaagtcaccaatattgaaggcttgctacataagaataactggaatatagaggacaataatattaaaaatgcatccctggttcaaattgatgccagtaatgaacagtcatcaacttcgtcttccatgattattgatgcccagatctcaaatgctcttaatgctcagcagtataaagtcctcattggtaaccgggagtggatgattagaaatggtcttgtcattaataacgatgtaaatgatttcatgactgaacatgagagaaaaggtcggactgctgtattagtagcagttgatgatgagctgtgtggcttgatagccattgcagacacagtgaagcctgaagcagaactggctatccatattctgaaatctatgggcttagaagtagttctgatgactggagacaacagtaaaacagctagatctattgcttctcaggttggcattactaaggtgtttgctgaagttctaccttctcacaaggttgctaaagtgaagcaacttcaagaggaggggaaacgggtagcaatggtgggagatggaatcaatgactccccagctctggcaatggctaatgtgggaattgctattggcacaggcacagatgtagccattgaagcagctgatgtggttttgataaggaatgatcttctggatgtagtggcaagtattgacttatcaagagagacagtcaagaggattcggataaattttgtctttgctctaatttataatctggttggaattcccatagctgctggagtttttatgcccattggtttggttttgcagccctggatgggatctgcagcaatggctgcttcatctgtttctgtagtactttcttctctcttccttaaactttacaggaaaccaacttacgagagttatgaactgcctgcccggagccagataggacagaagagtccttcagaaatcagcgttcatgttggaatagatgatacctcaaggaattctcctaaactgggtttgctggaccggattgttaattatagcagagcctctataaactcactactgtctgataaacgctccctaaacagtgttgttaccagtgaacctgacaagcactcactcctggtgggagacttcagggaagatgatgacactgcattataaaaggccatggagagtgctgccagtttaacttgtcatgcactgacacagcattcatgatgttaccttcacttttcaaaatattgtagaaggatttttctcatgctcttatattagggattctatttgagttgcgtttatctgttg

SEQ ID NO: 742 - DNA, 4503 bp, Artificial Sequence
  derived and/or modified sequence
atggaccccagcatgggcgtgaacagcgtgaccatcagcgtggagggcatgacctgcaacagctgcgtgtggaccatcgagcagcagatcggcaaggtgaacggcgtgcaccacatcaaggtgagcctggaggagaagaacgccaccatcatctacgaccccaagctgcagacccccaagaccctgcaggaggccatcgacgacatgggcttcgacgccgtgatccacaaccccgaccccctgcccgtgctgaccgacaccctgttcctgaccgtgaccgccagcctgaccctgccctgggaccacatccagagcaccctgctgaagaccaagggcgtgaccgacatcaagatctacccccagaagagaaccgtggccgtgaccatcatccccagcatcgtgaacgccaaccagatcaaggagctggtgcccgagctgagcctggacaccggcaccctggagaagaagagcggcgcctgcgaggaccacagcatggcccaggccggcgaggtggtgctgaagatgaaggtggagggcatgacctgccacagctgcaccagcaccatcgagggcaagatcggcaagctgcagggcgtgcagagaatcaaggtgagcctggacaaccaggaggccaccatcgtgtaccagccccacctgatcagcgtggaggagatgaagaagcagatcgaggccatgggcttccccgccttcgtgaagaagcagcccaagtacctgaagctgggcgccatcgacgtggagagactgaagaacacccccgtgaagagcagcgagggcagccagcagagaagccccagctacaccaacgacagcaccgccaccttcatcatcgacggcatgcactgcaagagctgcgtgagcaacatcgagagcaccctgagcgccctgcagtacgtgagcagcatcgtggtgagcctggagaacagaagcgccatcgtgaagtacaacgccagcagcgtgacccccgagagcctgagaaaggccatcgaggccgtgagccccggcctgtacagagtgagcatcaccagcgaggtggagagcaccagcaacagccccagcagcagcagcctgcagaagatccccctgaacgtggtgagccagcccctgacccaggagaccgtgatcaacatcgacggcatgacctgcaacagctgcgtgcagagcatcgagggcgtgatcagcaagaagcccggcgtgaagagcatcagagtgagcctggccaacagcaacggcaccgtggagtacgaccccctgctgaccagccccgagaccctgagaggcgccatcgaggacatgggcttcgacgccaccctgagcgacaccaacgagcccctggtggtgatcgcccagcccagcagcgagatgcccctgctgaccagcaccaacgagttctacaccaagggcatgacccccgtgcaggacaaggaggagggcaagaacagcagcaagtgctacatccaggtgaccggcatgacctgcgccagctgcgtggccaacatcgagagaaacctgagaagagaggagggcatctacagcatcctggtggccctgatggccggcaaggccgaggtgagatacaaccccgccgtgatccagccccccatgatcgccgagttcatcagagagctgggcttcggcgccaccgtgatcgagaacgccgacgagggcgacggcgtgctggagctggtggtgagaggcatgacctgcgccagctgcgtgcacaagatcgagagcagcctgaccaagcacagaggcatcctgtactgcagcgtggccctggccaccaacaaggcccacatcaagtacgaccccgagatcatcggccccagagacatcatccacaccatcgagagcctgggcttcgaggccagcctggtgaagaaggacagaagcgccagccacctggaccacaagagagagatcagacagtggagaagaagcttcctggtgagcctgttcttctgcatccccgtgatgggcctgatgatctacatgatggtgatggaccaccacttcgccaccctgcaccacaaccagaacatgagcaaggaggagatgatcaacctgcacagcagcatgttcctggagagacagatcctgcccggcctgagcgtgatgaacctgctgagcttcctgctgtgcgtgcccgtgcagttcttcggcggctggtacttctacatccaggcctacaaggccctgaagcacaagaccgccaacatggacgtgctgatcgtgctggccaccaccatcgccttcgcctacagcctgatcatcctgctggtggccatgtacgagagagccaaggtgaaccccatcaccttcttcgacaccccccccatgctgttcgtgttcatcgccctgggcagatggctggagcacatcgccaagggcaagaccagcgaggccctggccaagctgatcagcctgcaggccaccgaggccaccatcgtgaccctggacagcgacaacatcctgctgagcgaggagcaggtggacgtggagctggtgcagagaggcgacatcatcaaggtggtgcccggcggcaagttccccgtggacggcagagtgatcgagggccacagcatggtggacgagagcctgatcaccggcgaggccatgcccgtggccaagaagcccggcagcaccgtgatcgccggcagcatcaaccagaacggcagcctgctgatctgcgccacccacgtgggcgccgacaccaccctgagccagatcgtgaagctggtggaggaggcccagaccagcaaggcccccatccagcagttcgccgacaagctgagcggctacttcgtgcccttcatcgtgttcgtgagcatcgccaccctgctggtgtggatcgtgatcggcttcctgaacttcgagatcgtggagacctacttccccggctacaacagaagcatcagcagaaccgagaccatcatcagattcgccttccaggccagcatcaccgtgctgtgcatcgcctgcccctgcagcctgggcctggccacccccaccgccgtgatggtgggcaccggcgtgggcgcccagaacggcatcctgatcaagggcggcgagcccctggagatggcccacaaggtgaaggtggtggtgttcgacaagaccggcaccatcacccacggcacccccgtggtgaaccaggtgaaggtgctgaccgagagcaacagaatcagccaccacaagatcctggccatcgtgggcaccgccgagagcaacagcgagcaccccctgggcaccgccatcaccaagtactgcaagcaggagctggacaccgagaccctgggcacctgcatcgacttccaggtggtgcccggctgcggcatcagctgcaaggtgaccaacatcgagggcctgctgcacaagaacaactggaacatcgaggacaacaacatcaagaacgccagcctggtgcagatcgacgccagcaacgagcagagcagcaccagcagcagcatgatcatcgacgcccagatcagcaacgccctgaacgcccagcagtacaaggtgctgatcggcaacagagagtggatgatcagaaacggcctggtgatcaacaacgacgtgaacgacttcatgaccgagcacgagagaaagggcagaaccgccgtgctggtggccgtggacgacgagctgtgcggcctgatcgccatcgccgacaccgtgaagcccgaggccgagctggccatccacatcctgaagagcatgggcctggaggtggtgctgatgaccggcgacaacagcaagaccgccagaagcatcgccagccaggtgggcatcaccaaggtgttcgccgaggtgctgcccagccacaaggtggccaaggtgaagcagctgcaggaggagggcaagagagtggccatggtgggcgacggcatcaacgacagccccgccctggccatggccaacgtgggcatcgccatcggcaccggcaccgacgtggccatcgaggccgccgacgtggtgctgatcagaaacgacctgctggacgtggtggccagcatcgacctgagcagagagaccgtgaagagaatcagaatcaacttcgtgttcgccctgatctacaacctggtgggcatccccatcgccgccggcgtgttcatgcccatcggcctggtgctgcagccctggatgggcagcgccgccatggccgccagcagcgtgagcgtggtgctgagcagcctgttcctgaagctgtacagaaagcccacctacgagagctacgagctgcccgccagaagccagatcggccagaagagccccagcgagatcagcgtgcacgtgggcatcgacgacaccagcagaaacagccccaagctgggcctgctggacagaatcgtgaactacagcagagccagcatcaacagcctgctgagcgacaagagaagcctgaacagcgtggtgaccagcgagcccgacaagcacagcctgctggtgggcgacttcagagaggacgacgacaccgccctgtag

SEQ ID NO: 743 - protein, 132 aa, Artificial Sequence
  derived and/or modified sequence
AVQFTGWSSSCILHFPEVLHDFHSLQTLPSLLQRIGNPNETQNNSTSWPVFKSTEQKYLTLNTESTRIMTKLRAQQCRFWTSFFPKVLEMTGNIDEAEWEWKAGFHRWNNYMMDWKNQFNDYTSKKESCVGL

SEQ ID NO: 744 - DNA, 1809 bp, Artificial Sequence
  derived and/or modified sequence
atgcacagtaaggtcactatcatctgtatacggtttcttttctggttcttgctactgtgcatgcttattggcaagtcccatacagaagatgacattataatcgctaccaaaaatggtaaggtccgaggaatgaatctgaccgtcttcggagggacggtgaccgcctttctcggaatcccatatgctcagccccctttaggaaggctgagatttaagaagccccagtccctcactaagtggagcgatatttggaatgcaaccaaatacgccaactcatgttgtcagaacatcgatcagtcatttcccgggttccacggaagtgaaatgtggaatccgaacaccgatttgtccgaagactgcttgtacctgaacgtgtggatcccggcgcccaaacccaagaacgcaacagtacttatttggatatacggcggtggcttccagaccggaacctcctccctgcatgtgtacgatgggaagttcctcgcacgggtggagagggtcatagtggtgtctatgaattaccgagtgggcgctcttggattcctcgctctgcccggtaaccctgaggctccgggaaatatgggcctctttgaccagcaactagctctgcagtgggttcagaagaacatcgctgctttcggcggcaatccaaagtctgtgaccctgttcggagagagcgctggagcagcatctgtcagcctccacctgctgtcccccggatcgcatagtctgtttactcgggctatcttgcagtctgggtcctttaacgcgccctgggcagtgacttccttgtacgaagccagaaaccgaacgctgaacctggccaagttgactggttgttcccgggaaaacgagactgaaattatcaagtgcctgcgcaacaaggatccacaggagattctcctcaacgaagccttcgtcgtaccctacggaacgccactttccgtgaactttggaccaaccgttgacggagacttccttacagacatgcctgacatactgttggagctcggccaattcaaaaaaacacaaattctagtaggcgtcaacaaagacgagggcacagcatttctggtttatggggcacctgggtttagcaaggataataactcaatcatcacaaggaaagaatttcaggaaggactcaaaattttttttcccggcgtgtcggagtttgggaaagaatcaatactcttccactataccgactgggttgacgatcaacggcctgagaattaccgagaagccctcggtgacgtggttggagactacaatttcatttgccccgccctagaatttacaaagaaatttagcgaatggggtaataacgcgtttttctattatttcgagcaccggtcaagcaaattgccttggccggaatggatgggcgttatgcacgggtacgagattgaattcgttttcggattgcctctggagaggcgcgataattacacgaaggcggaagaaatattgagtagatctatcgtcaagcgatgggctaactttgctaagtatggcaatcccaatgaaacacagaataatagcacttcatggcctgtgttcaagtctactgaacagaagtacctcacactcaatacagagagcactcgcataatgaccaagttgcgggctcagcagtgtaggttttggaccagcttttttcccaaggtactggagatgacaggaaacattgatgaagcggagtgggaatggaaggccgggttccatcgctggaacaattatatgatggactggaagaaccagtttaacgactacacatctaaaaaggagtcttgcgtcggcctgtag

SEQ ID NO: 745 - DNA, 399 bp, Artificial Sequence
  derived and/or modified sequence
gcggtacagtttaccggttggtcttcctcttgcattctccacttcccagaagtgctccacgactttcattcactgcagactctcccatctttgttgcagcgaattggaaacccaaacgaaacacaaaataattcaaccagctggccagttttcaaatctacagaacagaaatatctgaccctgaacaccgagtccactcgtatcatgaccaaactgcgtgcgcaacagtgccgattctggacatcattttttccaaaagtactggagatgaccgggaacatcgatgaggccgagtgggaatggaaagcagggtttcatcgctggaacaactacatgatggactggaagaatcaattcaatgattacacttccaagaaagagtcgtgcgtcggactctag

SEQ ID NO: 746 - DNA, 195 bp, Artificial Sequence
  derived and/or modified sequence
atgaccaaactcagagctcaacagtgccggttctggacgagctttttccccaaggtgctggagatgacaggcaacattgacgaagccgaatgggagtggaaggcggggttccaccgatggaacaattatatgatggactggaagaatcagtttaatgattatacttccaaaaaggagtcttgcgtggggctgtag

SEQ ID NO: 747 - DNA, 1809 bp, Artificial Sequence
  derived and/or modified sequence
atgcacagcaaggtgaccatcatctgcatccgcttcctgttctggttcctgctgctgtgcatgctgattggcaagagccacacagaagatgacatcatcatcgccaccaagaatggcaaggtgcggggcatgaacctgactgtgtttggaggcaccgtgacagccttcctgggcatcccctatgcccagccccccctgggccgcctgcgcttcaagaagccccagagcctgaccaagtggagcgacatctggaatgccaccaagtatgccaacagctgctgccagaacatcgaccagagcttccctggcttccacggcagcgagatgtggaaccccaacacagacctgtctgaggactgcctgtacctgaatgtgtggatcccagcccccaagcccaagaatgccaccgtgctgatctggatctacggcggcggcttccagacaggcaccagcagcctgcacgtgtatgatggcaagttcctggcccgggtggagagggtcatcgtggtgtccatgaactacagagtgggcgccctgggcttcctggccctgcccggcaaccctgaggcccctggcaacatgggcctgtttgaccagcagctggccctgcagtgggtgcagaagaacattgctgcctttggaggcaaccccaagtctgtgaccctgtttggagagagcgctggagctgcctctgtgtccctgcacctgctgagccctggcagccacagcctcttcacccgggccatcctgcagagcggcagcttcaatgccccctgggccgtgaccagcctgtatgaggccaggaacagaaccctgaacctggccaagctgaccggctgcagcagagaaaatgaaacagagatcatcaagtgcctgaggaacaaggacccccaggagatcctgctgaatgaggcctttgtggtgccctacggcacccccctgtctgtgaactttggccccaccgtggatggagacttcctgacagacatgccagacatcctgctggagctgggccagttcaagaagacccagatcctggtgggcgtgaacaaggatgagggcacagccttcctggtgtatggagcccctggcttcagcaaggacaacaacagcatcatcaccaggaaggagttccaggagggcctgaagatcttcttccctggggtgtctgaatttgggaaggagagcatcctcttccactacacagactgggtggatgaccagaggcctgagaactaccgggaggccctgggagatgtggtgggggactacaacttcatctgcccagccctggagttcaccaagaagttcagcgagtggggcaacaatgccttcttctactactttgagcacaggagcagcaagctgccctggccagagtggatgggcgtgatgcacggctatgaaattgaatttgtgtttggcctgcccctggagcggcgggacaactacaccaaggccgaggagatcctgagccgcagcatcgtgaagcgctgggccaactttgccaagtatggcaaccccaatgagacccagaacaacagcacctcctggcctgtgttcaagagcacagagcagaagtacctgaccctgaacacagagagcacccgcatcatgaccaagctgcgggcccagcagtgccgcttctggaccagcttcttccccaaggtgctggagatgactggaaatattgatgaagctgagtgggagtggaaggccggcttccaccgctggaacaactacatgatggactggaagaaccagttcaatgactacaccagcaagaaggagagctgtgtgggcctgtag

SEQ ID NO: 748 - DNA, 399 bp, Artificial Sequence
  derived and/or modified sequence
gctgtgcagttcaccggctggagcagcagctgcatcctgcacttccctgaggtgctgcatgacttccacagcctgcagaccctgcccagcctgctgcagagaattggcaaccccaatgagacccagaacaacagcacctcctggcctgtgttcaagagcacagagcagaagtacctgaccctgaacacagagagcacccgcatcatgaccaagctgcgggcccagcagtgccgcttctggaccagcttcttccccaaggtgctggagatgactggaaatattgatgaagctgagtgggagtggaaggccggcttccaccgctggaacaactacatgatggactggaagaaccagttcaatgactacaccagcaagaaggagagctgtgtgggcctgtag

SEQ ID NO: 749 - DNA, 195 bp, Artificial Sequence
  derived and/or modified sequence
atgaccaagctgcgggcccagcagtgccgcttctggaccagcttcttccccaaggtgctggagatgactggaaatattgatgaagctgagtgggagtggaaggccggcttccaccgctggaacaactacatgatggactggaagaaccagttcaatgactacaccagcaagaaggagagctgtgtgggcctgtag

SEQ ID NO: 750 - DNA, 1809 bp, Artificial Sequence
  derived and/or modified sequence
atgcacagcaaggtgaccatcatctgcatccggttcctgttctggttcctgcttctctgcatgctcatcgggaagtcccatactgaggatgatatcattatagccaccaagaatggcaaggtccgagggatgaatttgaccgtctttggaggaacagtaacagccttcctgggcattccctacgcccagccacctcttggaaggctgcgcttcaagaagccccagtcactgactaagtggagcgatatatggaacgctactaaatacgcaaacagctgctgccagaatatcgatcagtcgtttcccggctttcacggcagtgaaatgtggaatccgaacaccgacttgagcgaggactgcttgtatctgaacgtgtggattccggccccaaaacctaaaaacgccacggtgctgatctggatctacggcgggggtttccagacaggaacttcctctctccatgtttatgatggcaagttcttagcgcgcgtcgagcgagtgatagtggtcagtatgaattatagggtgggtgcactgggtttcctggcccttccaggcaaccctgaggcccccggaaatatgggtctatttgatcaacagctggctctgcagtgggtgcagaaaaatatcgccgcctttggcggaaatcctaaatcggtcacgctattcggcgaatctgcgggcgctgccagcgtaagtctgcatctgctctcacctgggagccatagcctctttacccgggctattcttcagtccggatcttttaacgcgccatgggccgtgacctccctctatgaagcccggaatcggactctaaacctggccaagcttaccgggtgcagcagggaaaacgagacagagatcattaagtgccttaggaataaggacccccaagagatcctcttgaatgaggcatttgtcgtgccttatggtacccccctcagtgtcaacttcggcccaactgttgatggcgactttctgacagatatgcccgacatattgttggagctgggccagttcaaaaaaacacagattctagttggcgtaaacaaagacgaggggaccgctttcctggtatatggagcgccaggtttctctaaagacaataatagtattatcacccggaaagaatttcaagaaggtctcaagatattctttccgggagtcagtgaatttgggaaggagtccatactctttcactatacggattgggttgatgaccagcgtcccgagaattatagagaagccctgggcgatgtcgtgggcgattataactttatttgccccgctctggaatttaccaagaagttcagcgaatggggaaacaatgccttcttttactattttgaacaccgaagtagcaagctgccatggcctgaatggatgggggtcatgcacggctacgaaattgagttcgttttcggcttgcccctggagagacgtgataactacactaaggcagaggagattctatcgagatccattgtgaaacgctgggcaaatttcgccaaatacggcaaccctaatgaaactcagaataatagcacctcatggcccgtgttcaaatcaactgaacagaaatatctcactcttaatacagagtccactcggattatgaccaaactaagagcccagcagtgccgtttctggacgtccttctttcccaaggtgcttgagatgacgggaaacatcgacgaggcagagtgggagtggaaggctggttttcaccggtggaataactacatgatggactggaaaaatcagttcaacgactacacatccaagaaagaatcttgtgttggactgtag

SEQ ID NO: 751 - DNA, 399 bp, Artificial Sequence
  derived and/or modified sequence
gccgtgcagttcaccggctggagcagcagctgcatcctgcacttcccagaggtcctgcacgactttcactcacttcagaccctgccgtcacttctccagcgcattggaaacccaaacgagacacagaacaactccacgtcctggcccgtttttaagtctactgagcagaagtatttaacactcaacacagagtccacccgcatcatgacaaaactgagggcacagcagtgccgattctggacatcctttttcccgaaggtgctggagatgacaggaaatattgacgaggccgagtgggagtggaaggcgggatttcaccggtggaataattatatgatggactggaagaaccaattcaacgactataccagcaaaaaggaatcttgtgttggactgtag

SEQ ID NO: 752 - DNA, 195 bp, Artificial Sequence
  derived and/or modified sequence
atgaccaagctgcgggcccagcagtgccggttctggaccagcttcttccccaaggtactcgaaatgacaggaaacatcgacgaagcggagtgggagtggaaagcaggctttcacaggtggaacaactacatgatggactggaagaaccagtttaatgattacactagtaaaaaagagtcttgcgtcgggctgtag

SEQ ID NO: 753 - DNA, 1809 bp, Artificial Sequence
  derived and/or modified sequence
atgcattccaaggtgacaattatttgtatacggttcctgttttggtttctgttgctctgcatgttgataggcaaaagccataccgaagatgacataattattgccacaaagaacggcaaggttagggggatgaatttaactgtgtttggaggaaccgtcaccgcgtttcttggcattccatatgcccagcccccactggggcgactacggttcaaaaagccccagagtctcacgaaatggagcgatatttggaatgccactaagtacgccaacagttgttgccagaacattgaccaaagcttcccaggctttcacggctccgagatgtggaaccctaataccgacctcagcgaggattgcttgtatttgaatgtctggatccccgctccaaagccaaaaaatgccaccgtgcttatctggatctacggaggcggttttcagacaggaacgtcaagcctgcatgtgtatgacggtaaattcctggcacgtgtcgaaagggttattgtagtctccatgaactacagggtcggtgcactgggtttcctcgctctgccagggaatcctgaagccccaggtaatatggggctatttgaccagcaactcgccttgcagtgggtccagaaaaatatcgcggcatttgggggaaatcccaagtctgtgacattgtttggggaatctgccggtgcagcgtcggtctcattacacctgttgtctcccggttctcattcacttttcaccagggcaatactacaaagtgggtcctttaatgcaccctgggccgtgacatccctttatgaagctagaaaccggacgcttaatttggctaagttgacaggctgtagtcgcgagaacgaaacggaaataattaaatgtttgcgaaataaagacccccaggaaattctgctaaacgaggcgtttgtcgtcccttacggcacacccctttctgtgaactttggccctaccgtggacggcgatttcctaactgacatgcctgacatcctgttggaactgggccagttcaaaaaaacccagattctcgtcggagtaaataaggacgaaggcaccgcctttttggtctacggtgcccctggattttccaaggataataattccatcattactagaaaggagtttcaagaggggctgaaaattttcttcccaggggtgagcgaattcgggaaggaatcgatcctgttccattacactgattgggtcgatgatcagcggccagaaaactaccgcgaagcgttgggggacgtagtaggagattataattttatatgtccagctttggagttcaccaaaaaattttcagagtggggtaacaatgccttcttttactattttgaacatagatcatccaaattgccctggcctgagtggatgggcgttatgcatggatacgagatagaatttgttttcgggctaccgctggagagaagggataactacaccaaagcggaggagatcttgtctcgatctattgtgaaaaggtgggccaatttcgcaaaatacggcaaccctaacgagactcagaataatagcacttcttggcctgtctttaagtctacagaacagaaatatttgactttgaatacagagtctacgcggattatgacaaagctgcgcgctcagcagtgtcgtttctggacctcgttcttccctaaggtactggaaatgacagggaacatcgatgaggccgagtgggagtggaaagcgggatttcaccggtggaataactacatgatggactggaaaaatcaattcaatgactatacctctaaaaaagagtcctgcgtcggcctgtag

SEQ ID NO: 754 - DNA, 399 bp, Artificial Sequence
  derived and/or modified sequence
gcagtgcagttcaccggctggtcgtcatcctgcatcttgcattttcctgaagtgttgcacgatttccacagcctgcagacactgccatcgctgctacagcggattgggaacccaaatgagacacagaataatagcacatcttggccagtcttcaagagtacggagcagaaatacctgaccttaaacacagaatctacaaggatcatgaccaaactgcgggcacagcagtgtcgcttttggactagcttttttccaaaagtattggaaatgaccggaaatatcgacgaggctgaatgggagtggaaggccggattccatcgctggaacaactacatgatggactggaagaatcagttcaacgattacactagcaaaaaggaaagctgtgtagggctgtag

SEQ ID NO: 755 - DNA, 195 bp, Artificial Sequence
  derived and/or modified sequence
atgaccaagctccgcgctcagcagtgccggttctggactagcttttttccaaaagttctggaaatgaccggtaacatcgacgaagctgaatgggaatggaaagctggattccatcgatggaataactacatgatggattggaagaatcagttcaacgactatacgtccaagaaggaatcttgcgtagggctctag

SEQ ID NO: 756 - DNA, 1809 bp, Artificial Sequence
  derived and/or modified sequence
atgcactccaaggttacgatcatttgtattaggtttttgttttggtttctgctcctgtgtatgctgatcgggaaatcccatacagaagacgacatcattatcgccacgaaaaacggcaaagtccgggggatgaatctgacagtctttggtggtaccgtgactgcgttcctcggaataccgtacgcccagccccccttgggccggctccgattcaagaagccccagtccctgactaaatggagcgatatctggaacgccactaagtacgcgaacagctgctgccagaatatcgatcagtccttcccgggctttcatggaagtgagatgtggaatcctaatactgacctttccgaggactgtctgtacctgaacgtatggatacccgcaccgaaacccaagaacgctactgtcttaatttggatttacggcgggggatttcagaccggcacaagctcactccatgtatacgatggaaaatttctggccagggtggaacgtgtgattgttgtttccatgaactacagggtaggagctctaggctttctcgcccttcccgggaatcccgaggcccccggaaatatgggtctgttcgatcagcagcttgcactgcagtgggtgcaaaagaacatcgctgcgtttggagggaatccaaagtccgttactctgtttggagagagtgccggagcagcctctgtgagcttgcacctgctctccccaggcagccactccctgtttacccgggccattctccagagcggatcctttaacgcgccttgggctgtgactagtttgtatgaagcccggaaccgcaccctgaacctcgcgaagttaactggctgtagccgcgagaacgagactgaaatcatcaaatgtctgaggaacaaagaccctcaagagattttactcaatgaagctttcgtggtgccttatggcacacccctgtctgtcaattttggacctacagtcgatggcgatttcctaactgacatgcctgatatcttactcgagctggggcagttcaagaagacacaaatccttgttggtgtgaacaaggacgaaggcactgctttcttggtgtacggcgcaccgggcttctccaaagataacaacagcatcataactagaaaggaatttcaggaaggcctcaaaatattttttccaggagtatctgaattcggaaaagagtccatcttattccactatactgattgggtcgatgaccaacgtccagaaaattaccgagaggcattaggcgacgtcgtcggggattacaattttatttgtcccgccttggagttcacaaagaagttctctgaatggggaaacaatgcattcttttactattttgagcataggtcgagcaaactcccatggccagaatggatgggcgttatgcacgggtacgaaattgaatttgtctttggcttgccattggaaaggcgggacaactataccaaggctgaggagatcctatccagatcaatcgtcaagagatgggctaactttgccaaatatggcaacccaaacgagacccagaacaatagcacgagctggcccgtatttaagtccacagaacagaaatacctaacactgaataccgagtctacaaggataatgaccaagctcagggctcaacaatgcaggttttggacgagtttctttccaaaggtactggagatgacgggaaatattgacgaagcagagtgggaatggaaggctggtttccacagatggaataattacatgatggactggaagaatcagtttaatgactacacaagcaaaaaggaatcatgtgtcggactgtag

SEQ ID NO: 757 - DNA, 399 bp, Artificial Sequence
  derived and/or modified sequence
gccgtccaattcacaggctggagctcatcctgcattttacactttcctgaagtcctgcatgattttcacagcttgcagaccctgcctagtctcctccaaagaataggcaaccctaacgagacgcagaataattctacatcctggcccgtatttaaatccactgaacagaaatacctgaccttgaatactgagagcactcgcattatgacaaaactccgcgcacagcaatgccgattctggacaagtttctttcccaaagttctggagatgacagggaacatcgatgaggccgaatgggagtggaaggcgggtttccaccggtggaacaactacatgatggattggaaaaaccagtttaatgattatacctcaaaaaaagagagctgtgtggggctctag

SEQ ID NO: 758 - DNA, 195 bp, Artificial Sequence
  derived and/or modified sequence
atgacaaagctgagagcgcaacagtgccgtttctggacttcgttctttcctaaagttcttgagatgaccggaaatatagacgaggcagaatgggaatggaaagccgggtttcaccgatggaacaattatatgatggactggaaaaatcagttcaacgactacactagcaaaaaggagagctgcgtaggactctag

SEQ ID NO: 759 - DNA, 1809 bp, Artificial Sequence
  derived and/or modified sequence
atgcactccaaagtaacaataatctgtatcagattccttttttggttcctgcttctgtgtatgctcatcgggaaaagtcataccgaggacgacatcatcattgcaacgaagaatggcaaggtgaggggaatgaatcttacagtttttggcggcacagtgacagcttttctgggcataccttacgcacaaccacccctgggacggctcagatttaaaaaacctcagtccttgaccaagtggtcagacatctggaacgctactaaatacgctaatagttgctgccaaaacatcgaccagtcgttcccgggctttcatggaagtgagatgtggaatcctaatactgacctttccgaggactgtctgtacctgaacgtatggatacccgcaccgaaacccaagaacgctactgtcttaatttggatttacggcgggggatttcagaccggcacaagctcactccatgtatacgatggaaaatttctggccagggtggaacgtgtgattgttgtttccatgaactacagggtaggagctctaggctttctcgcccttcccgggaatcccgaggcccccggaaatatgggtctgttcgatcagcagctggctctgcagtgggtccagaagaacattgcagcttttggtggcaacccaaagtcagtaaccctttttggtgagtcagccggggcggcgtccgtttccctccatttgctatcccctggcagtcatagcctgtttacccgcgcaatcttgcagtctgggtcatttaacgctccttgggccgtaacctcactatacgaagcccgcaacagaacacttaacctcgcaaaactgacgggatgcagtagggaaaatgaaaccgaaatcattaaatgcctccgaaataaggatccccaggagattctgctgaatgaagcttttgtcgtgccctacggaacccctcttagcgtaaacttcggaccaacagtagacggagatttcttaacagacatgcccgacatccttctggagcttggccagtttaaaaaaactcagatcctagtcggagtaaataaagacgaagggacagccttcttggtgtatggcgcaccaggcttctctaaggataataactccatcataaccagaaaagagttccaggaaggcctgaagatcttctttcccggcgtgtctgaattcggaaaagaaagcatcctatttcactacacagattgggtggatgaccaaaggccagagaattatcgagaagcactcggcgacgtggtgggcgattacaactttatctgtccagctctagaattcaccaagaaatttagcgaatgggggaacaacgcctttttttactactttgagcaccgtagctccaagcttccctggcctgagtggatgggagtcatgcatggatacgaaattgagttcgttttcggattgcccctagagagacgagacaactacaccaaggctgaggaaattctctccagaagtattgtaaagaggtgggcgaactttgccaaatatggcaacccaaacgagacccagaacaatagcacgagctggcccgtatttaagtccacagaacagaaatacctaacactgaataccgagtctacaaggataatgaccaagctcagggctcaacaatgcaggttttggacgagtttctttccaaaggtactggagatgacgggaaatattgacgaagcagagtgggaatggaaggctggtttccacagatggaataattacatgatggactggaagaatcagtttaatgactacacaagcaaaaaggaatcatgtgtcggactctag

SEQ ID NO: 760 - DNA, 399 bp, Artificial Sequence
  derived and/or modified sequence
gccgtccaattcacaggctggagctcatcctgcattttacactttcctgaagtcctgcatgattttcacagcttgcagaccctgcctagtctcctccaaagaataggcaaccctaacgagacgcagaataattctacatcctggcccgtatttaaatccactgaacagaaatacctgaccttgaatactgagagcactcgcattatgacaaaactccgcgcacagcaatgccgattctggacaagtttctttcccaaagttctggagatgacagggaacatcgatgaggccgaatgggagtggaaagctgggtttcacagatggaacaattatatgatggactggaagaatcaattcaatgactacacatccaaaaaggaaagttgcgttggcttgtag

SEQ ID NO: 761 - DNA, 702 bp, Artificial Sequence
  derived and/or modified sequence
gcagtccaatttacaggctggagcagcagctgcatcctgcatttccccgaagtattacatgattttcactccttgcaaactttgccatctttgttgcagagaatcgggaatccaaatgagactcagaacaatagcacaagctggcctgtcttcaaaagcactgaacaaaaatatctaaccttgaatacagagtcaacaagaataatgacgaaactacgtgctcaacaatgtcgattctggacatcattttttccaaaagtcttggaaatgacaggaaatattgatgaagcagaatgggagtggaaagcaggattccatcgctggaacaattacatgatggactggaaaaatcaatttaacgattacactagcaagaaagaaagttgtgtgggtctctaattaatagatttaccctttatagaacatattttcctttagatcaaggcaaaaatatcaggagcttttttacacacctactaaaaaagttattatgtagctgaaacaaaaatgccagaaggataatattgattcctcacatctttaacttagtattttacctagcatttcaaaacccaaatggctagaacgtgtttaattaaatttcacaatataaagttctacagttaattatgtgcatattaaaacaatggcctggttcaatttctttctttccttaataaatttaagtttttccccccaaaa

SEQ ID NO: 762 - DNA, 697 bp, Artificial Sequence
  derived and/or modified sequence
gcagtccaatttacaggctggagcagcagctgcatcctgcatttccccgaagtattacatgattttcactccttgcaaactttgccatctttgttgcagagaatcgggaatccaaatgagactcagaacaatagcacaagctggcctgtcttcaaaagcactgaacaaaaatatctaaccttgaatacagagtcaacaagaataatgacgaaactacgtgctcaacaatgtcgattctggacatcattttttccaaaagtcttggaaatgacaggaaatattgatgaagcagaatgggagtggaaagcaggattccatcgctggaacaattacatgatggactggaaaaatcaatttaacgattacactagcaagaaagaaagttgtgtgggtctctaattaatagatttaccctttatagaacatattttcctttagatcaaggcaaaaatatcaggagcttttttacacacctactaaaaaagttattatgtagctgaaacaaaaatgccagaaggataatattgattcctcacatctttaacttagtattttacctagcatttcaaaacccaaatggctagaacgtgtttaattaaatttcacaatataaagttctacagttaattatgtgcatattaaaacaatggcctggttcaatttctttctttccttaataaatttaagtttttccccc

SEQ ID NO: 763 - DNA, 1809 bp, Artificial Sequence
  derived and/or modified sequence
atgcacagcaaggtgaccatcatctgcatcagattcctgttctggttcctgctgctgtgcatgctgatcggcaagagccacaccgaggacgacatcatcatcgccaccaagaacggcaaggtgagaggcatgaacctgaccgtgttcggcggcaccgtgaccgccttcctgggcatcccctacgcccagccccccctgggcagactgagattcaagaagccccagagcctgaccaagtggagcgacatctggaacgccaccaagtacgccaacagctgctgccagaacatcgaccagagcttccccggcttccacggcagcgagatgtggaaccccaacaccgacctgagcgaggactgcctgtacctgaacgtgtggatccccgcccccaagcccaagaacgccaccgtgctgatctggatctacggcggcggcttccagaccggcaccagcagcctgcacgtgtacgacggcaagttcctggccagagtggagagagtgatcgtggtgagcatgaactacagagtgggcgccctgggcttcctggccctgcccggcaaccccgaggcccccggcaacatgggcctgttcgaccagcagctggccctgcagtgggtgcagaagaacatcgccgccttcggcggcaaccccaagagcgtgaccctgttcggcgagagcgccggcgccgccagcgtgagcctgcacctgctgagccccggcagccacagcctgttcaccagagccatcctgcagagcggcagcttcaacgccccctgggccgtgaccagcctgtacgaggccagaaacagaaccctgaacctggccaagctgaccggctgcagcagagagaacgagaccgagatcatcaagtgcctgagaaacaaggacccccaggagatcctgctgaacgaggccttcgtggtgccctacggcacccccctgagcgtgaacttcggccccaccgtggacggcgacttcctgaccgacatgcccgacatcctgctggagctgggccagttcaagaagacccagatcctggtgggcgtgaacaaggacgagggcaccgccttcctggtgtacggcgcccccggcttcagcaaggacaacaacagcatcatcaccagaaaggagttccaggagggcctgaagatcttcttccccggcgtgagcgagttcggcaaggagagcatcctgttccactacaccgactgggtggacgaccagagacccgagaactacagagaggccctgggcgacgtggtgggcgactacaacttcatctgccccgccctggagttcaccaagaagttcagcgagtggggcaacaacgccttcttctactacttcgagcacagaagcagcaagctgccctggcccgagtggatgggcgtgatgcacggctacgagatcgagttcgtgttcggcctgcccctggagagaagagacaactacaccaaggccgaggagatcctgagcagaagcatcgtgaagagatgggccaacttcgccaagtacggcaaccccaacgagacccagaacaacagcaccagctggcccgtgttcaagagcaccgagcagaagtacctgaccctgaacaccgagagcaccagaatcatgaccaagctgagagcccagcagtgcagattctggaccagcttcttccccaaggtgctggagatgaccggcaacatcgacgaggccgagtgggagtggaaggccggcttccacagatggaacaactacatgatggactggaagaaccagttcaacgactacaccagcaagaaggagagctgcgtgggcctgtag

SEQ ID NO: 764 - DNA, 399 bp, Artificial Sequence
  derived and/or modified sequence
gccgtgcagttcaccggctggagcagcagctgcatcctgcacttccccgaggtgctgcacgacttccacagcctgcagaccctgcccagcctgctgcagagaatcggcaaccccaacgagacccagaacaacagcaccagctggcccgtgttcaagagcaccgagcagaagtacctgaccctgaacaccgagagcaccagaatcatgaccaagctgagagcccagcagtgcagattctggaccagcttcttccccaaggtgctggagatgaccggcaacatcgacgaggccgagtgggagtggaaggccggcttccacagatggaacaactacatgatggactggaagaaccagttcaacgactacaccagcaagaaggagagctgcgtgggcctgtag

SEQ ID NO: 765 - DNA, 195 bp, Artificial Sequence
  derived and/or modified sequence
atgaccaagctgagagcccagcagtgcagattctggaccagcttcttccccaaggtgctggagatgaccggcaacatcgacgaggccgagtgggagtggaaggccggcttccacagatggaacaactacatgatggactggaagaaccagttcaacgactacaccagcaagaaggagagctgcgtgggcctgtag

SEQ ID NO: 766 - RNA, 195 nt, Artificial Sequence
  derived and/or modified sequence
augacaaagcugagagcgcaacagugccguuucuggacuucguucuuuccuaaaguucuugagaugaccggaaauauagacgaggcagaaugggaauggaaagccggguuucaccgauggaacaauuauaugauggacuggaaaaaucaguucaacgacuacacuagcaaaaaggagagcugcguaggacucuag

SEQ ID NO: 767 - protein, 392 aa, Artificial Sequence
  derived and/or modified sequence
MAVVAAAAGWLLRLRAAGAEGHWRRLPGAGLARGFLHPAATVEDAAQRRQVAHFTFQPDPEPREYGQTQKMNLFQSVTSALDNSLAKDPTAVIFGEDVAFGGVFRCTVGLRDKYGKDRVFNTPLCEQGIVGFGIGIAVTGATAIAEIQFADYIFPAFDQIVNEAAKYRYRSGDLFNCGSLTIRSPWGCVGHGALYHSQSPEAFFAHCPGIKVVIPRSPFQAKGLLLSCIEDKNPCIFFEPKILYRAAAEEVPIEPYNIPLSQAEVIQEGSDVTLVAWGTQVHVIREVASMAKEKLGVSCEVIDLRTIIPWDVDTICKSVIKTGRLLISHEAPLTGGFASEISSTVQEECFLNLEAPISRVCGYDTPFPHIFEPFYIPDKWKCYDALRKMINY

SEQ ID NO: 768 - protein, 322 aa, Artificial Sequence
  derived and/or modified sequence
MNLFQSVTSALDNSLAKDPTAVIFGEDVAFGGVFRCTVGLRDKYGKDRVFNTPLCEQGIVGFGIGIAVTGATAIAEIQFADYIFPAFDQIVNEAAKYRYRSGDLFNCGSLTIRSPWGCVGHGALYHSQSPEAFFAHCPGIKVVIPRSPFQAKGLLLSCIEDKNPCIFFEPKILYRAAAEEVPIEPYNIPLSQAEVIQEGSDVTLVAWGTQVHVIREVASMAKEKLGVSCEVIDLRTIIPWDVDTICKSVIKTGRLLISHEAPLTGGFASEISSTVQEECFLNLEAPISRVCGYDTPFPHIFEPFYIPDKWKCYDALRKMINY

SEQ ID NO: 769 - DNA, 1179 bp, Artificial Sequence
  derived and/or modified sequence
atggctgtggttgctgccgccgctggatggcttctgaggctccgtgctgcaggagcggaaggccactggcgtagactacctggagcagggctggcgcgtggattcctacacccagctgccacggtcgaggatgccgctcagaggaggcaggtggcccactttactttccagccagaccctgaaccccgagagtacggccaaactcaaaagatgaacctgttccagagtgtgacctccgcccttgacaattcattggctaaggacccaactgcagttatcttcggcgaagatgtagctttcggcggggtgttcaggtgtacggtgggcttgcgtgacaaatacggcaaggatagggtctttaatacacccctgtgcgagcagggaatagtggggtttggcattgggattgcggtcactggtgctactgcgatcgcagaaatccagtttgcggactatatattccctgcgttcgaccagattgttaacgaagccgcgaaatatcgctatcgctccggcgatctatttaactgtgggagcctcactatccgttctccttgggggtgcgttgggcacggggcactataccactcccaaagccccgaagcgttttttgcacattgccccgggatcaaggtcgtcatcccaaggagcccattccaagcgaagggcttgctcctgtcttgtatcgaggacaaaaacccgtgcatcttcttcgaacctaagatcctctatcgtgctgccgcagaggaagtgcctattgagccctataatattcctctgtctcaggctgaagtgatccaagagggaagtgacgtcactctggttgcctggggcacgcaggtgcacgttataagagaagtggcctctatggcaaaggaaaagcttggagtgagttgcgaggtgatagatctccgcacgatcatcccctgggatgtagacactatctgcaagagcgtgatcaaaacgggtcgcctcctcattagtcacgaggcgcctctgacgggcgggttcgctagcgagattagctccaccgtccaggaagagtgctttctgaatttagaggccccgatatcaagggtatgtggctacgacactccattcccccatatatttgaacctttctacatccctgacaaatggaaatgttacgacgcactgagaaaaatgatcaattattag

SEQ ID NO: 770 - DNA, 1179 bp, Artificial Sequence
  derived and/or modified sequence
atggcagtcgtggccgccgcagccggctggcttctgcggctgcgtgctgccggtgccgaaggccattggcggcgcctaccaggcgcgggcctcgcacgcggctttctgcatcccgctgctacagtcgaagatgcagcccagaggcgccaagtggctcacttcaccttccagcctgatccagaaccccgtgaatatggccagacccagaaaatgaacctgtttcagtccgtcacctctgccctcgacaattcgctggcaaaggatcctacagccgttatctttggggaagacgttgcttttggcggcgtgtttaggtgcacagtgggattaagagataagtatggcaaggatcgcgttttcaacactcccttgtgtgagcagggaatagtaggttttggaattgggattgcggttaccggggctacggccatagctgagatccagtttgccgactatatctttcccgccttcgatcagatcgtgaatgaagcggcaaagtaccgttacaggtccggcgatttattcaattgtggctctctgacaatcaggtctccctggggctgtgtgggccacggtgctctgtatcattcacagtccccagaggcattctttgcgcattgccccggtatcaaggtcgtgattccaagatctccctttcaggctaaaggcttgctcctgagttgtatcgaagacaagaatccctgtattttctttgaacccaagatactctatagggcagcagcagaagaggttccaatcgaaccctacaacattccactgagccaggccgaggttatccaggagggtagcgacgtcacattagtggcatggggcacacaagtacatgtgatcagagaggtcgcaagcatggcaaaagagaaattgggcgtgtcttgtgaagtcattgacctgaggacaataatcccctgggatgtggatacaatatgtaagagcgtaataaagactggtaggttgctaatctctcatgaggccccactgaccggagggtttgcctctgagatttcaagcacggtgcaggaggaatgcttcctgaatctcgaagctccaatcagccgggtgtgtggctatgatacgccattcccgcacattttcgagcccttctatatccctgacaagtggaagtgttatgacgcactccgcaaaatgattaattattag

SEQ ID NO: 771 - DNA, 1179 bp, Artificial Sequence
  derived and/or modified sequence
atggctgtggtggccgctgctgctggctggctgctgcggctgcgggctgctggagctgagggccactggaggcggctgcctggagctggcctggcccggggcttcctgcaccctgctgccaccgtggaggatgctgcccagaggcggcaggtggcccacttcaccttccagcctgaccctgagccccgggagtatggccagacccagaagatgaacctcttccagagcgtgaccagcgccctggacaacagcctggccaaggaccccacagctgtgatctttggagaagatgtggccttcggcggcgtcttccgctgcaccgtgggcctgcgggacaagtatggcaaggacagagtcttcaacacccccctgtgtgagcagggcatcgtgggcttcggcatcggcattgctgtgactggagccacagccatcgccgagatccagtttgctgactacatcttccctgcctttgaccagatcgtgaatgaggccgccaagtaccgctacagaagtggggacctcttcaactgtggcagcctgaccatccgcagcccctggggctgtgtgggccatggagccctgtaccacagccagagccctgaggccttctttgcccactgccccggcatcaaggtggtgatccccaggagccccttccaggccaagggcctgctgctgagctgcatcgaggacaagaacccctgcatcttctttgagcccaagatcctgtacagagctgctgctgaggaggtgcccatcgagccctacaacatccccctgagccaggccgaggtgatccaggagggcagtgatgtgaccctggtggcctggggcacccaggtgcacgtgatccgggaggtggcctccatggccaaggagaagctgggcgtgtcctgtgaggtgattgacctgcggaccatcatcccctgggatgtggacaccatctgcaagagcgtcatcaagacaggccgcctgctgatcagccatgaggcccccctgaccggcggctttgccagcgagatcagcagcacagtgcaggaggagtgcttcctgaacctggaggcccccatcagccgggtgtgtggctatgacacccccttcccccacatctttgagcccttctacatcccagacaagtggaagtgctatgatgccctgaggaagatgatcaactactag

SEQ ID NO: 772 - DNA, 1179 bp, Artificial Sequence
  derived and/or modified sequence
atggccgtggtggccgccgccgccggctggctgctgcggctgcgggccgctggcgccgagggccactggcgccggctcccaggcgccggactagctaggggctttctgcacccggctgcaaccgtcgaagatgccgctcagcgccggcaggtggcccatttcacgtttcagcccgatcctgaaccgagagagtatggacagactcagaaaatgaacctattccagtcagtgacatcagctttggacaactccctggccaaagatccgacggccgtgatctttggcgaggacgtagcattcggcggagtgtttcgatgcactgtgggactcagggacaaatacggcaaagacagagttttcaacacaccactttgcgaacagggcatcgtgggtttcggcatcggaatagctgtcaccggtgcaactgctatagcagagatccagtttgcggactatatcttccccgcattcgatcaaattgtcaacgaggctgccaaatatcggtatcggtctggcgacctgttcaactgtggctccctgaccattaggagcccttgggggtgcgtcgggcatggggctttgtaccactctcagagtcctgaagcttttttcgcccactgccctgggattaaggtagtgattccccgatcaccttttcaggccaaagggttgctgctatcttgtattgaggataaaaacccctgcattttctttgaaccgaagattttgtacagagcggcagcagaggaagtgcccattgagccctacaacatcccattgagccaggctgaggtgatacaggaaggctccgatgtcaccctggttgcttggggcacacaagtccatgttatccgagaggtcgccagcatggccaaagagaagctgggcgtgtcctgtgaggtgatagacctccgtacaataatcccctgggacgtggatacgatctgcaaatccgtcatcaaaactggtcgtctcctgattagtcacgaggctcctctgaccggtggcttcgcatctgagatcagcagtaccgtgcaggaagagtgtttcctcaacctggaggcaccaatctcacgtgtgtgtggatacgacactccctttcctcatatcttcgagcctttctacattcccgataaatggaagtgttatgacgccctgcgtaagatgattaactactag

SEQ ID NO: 773 - DNA, 1179 bp, Artificial Sequence
  derived and/or modified sequence
atggccgtggtggccgccgccgccggctggctgctgcggctgcgggccgcgggcgccgagggacactggaggcgtctgcccggagctggtctcgcacggggcttcctgcatcctgccgccactgtagaggatgcagcgcagcggcgacaggtagctcactttacattccagccagatcctgaaccacgcgaatacggccaaacacagaagatgaatctgtttcaaagcgtcacctcagcactggacaactccctggcaaaggacccaacggctgtgatatttggcgaagatgtggcctttggaggagtgtttcgctgcaccgtcggcctgcgggacaaatacggaaaagatagggtgttcaacacaccactctgcgagcaaggtattgtcgggtttggtatcggaatcgccgtgactggggcaaccgccattgcggagatccaatttgcagactacatcttcccggcgttcgaccagatcgtgaacgaagctgccaaatacagataccgaagcggggacctgttcaattgcggatccctcaccatccgcagcccatggggatgcgttggccacggcgctctgtaccactcacagtccccagaggcattctttgctcactgccccggaatcaaagtggtaatccccagaagcccattccaggctaaaggtttactgctgagctgtatcgaagataaaaatccctgcattttctttgaacccaagatcctgtatcgggctgcggccgaggaagtccctatcgagccttataacattccactcagtcaggcagaggtcatacaagaggggagcgatgtaacactagtggcctgggggacccaggttcatgtcatacgtgaggtggcgagcatggccaaggagaagctgggggtgtcttgcgaggttatcgatctgaggacaattatcccatgggacgtcgacacgatctgcaagagtgtgataaagactgggcgcctgcttatctctcacgaggcgccgctgaccggaggatttgccagcgaaatttccagcactgttcaagaggaatgcttcctgaacctcgaagcgcctatatcaagagtttgcgggtatgatactcccttcccacacatctttgagccattttacatccccgacaagtggaaatgctatgacgccctgaggaagatgatcaactactag

SEQ ID NO: 774 - DNA, 1179 bp, Artificial Sequence
  derived and/or modified sequence
atggcggtggtggctgccgctgccggttggctcctgaggctgagggcggctggagccgaggggcactggcgacgcctgcctggagcgggactagccagaggattccttcatccagccgcaaccgtggaggatgcagcccagagacggcaggtagctcactttaccttccagcctgaccctgagccgcgagagtacggacaaacccaaaagatgaacctgtttcaatccgtgacttccgccctggataattcactcgctaaggatccgaccgcagtcatctttggggaggatgtggccttcggtggtgtattcagatgtactgtgggtctacgcgataagtatggcaaggacagagtatttaatacgccattatgtgaacaaggaattgtcggatttgggataggtatcgcagttaccggcgctacggcgattgcggaaattcagtttgccgactacatattccctgcttttgatcagatcgttaatgaagcggctaagtatcgctatagatccggcgacttgtttaactgcggctctctgactatcaggagcccatggggatgtgtgggccacggtgctctctatcatagtcagtctcccgaggcttttttcgctcactgcccaggtatcaaagtcgtcattcctagaagtcccttccaagctaaggggctcctcctgagctgcatagaagacaagaatccctgcattttctttgagccaaagatcctgtacagagccgctgccgaagaggttcccatcgagccgtataatatcccattatcccaggcagaggtgatccaagaaggcagcgatgtaactcttgtggcttgggggacacaagtacacgttattcgggaggttgcctcaatggctaaagaaaagctcggagtcagctgcgaagtgattgatctgagaaccatcatcccatgggatgtggatacaatctgtaagtccgtgatcaaaaccgggcgactgctgatatctcacgaggcaccactaacaggcggttttgctagcgaaatttccagcacagtgcaggaggagtgctttcttaatctcgaagcccctataagtcgtgtatgcggatatgatactcccttccctcatattttcgagccattttacattccggataagtggaaatgttacgatgcgctgaggaagatgatcaactattag

SEQ ID NO: 775 - DNA, 1179 bp, Artificial Sequence
  derived and/or modified sequence
atggccgtagttgccgctgccgctggttggctgcttaggcttcgtgctgcaggcgctgagggccactggcggcgactcccgggagccggattggccagaggcttcctgcacccggctgcaactgtggaggacgccgctcagcgacgccaggtggctcactttaccttccagccagaccctgagcccagggaatatgggcaaacacaaaagatgaacttgtttcagtcagtaacaagcgctctggataattctcttgccaaggatcccactgccgtcattttcggggaggatgtggcgttcggaggggtctttaggtgtactgttgggctgcgtgataaatacgggaaggaccgggtgttcaatacccccttatgcgagcagggcattgtgggatttgggatcggaatcgccgtaaccggcgctaccgcaattgccgaaatccaatttgctgactacattttccccgctttcgaccagatcgttaacgaagctgctaaatacaggtacagatccggtgaccttttcaactgcgggtctctcaccatcaggtcgccctggggatgcgtcggccatggcgcactgtaccactcccagtccccagaggcctttttcgcgcattgcccaggcattaaagtagtcatacctcgctctccattccaagcgaaaggtctgcttttgtcttgcatagaagacaagaatccatgcatcttcttcgagcccaaaattctctaccgagcagccgctgaggaggtccctatagaaccgtataatatccccctgtcccaagcagaggtgatccaggaagggagtgacgtcaccctggtggcctggggcacacaggtgcacgtgatcagagaggttgcatctatggcgaaagagaaattgggcgtgagttgtgaggtaattgacctacgcacaatcataccatgggatgtagatactatctgtaagagtgtgattaaaaccggtaggctgttaatatctcatgaagcccctctcaccgggggatttgcctcggagattagctccaccgtgcaggaagagtgtttcctaaacttagaagccccaatatcccgggtctgtgggtatgatacacccttcccccacatctttgagcccttctatatccccgataagtggaagtgctacgacgctctaaggaaaatgatcaactattag

SEQ ID NO: 776 - DNA, 3676 bp, Artificial Sequence
  derived and/or modified sequence
aggcggcgtgcggctgcatagcctgagaatcccggtggtgagcggggatggcggttgtagcggcggctgccggctggctactcaggctcagggcggcaggggctgaggggcactggcgtcggcttcctggcgcggggctggcgcggggctttttgcaccccgccgcgactgtcgaggatgcggcccagaggcggcaggtggctcattttactttccagccagatccggagccccgggagtacgggcaaactcagaaaatgaatcttttccagtctgtaacaagtgccttggataactcattggccaaagatcctactgcagtaatatttggtgaagatgttgcctttggtggagtctttagatgcactgttggcttgcgagacaaatatggaaaagatagagtttttaataccccattgtgtgaacaaggaattgttggatttggaatcggaattgcggtcactggagctactgccattgcggaaattcagtttgcagattatattttccctgcatttgatcagattgttaatgaagctgccaagtatcgctatcgctctggggatctttttaactgtggaagcctcactatccggtccccttggggctgtgttggtcatggggctctctatcattctcagagtcctgaagcattttttgcccattgcccaggaatcaaggtggttatacccagaagccctttccaggccaaaggacttcttttgtcatgcatagaggataaaaatccttgtatattttttgaacctaaaatactttacagggcagcagcggaagaagtccctatagaaccatacaacatcccactgtcccaggccgaagtcatacaggaagggagtgatgttactctagttgcctggggcactcaggttcatgtgatccgagaggtagcttccatggcaaaagaaaagcttggagtgtcttgtgaagtcattgatctgaggactataataccttgggatgtggacacaatttgtaagtctgtgatcaaaacagggcgactgctaatcagtcacgaggctcccttgacaggcggctttgcatcggaaatcagctctacagttcaggaggaatgtttcttgaacctagaggctcctatatcaagagtatgtggttatgacacaccatttcctcacatttttgaaccattctacatcccagacaaatggaagtgttatgatgcccttcgaaaaatgatcaactattgaccatataggtaggtatgcatcttgagaaagctactatgtgcccctgacattaacgtactgttaaccaagacacagcaatcatcagtgttttgatggtaacaaactttgatggtaaagttggtaaaaggcaactttcagaagaaaataatgtgctttagaaaaaaaattcaaatttatagtagtatatttacatttttgttgttgttgttgttctgagatggagtctcactctgtcgcccaggctagactgcagtggtgcaatctcagctcactgcaacctcccccctacccctgagttcaagcgattctcctgcctcagcctgctgagtagttgggattacaggcgcccaccaccatgcccagctaatttttgtgtttttattggaggtggggtgtcactatgttggctcagctgatttcaaattcctgacctcaagtgatccacctgccttagcctcccaaagtgctgggattacaggcatgagccactgcacctggctatatttacatttaatagaaacatatctagcatatgtatatgtgattttttttttttttttgagaccgagtctcactctgtcaccaggctggagtgcagtggtgcgatcttggctcatggcaacctctgcctcccaggttcaagcgattgtcctgcctcagtctcctgagtagctgggactacaggtgtgcaccaacatgcccagctaattttttatatttttagtagagacggggtttcaccatgttggccaggatggtctcgatctcttgaccttgtgttccacccgccttggcctcccaaagtgctggaattacaggcatgagccaccgcgcctggcctgtatatgtgatttctaaaaaatagatgcatgcatatgttaacattgaatagtcaatcactagatgaagatgctctctaccatggtttagattgcaagtgtactttataccattgtttcaacttcaacctttatttttgtatatattttttcagctacttaaactgttcatgaataggcgtactttctgtatttaaaaatggcccctcaagcaccgttaatttacattccagttatttacatgataattcatgacattctgaaacttgcctgtatattatctgaaaaatggatttcttgagcaaaagatctgtttattgtatgtaaggaaaaattttacctgaaaacaaacaaacaaaccctaaaactcagcaccactaccatttccagaagcttttttaacaagtgaatattttttacataatggataataaatggtatttattcatcatgattttctaagtaatgcttatcagccccttcagtggtgttattctaacaaaatgaatacattacaaattattaagttagcttttcagagttttaatatagaagttactagcactgacacactgattttgaaatgtttcaaaatgagtagatatgattagatcctttaccttttaatatctagtttttccaaaaatgatagtaatatcttttgaagaactatgctttttcaaaagcaaaatcaactctgtataatagcacattctctactttttaaagatcagaaatgctagaattcttgacttttgtgtatgggtagtaaatctagctcactgaaaatcagagtgaaacgcctttacatttgtgcggatagagaagttaactctccctcatatgtcactgtgctaccataatccctacattttctgtctgttctagtctaagaatattgttatagatggaagttaggaccattagcccacagatgcatgtattctctcagacataccggtgtagatgctatatttctgatgtcttcttaatgtctgtgaaagcaactggcatctacaataaatcacacttagagctggttagaggactccttcacttttgttgtccatgtggttcccttccgtggaccagccgtaataaagagccaaggtagtgatggtggccacgtgcctcgttgctatttttaaagtaatattcagatgtggttttaaatttagattatgtattccttttgaaacataagaaaaacatttaaacctatgctgaaaatacgataaaagaaaaacaactccaatatgctaaaagttaaatatggtatttaagaaaatagtcatgtatgcaattgagaaagtctataatttattttacagaaaagctggaagattatgactagatatggaaatattttttctgaatttttttttatatttcctccgacttacctctttttgaaaagagagtttttattaagtgaaccatcacgatattggctgaaaagttctacattctattattgtattgtaacacacatgtattgatgattttcattaagagtttcagattaactttgaaaaatattccacatggtaatcttataaattctgtttaattacatctgtaaatattatgtgtgtgatagtattcaataaa

SEQ ID NO: 777 - DNA, 1514 bp, Artificial Sequence
  derived and/or modified sequence
aggcggcgtgcggctgcatagcctgagaatcccggtggtgagcggggatggcggttgtagcggcggctgccggctggctactcaggctcagggcggcaggggctgaggggcactggcgtcggcttcctggcgcggggctggcgcggggctttttgcaccccgccgcgactgtcgaggatgcggcccagaggcggcaggtggctcattttactttccagccagatccggagccccgggagtacgggcaaactcagaaaatgaatcttttccagtctgtaacaagtgccttggataactcattggccaaagatcctactgcagtaatatttggtgaagatgttgcctttggtggagtctttagatgcactgttggcttgcgagacaaatatggaaaagatagagtttttaataccccattgtgtgaacaaggaattgttggatttggaatcggaattgcggtcactggagctactgccattgcggaaattcagtttgcagattatattttccctgcatttgatcagattgttaatgaagctgccaagtatcgctatcgctctggggatctttttaactgtggaagcctcactatccggtccccttggggctgtgttggtcatggggctctctatcattctcagagtcctgaagcattttttgcccattgcccaggaatcaaggtggttatacccagaagccctttccaggccaaaggacttcttttgtcatgcatagaggataaaaatccttgtatattttttgaacctaaaatactttacagggcagcagcggaagaagtccctatagaaccatacaacatcccactgtcccaggccgaagtcatacaggaagggagtgatgttactctagttgcctggggcactcaggttcatgtgatccgagaggtagcttccatggcaaaagaaaagcttggagtgtcttgtgaagtcattgatctgaggactataataccttgggatgtggacacaatttgtaagtctgtgatcaaaacagggcgactgctaatcagtcacgaggctcccttgacaggcggctttgcatcggaaatcagctctacagttcaggaggaatgtttcttgaacctagaggctcctatatcaagagtatgtggttatgacacaccatttcctcacatttttgaaccattctacatcccagacaaatggaagtgttatgatgcccttcgaaaaatgatcaactattgaccatatagaaaagctggaagattatgactagatatggaaatattttttctgaatttttttttatatttcctccgacttacctctttttgaaaagagagtttttattaagtgaaccatcacgatattggctgaaaagttctacattctattattgtattgtaacacacatgtattgatgattttcattaagagtttcagattaactttgaaaaatattccacatggtaatcttataaattctgtttaattacatctgtaaatattatgtgtgtgatagtattcaataaa

SEQ ID NO: 778 - DNA, 1285 bp, Artificial Sequence
  derived and/or modified sequence
gagaatcccggtggtgagcggggatggcggttgtagcggcggctgccggctggctactcaggctcagggcggcaggggctgggctggcgcggggctttttgcaccccgccgcgactgtcgaggatgcggcccagaggcggcaggtggctcattttactttccagccagatccggagccccgggagtacgggcaaactcagaaaatgaatcttttccagtctgtaacaagtgccttggataactcattggccaaagatcctactgcagtaatatttggtgaagatgttgcctttggtggagtctttagatgcactgttggcttgcgagacaaatatggaaaagatagagtttttaataccccattgtgtgaacaaggaattgttggatttggaatcggaattgcggtcactggagctactgccattgcggaaattcagtttgcagattatattttccctgcatttgatcagattgttaatgaagctgccaagtatcgctatcgctctggggatctttttaactgtggaagcctcactatccggtccccttggggctgtgttggtcatggggctctctatcattctcagagtcctgaagcattttttgcccattgcccaggaatcaaggtggttatacccagaagccctttccaggccaaaggacttcttttgtcatgcatagaggataaaaatccttgtatattttttgaacctaaaatactttacagggcagcagcggaagaagtccctatagaaccatacaacatcccactgtcccaggccgaagtcatacaggaagggagtgatgttactctagttgcctggggcactcaggttcatgtgatccgagaggtagcttccatggcaaaagaaaagcttggagtgtcttgtgaagtcattgatctgaggactataataccttgggatgtggacacaatttgtaagtctgtgatcaaaacagggcgactgctaatcagtcacgaggctcccttgacaggcggctttgcatcggaaatcagctctacagttcaggaggaatgtttcttgaacctagaggctcctatatcaagagtatgtggttatgacacaccatttcctcacatttttgaaccattctacatcccagacaaatggaagtgttatgatgcccttcgaaaaatgatcaactattgaccatataggtaggtatgcatcttgagaaagctactatgtgcccctgacattaacgtactgttaaccaagacacagcaatcatcagtgttttgatggtaacaaactttgatggt

SEQ ID NO: 779 - DNA, 3767 bp, Artificial Sequence
  derived and/or modified sequence
agcctgagaatcccggtggtgagcggggatggcggttgtagcggcggctgccggctggctactcaggctcagggcggcaggggctgaggggcactggcgtcggcttcctggcgcggggctggcgcggggctttttgcaccccgccgcgactgtcgaggatgcggcccagaggcggcaggtggctcattttactttccagccagatccggagccccgggagtacgggcaaactcagaaaatgaatcttttccagtctgtaacaagtgccttggataactcattggccaaagatcctactgcagtaatatttggtgaagatgttgcctttggtggagtctttagatgcactgttggcttgcgagacaaatatggaaaagatagagtttttaataccccattgtgtgaacaaggaattgttggatttggaatcggaattgcggtcactggagctactgccattgcggaaattcagtttgcagattatattttccctgcatttgatcagattgttaatgaagctgccaagtatcgctatcgctctggggatctttttaactgtggaagcctcactatccggtccccttggggctgtgttggtcatggggctctctatcattctcagagtcctgaagcattttttgcccattgcccaggaatcaagatcaaagttataagcttatcttagttgagtagatgttgcctgatttttgaatgtgagctagaagttgtagactgggaaagaagccatgtgcgaggtggttatacccagaagccctttccaggccaaaggacttcttttgtcatgcatagaggataaaaatccttgtatattttttgaacctaaaatactttacagggcagcagcggaagaagtccctatagaaccatacaacatcccactgtcccaggccgaagtcatacaggaagggagtgatgttactctagttgcctggggcactcaggttcatgtgatccgagaggtagcttccatggcaaaagaaaagcttggagtgtcttgtgaagtcattgatctgaggactataataccttgggatgtggacacaatttgtaagtctgtgatcaaaacagggcgactgctaatcagtcacgaggctcccttgacaggcggctttgcatcggaaatcagctctacagttcaggaggaatgtttcttgaacctagaggctcctatatcaagagtatgtggttatgacacaccatttcctcacatttttgaaccattctacatcccagacaaatggaagtgttatgatgcccttcgaaaaatgatcaactattgaccatataggtaggtatgcatcttgagaaagctactatgtgcccctgacattaacgtactgttaaccaagacacagcaatcatcagtgttttgatggtaacaaactttgatggtaaagttggtaaaaggcaactttcagaagaaaataatgtgctttagaaaaaaaattcaaatttatagtagtatatttacatttttgttgttgttgttgttctgagatggagtctcactctgtcgcccaggctagactgcagtggtgcaatctcagctcactgcaacctcccccctacccctgagttcaagcgattctcctgcctcagcctgctgagtagttgggattacaggcgcccaccaccatgcccagctaatttttgtgtttttattggaggtggggtgtcactatgttggctcagctgatttcaaattcctgacctcaagtgatccacctgccttagcctcccaaagtgctgggattacaggcatgagccactgcacctggctatatttacatttaatagaaacatatctagcatatgtatatgtgattttttttttttttttgagaccgagtctcactctgtcaccaggctggagtgcagtggtgcgatcttggctcatggcaacctctgcctcccaggttcaagcgattgtcctgcctcagtctcctgagtagctgggactacaggtgtgcaccaacatgcccagctaattttttatatttttagtagagacggggtttcaccatgttggccaggatggtctcgatctcttgaccttgtgttccacccgccttggcctcccaaagtgctggaattacaggcatgagccaccgcgcctggcctgtatatgtgatttctaaaaaatagatgcatgcatatgttaacattgaatagtcaatcactagatgaagatgctctctaccatggtttagattgcaagtgtactttataccattgtttcaacttcaacctttatttttgtatatattttttcagctacttaaactgttcatgaataggcgtactttctgtatttaaaaatggcccctcaagcaccgttaatttacattccagttatttacatgataattcatgacattctgaaacttgcctgtatattatctgaaaaatggatttcttgagcaaaagatctgtttattgtatgtaaggaaaaattttacctgaaaacaaacaaacaaaccctaaaactcagcaccactaccatttccagaagcttttttaacaagtgaatattttttacataatggataataaatggtatttattcatcatgattttctaagtaatgcttatcagccccttcagtggtgttattctaacaaaatgaatacattacaaattattaagttagcttttcagagttttaatatagaagttactagcactgacacactgattttgaaatgtttcaaaatgagtagatatgattagatcctttaccttttaatatctagtttttccaaaaatgatagtaatatcttttgaagaactatgctttttcaaaagcaaaatcaactctgtataatagcacattctctactttttaaagatcagaaatgctagaattcttgacttttgtgtatgggtagtaaatctagctcactgaaaatcagagtgaaacgcctttacatttgtgcggatagagaagttaactctccctcatatgtcactgtgctaccataatccctacattttctgtctgttctagtctaagaatattgttatagatggaagttaggaccattagcccacagatgcatgtattctctcagacataccggtgtagatgctatatttctgatgtcttcttaatgtctgtgaaagcaactggcatctacaataaatcacacttagagctggttagaggactccttcacttttgttgtccatgtggttcccttccgtggaccagccgtaataaagagccaaggtagtgatggtggccacgtgcctcgttgctatttttaaagtaatattcagatgtggttttaaatttagattatgtattccttttgaaacataagaaaaacatttaaacctatgctgaaaatacgataaaagaaaaacaactccaatatgctaaaagttaaatatggtatttaagaaaatagtcatgtatgcaattgagaaagtctataatttattttacagaaaagctggaagattatgactagatatggaaatattttttctgaatttttttttatatttcctccgacttacctctttttgaaaagagagtttttattaagtgaaccatcacgatattggctgaaaagttctacattctattattgtattgtaacacacatgtattgatgattttcattaagagtttcagattaactttgaaaaatattccacatggtaatcttataaattctgtttaattacatctgtaaatattatgtgtgtgatagtattcaataaagtaaaatcaaattgtc

SEQ ID NO: 780 - DNA, 1179 bp, Artificial Sequence
  derived and/or modified sequence
atggccgtggtggccgccgccgccggctggctgctgagactgagagccgccggcgccgagggccactggagaagactgcccggcgccggcctggccagaggcttcctgcaccccgccgccaccgtggaggacgccgcccagagaagacaggtggcccacttcaccttccagcccgaccccgagcccagagagtacggccagacccagaagatgaacctgttccagagcgtgaccagcgccctggacaacagcctggccaaggaccccaccgccgtgatcttcggcgaggacgtggccttcggcggcgtgttcagatgcaccgtgggcctgagagacaagtacggcaaggacagagtgttcaacacccccctgtgcgagcagggcatcgtgggcttcggcatcggcatcgccgtgaccggcgccaccgccatcgccgagatccagttcgccgactacatcttccccgccttcgaccagatcgtgaacgaggccgccaagtacagatacagaagcggcgacctgttcaactgcggcagcctgaccatcagaagcccctggggctgcgtgggccacggcgccctgtaccacagccagagccccgaggccttcttcgcccactgccccggcatcaaggtggtgatccccagaagccccttccaggccaagggcctgctgctgagctgcatcgaggacaagaacccctgcatcttcttcgagcccaagatcctgtacagagccgccgccgaggaggtgcccatcgagccctacaacatccccctgagccaggccgaggtgatccaggagggcagcgacgtgaccctggtggcctggggcacccaggtgcacgtgatcagagaggtggccagcatggccaaggagaagctgggcgtgagctgcgaggtgatcgacctgagaaccatcatcccctgggacgtggacaccatctgcaagagcgtgatcaagaccggcagactgctgatcagccacgaggcccccctgaccggcggcttcgccagcgagatcagcagcaccgtgcaggaggagtgcttcctgaacctggaggcccccatcagcagagtgtgcggctacgacacccccttcccccacatcttcgagcccttctacatccccgacaagtggaagtgctacgacgccctgagaaagatgatcaactactag

SEQ ID NO: 781 - protein, 3418 aa, Artificial Sequence [sequence omitted]

SEQ ID NO: 782 - DNA, 1809 bp, Artificial Sequence
  derived and/or modified sequence
atgccaatcggttccaaggaacgccctactttctttgagatcttcaagacacggtgtaacaaggcagggccaatctcgctaaactggtttgaagaactgagtagcgaggcaccaccatataatagtgagcctgctgaagaaagcgaacacaaaaacaataactatgagccgaatctgtttaagacaccgcagagaaaaccttcctacaaccagctcgctagcacacctattatattcaaagagcagggtctgaccctcccactgtaccagagccctgtgaaagagctggacaaatttaaacttgaccttgggagaaatgtgcctaactcccggcataaatccctgcggaccgtcaagacaaaaatggatcaagcggacgacgtatcctgtccattactcaactcttgcctgagtgaatcccccgtggtcctgcagtgtacacacgtcacacctcaacgagacaagtccgtcgtttgtggctccctgtttcacactccaaaatttgtgaagggacgccaaaccccgaaacacatttcagagagtctgggcgcagaggtggaccccgacatgtcttggagttcaagccttgctacaccccctactctgtccagcacagtgctcatagtgaggaacgaagaagcctctgagacggtgttcccacatgacaccaccgcgaacgtgaagagttatttcagtaatcatgatgagtcattgaagaagaacgacaggttcatcgccagcgtcaccgattccgagaacacgaaccagagagaggccgctagtcacggtttcggtaaaacatccgggaatagcttcaaagtgaattcatgcaaagaccatatcgggaaatccatgccgaatgtcctcgaagacgaggtctatgaaaccgtcgtggatacctcagaagaagactccttcagtctctgcttcagcaagtgccggaccaaaaatcttcagaaggtcaggacaagcaaaacacgcaagaaaatcttccatgaggctaacgcagacgagtgcgagaaatccaagaatcaggtcaaggaaaagtactcctttgttagcgaggtagaaccaaacgacacagatcccctggactccaatgtggccaatcaaaagccattcgagtctggttcggacaagatctcaaaagaggtggtcccctccttagcctgtgagtggagtcagcttactctgtctggcttgaacggggcccaaatggagaagatccctctgctgcacattagttcatgcgaccagaatatctccgagaaggacctgcttgacacagaaaacaagcgtaaaaaggattttttaacatccgagaactcactgccacggatctctagtctgccgaaatctgagaagccactaaatgaagaaaccgtggtgaataagcgcgatgaagagcaacatctggaaagtcatacagattgtattctggccgtcaagcaggcaatttccggcacttcgccagtcgcaagcagcttccaggggattaagaagtcaatttttcggattagggaatccccgaaggaaacctttaacgctagcttctccggacacatgaccgaccccaactttaagaaggaaaccgaggcgagtgagagcggcctcgagatacacactgtctgctcacaaaaggaggatagtctgtgtcctaatctcattgacaacgggtcttggccggcgacgactacccaaaattctgtcgcactgaaaaatgcagggctgatcagcacgcttaagaaaaagaccaataaatttatctacgccatccacgacgagacaagctacaaagggaagaaatag

SEQ ID NO: 783 - DNA, 1809 bp, Artificial Sequence
  derived and/or modified sequence
atgcccatcggcagcaaggagcggcccaccttctttgagatcttcaagacccgctgcaacaaggccggccccatcagcctgaactggtttgaggagctgagcagcgaggccccaccctacaacagcgagcctgctgaggagagcgagcacaagaacaacaactatgagcccaacctcttcaagaccccccagaggaagcccagctacaaccagctggccagcacccccatcatcttcaaggagcagggcctgaccctgcccctgtaccagagccctgtgaaggagctggacaagttcaagctggacctgggcagaaatgtgcccaacagccgccacaagagcctgaggacagtgaagaccaagatggaccaggctgatgatgtgtcctgccccctgctgaacagctgcctgtctgagagccctgtggtgctgcagtgcacccacgtgaccccccagagggacaagtctgtggtgtgtggcagcctcttccacacccccaagtttgtgaagggccggcagacccccaagcacatcagcgagagcctgggcgctgaggtggaccctgacatgtcctggagcagcagcctggccaccccacccaccctgagcagcacagtgctgattgtgagaaatgaggaggccagcgagaccgtcttcccccatgacaccacagccaacgtgaagagctacttcagcaaccatgatgagagcctgaagaagaatgaccgcttcatcgcctctgtgacagattctgagaacaccaaccagcgggaggccgccagccacggctttgggaagaccagcggcaacagcttcaaggtgaacagctgcaaggaccacatcggcaagtccatgcccaacgtgctggaggatgaggtgtatgagaccgtggtggacaccagtgaagaagattccttcagcctgtgcttcagcaagtgcaggaccaagaacctgcagaaggtgaggaccagcaagaccaggaagaagatcttccacgaggccaatgctgatgaatgtgagaagagcaagaaccaggtgaaggagaagtacagctttgtgtctgaggtggagcccaatgacacagaccccctggacagcaatgtggccaaccagaagccctttgagagcggcagtgacaagatcagcaaggaggtggtgcccagcctggcctgtgagtggagccagctgaccctgagcggcctgaatggagcccagatggagaagatccccctgctgcacatcagcagctgtgaccagaacatcagcgagaaggacctgctggacacagagaacaagaggaagaaggacttcctgaccagcgagaacagcctgccccgcatcagcagcctgcccaagtctgagaagcccctgaatgaggagaccgtggtgaacaagagagatgaggagcagcacctggagagccacacagactgcatcctggccgtgaagcaggccatcagcggcaccagccctgtggccagcagcttccagggcatcaagaagagcatcttccgcatccgggagagccccaaggagaccttcaatgccagcttcagcggccacatgacagaccccaacttcaagaaggagacagaggccagcgagagcggcctggagatccacacagtgtgcagccagaaggaggacagcctgtgccccaacctgattgacaatggctcctggccagccaccaccacccagaacagcgtggccctgaagaatgccggcctcatcagcaccctgaagaagaagaccaacaagttcatctatgccatccatgatgagaccagctacaagggcaagaagtag

SEQ ID NO: 784 - DNA, 1809 bp, Artificial Sequence
  derived and/or modified sequence
atgcccatcggcagcaaggagcggcccaccttcttcgagatcttcaagacccgctgtaacaaagctggaccaatcagtctaaactggttcgaagagcttagtagcgaggcgcctccctacaatagtgagcccgcagaggagtccgagcataaaaacaataattatgagcccaacctgtttaagaccccacagagaaaacctagctataatcagcttgcctcaacaccaatcatatttaaagagcaaggcctgaccctgcccctatatcagagccctgtcaaggagctcgataagtttaagctggacctgggccggaacgtgccaaattcccgccataaatctctgagaacagtaaagacgaagatggatcaggcggatgatgtatcatgcccactgctgaattcttgcctgtctgaaagtccagtcgtgttacagtgcacccacgttacacctcagcgcgacaaaagcgttgtgtgcggatcgctcttccacacaccaaaattcgtaaagggtaggcagacccccaagcacatttctgaaagcctgggcgccgaggtcgatcctgacatgagctggtcttcgagtctggcgacacctcctactttatcttccactgtgttaatcgtacgaaatgaggaagctagcgagaccgttttcccccatgacacaactgctaacgtcaagtcttatttctctaaccacgatgagagtctcaaaaagaacgatcggttcattgcctcagtcacagacagcgagaacacgaaccagcgagaggccgcctctcatggctttgggaaaacaagtgggaatagctttaaagtaaattcttgcaaggatcatatcggaaaatcaatgcccaacgtcctggaagacgaggtctacgagaccgtggtagatactagcgaagaggattccttctccttatgttttagcaagtgccggactaagaaccttcaaaaagtccgtacctctaagacacgaaagaagatttttcatgaagcaaacgcagacgagtgcgagaagtcaaagaatcaggtcaaagagaagtactcttttgttagtgaggtggaaccaaacgatactgatcccctcgatagtaacgttgccaaccagaaacccttcgaatctggctcagacaagatctctaaggaagtggtgcctagcctagcctgtgagtggtcacagctgacgctatcaggccttaatggagcccagatggaaaagataccattgctgcacatttcaagctgtgatcagaacatttcagagaaagacctgcttgacacggagaacaagaggaaaaaggattttctgacttccgagaacagcctgcccaggatcagttctttgccaaagagcgagaaaccactgaatgaagagaccgtggtgaataaaagagatgaggagcagcaccttgaatcacacacggactgtatcctcgcggtcaagcaggcaatatcaggtacgtccccagtggcgtcttccttccaggggatcaagaaaagtatctttaggatacgagaatccccaaaagagaccttcaacgccagtttctctggccatatgacagacccaaatttcaaaaaggaaacagaagcgagtgagagtggactggagattcacaccgtgtgctcccagaaagaggatagcctgtgtcctaacctgattgacaatggctcttggcctgccactactacccagaactcagtcgcgctgaagaatgcagggctgatcagtaccctcaagaagaaaacaaacaaatttatatatgccattcatgacgagacaagctataagggcaaaaaatag

SEQ ID NO: 785 - DNA, 1809 bp, Artificial Sequence
  derived and/or modified sequence
atgcctatcgggagtaaggaacggccaacgttcttcgaaatttttaagactagatgcaataaagcaggcccaattagccttaattggtttgaagaactttccagtgaggcaccaccctacaactcagaaccggcagaggagtcggaacacaagaacaacaattatgaacctaacctgttcaaaacaccacagcgaaaaccttcgtacaatcaactggccagtacgccaattatttttaaggagcagggtctgactcttcccctgtaccagtcccccgtgaaggaactcgataagttcaaactggaccttggcagaaatgtccctaactctaggcataagagccttagaacagtgaaaaccaagatggatcaggccgacgacgtgagttgccctcttttgaacagttgcctctcagaaagccccgttgtgttacaatgtactcacgtcacgccacagcgcgacaagagtgtggtgtgtggttcactgtttcacacacctaaattcgttaaggggaggcaaacaccaaagcacatatctgaatccttaggcgcagaggtggacccagatatgtcatggtcctcaagcctggccaccccaccaacactttcttcaaccgtccttattgtgaggaatgaggaggcttcggagacagttttcccgcatgatactacagccaatgtaaaatcttacttcagtaaccatgacgagagccttaagaagaatgaccgctttatcgcgtccgtgactgacagcgagaacaccaaccaaagggaagccgctagccacgggtttgggaagacatctggaaacagtttcaaggtgaactcctgtaaagatcatatcggaaagtcaatgcccaacgtcctagaagacgaggtgtatgaaacggtcgtagacacttcagaagaggactctttttctctgtgcttctcgaagtgtcgcactaaaaacctgcagaaagttaggacatccaagacaaggaagaagatcttccatgaggcaaatgctgacgagtgtgaaaaatctaaaaaccaggttaaagagaagtactccttcgttagtgaggtagagcctaatgacacagatcccttggactcaaacgtggcgaaccaaaaacccttcgagtcaggctcggataaaattagcaaggaagtggtgccctccctggcctgcgagtggagtcagctgaccctctctggactgaacggggcacagatggagaagataccactgttacacatcagctcctgtgaccaaaacatcagtgagaaggatttactcgatacggaaaataagcggaaaaaagactttttaaccagcgaaaactcactgccccgtatttcttccctgcccaagtctgaaaaaccactgaacgaggaaacagtagtaaacaagcgcgatgaggagcaacacttagagagccatacagactgcatactagctgtcaaacaagccatctcgggcacctcacctgttgcctctagttttcagggtattaagaaatctatctttaggatacgggaaagtccaaaggaaacctttaacgcctcattttccgggcacatgaccgacccgaacttcaaaaaagaaaccgaagcaagcgaatccggcctggagatccacaccgtgtgcagccagaaggaggacagcctgtgtcctaatcttatagacaacgggagctggcccgctacaacaactcaaaattcggtcgctctcaagaacgcaggcctaataagcaccctcaagaagaagacgaataaatttatctacgccattcacgatgaaaccagctataagggcaagaagtag

SEQ ID NO: 786 - DNA, 2009 bp, Artificial Sequence
  derived and/or modified sequence
ggcagaggcggagccgctgtggcactgctgcgcctctgctgcgcctcgggtgtcttttgcggcggtgggtcgccgccgggagaagcgtgaggggacagatttgtgaccggcgcggtttttgtcagcttactccggccaaaaaagaactgcacctctggagcggacttatttaccaagcattggaggaatatcgtaggtaaaaatgcctattggatccaaagagaggccaacattttttgaaatttttaagacacgctgcaacaaagcaggaccaataagtcttaattggtttgaagaactttcttcagaagctccaccctataattctgaacctgcagaagaatctgaacataaaaacaacaattacgaaccaaacctatttaaaactccacaaaggaaaccatcttataatcagctggcttcaactccaataatattcaaagagcaagggctgactctgccgctgtaccaatctcctgtaaaagaattagataaattcaaattagacttaggaaggaatgttcccaatagtagacataaaagtcttcgcacagtgaaaactaaaatggatcaagcagatgatgtttcctgtccacttctaaattcttgtcttagtgaaagtcctgttgttctacaatgtacacatgtaacaccacaaagagataagtcagtggtatgtgggagtttgtttcatacaccaaagtttgtgaagggtcgtcagacaccaaaacatatttctgaaagtctaggagctgaggtggatcctgatatgtcttggtcaagttctttagctacaccacccacccttagttctactgtgctcatagtcagaaatgaagaagcatctgaaactgtatttcctcatgatactactgctaatgtgaaaagctatttttccaatcatgatgaaagtctgaagaaaaatgatagatttatcgcttctgtgacagacagtgaaaacacaaatcaaagagaagctgcaagtcatggatttggaaaaacatcagggaattcatttaaagtaaatagctgcaaagaccacattggaaagtcaatgccaaatgtcctagaagatgaagtatatgaaacagttgtagatacctctgaagaagatagtttttcattatgtttttctaaatgtagaacaaaaaatctacaaaaagtaagaactagcaagactaggaaaaaaattttccatgaagcaaacgctgatgaatgtgaaaaatctaaaaaccaagtgaaagaaaaatactcatttgtatctgaagtggaaccaaatgatactgatccattagattcaaatgtagcaaatcagaagccctttgagagtggaagtgacaaaatctccaaggaagttgtaccgtctttggcctgtgaatggtctcaactaaccctttcaggtctaaatggagcccagatggagaaaatacccctattgcatatttcttcatgtgaccaaaatatttcagaaaaagacctattagacacagagaacaaaagaaagaaagattttcttacttcagagaattctttgccacgtatttctagcctaccaaaatcagagaagccattaaatgaggaaacagtggtaaataagagagatgaagagcagcatcttgaatctcatacagactgcattcttgcagtaaagcaggcaatatctggaacttctccagtggcttcttcatttcagggtatcaaaaagtctatattcagaataagagaatcacctaaagagactttcaatgcaagtttttcaggtcatatgactgatccaaactttaaaaaagaaactgaagcctctgaaagtggactggaaatacatactgtttgctcacagaaggaggactccttatgtccaaatttaattgataatggaagctggccagccaccaccacacagaattctgtagctttgaagaatgcaggtttaatatccactttgaaaaagaaaacaaataagtttatttatgctatacatgatgaaacatcttataaaggaaaaaaaa

SEQ ID NO: 787 - DNA, 1809 bp, Artificial Sequence
  derived and/or modified sequence
atgcccatcggcagcaaggagagacccaccttcttcgagatcttcaagaccagatgcaacaaggccggccccatcagcctgaactggttcgaggagctgagcagcgaggcccccccctacaacagcgagcccgccgaggagagcgagcacaagaacaacaactacgagcccaacctgttcaagaccccccagagaaagcccagctacaaccagctggccagcacccccatcatcttcaaggagcagggcctgaccctgcccctgtaccagagccccgtgaaggagctggacaagttcaagctggacctgggcagaaacgtgcccaacagcagacacaagagcctgagaaccgtgaagaccaagatggaccaggccgacgacgtgagctgccccctgctgaacagctgcctgagcgagagccccgtggtgctgcagtgcacccacgtgaccccccagagagacaagagcgtggtgtgcggcagcctgttccacacccccaagttcgtgaagggcagacagacccccaagcacatcagcgagagcctgggcgccgaggtggaccccgacatgagctggagcagcagcctggccaccccccccaccctgagcagcaccgtgctgatcgtgagaaacgaggaggccagcgagaccgtgttcccccacgacaccaccgccaacgtgaagagctacttcagcaaccacgacgagagcctgaagaagaacgacagattcatcgccagcgtgaccgacagcgagaacaccaaccagagagaggccgccagccacggcttcggcaagaccagcggcaacagcttcaaggtgaacagctgcaaggaccacatcggcaagagcatgcccaacgtgctggaggacgaggtgtacgagaccgtggtggacaccagcgaggaggacagcttcagcctgtgcttcagcaagtgcagaaccaagaacctgcagaaggtgagaaccagcaagaccagaaagaagatcttccacgaggccaacgccgacgagtgcgagaagagcaagaaccaggtgaaggagaagtacagcttcgtgagcgaggtggagcccaacgacaccgaccccctggacagcaacgtggccaaccagaagcccttcgagagcggcagcgacaagatcagcaaggaggtggtgcccagcctggcctgcgagtggagccagctgaccctgagcggcctgaacggcgcccagatggagaagatccccctgctgcacatcagcagctgcgaccagaacatcagcgagaaggacctgctggacaccgagaacaagagaaagaaggacttcctgaccagcgagaacagcctgcccagaatcagcagcctgcccaagagcgagaagcccctgaacgaggagaccgtggtgaacaagagagacgaggagcagcacctggagagccacaccgactgcatcctggccgtgaagcaggccatcagcggcaccagccccgtggccagcagcttccagggcatcaagaagagcatcttcagaatcagagagagccccaaggagaccttcaacgccagcttcagcggccacatgaccgaccccaacttcaagaaggagaccgaggccagcgagagcggcctggagatccacaccgtgtgcagccagaaggaggacagcctgtgccccaacctgatcgacaacggcagctggcccgccaccaccacccagaacagcgtggccctgaagaacgccggcctgatcagcaccctgaagaagaagaccaacaagttcatctacgccatccacgacgagaccagctacaagggcaagaagtag

SEQ ID NO: 788 - protein, 543 aa, Artificial Sequence
  derived and/or modified sequence
MAHAHIQGGRRAKSRFVVCIMSGARSKLALFLCGCYVVALGAHTGEESVADHHEAEYYVAAVYEHPSILSLNPLALISRQEALELMNQNLDIYEQQVMTAAQKDVQIIVFPEDGIHGFNFTRTSIYPFLDFMPSPQVVRWNPCLEPHRFNDTEVLQRLSCMAIRGDMFLVANLGTKEPCHSSDPRCPKDGRYQFNTNVVFSNNGTLVDRYRKHNLYFEAAFDVPLKVDLITFDTPFAGRFGIFTCFDILFFDPAIRVLRDYKVKHVVYPTAWMNQLPLLAAIEIQKAFAVAFGINVLAANVHHPVLGMTGSGIHTPLESFWYHDMENPKSHLIIAQVAKNPVGLIGAENATGETDPSHSKFLKILSGDPYCEKDAQEVHCDEATKWNVNAPPTFHSEMMYDNFTLVPVWGKEGYLHVCSNGLCCYLLYERPTLSKELYALGVFDGLHTVHGTYYIQVCALVRCGGLGFDTCGQEITEATGIFEFHLWGNFSTSYIFPLFLTSGMTLEVPDQLGWENDHYFLRKSRLSSGLVTAALYGRLYERD

SEQ ID NO: 789 - DNA, 1632 bp, Artificial Sequence
  derived and/or modified sequence
atggcccatgcccacatacagggcggccggagggcaaaaagtcgatttgttgtgtgtatcatgtccggcgctcggagcaagttggcactgttcttatgcggctgttatgttgttgcgctgggcgctcataccggagaggagagcgtagccgatcatcacgaagccgagtactacgtggctgctgtgtatgagcacccttcaatcctttccctgaatcccctggccttgatatcgaggcaggaagctctggagcttatgaaccagaatctagatatatatgagcaacaggttatgacagccgcacagaaggacgtgcagatcatcgtatttcctgaagatggcatccatggctttaactttacaaggacatccatatacccctttctggatttcatgccatcacctcaggtggttagatggaatccttgccttgaacctcaccgtttcaacgacaccgaggtcttgcaacgactaagctgcatggccattagaggggatatgtttctggtggccaacttaggtactaaagagccttgtcacagctcagaccctcggtgtcccaaagatggtcggtatcagttcaacaccaacgtagtcttctcaaataatggtactctggtggaccgctacagaaagcacaacctctattttgaggcagcgtttgatgttccacttaaagtcgacttaattacatttgacaccccctttgccggccgatttggtattttcacctgtttcgacatcctatttttcgatcccgctatacgggtgctgcgtgactataaggttaagcacgtcgtgtatccgaccgcttggatgaaccagcttccattgcttgccgccatagaaatccagaaggcctttgcagtggcattcggcattaacgtcctcgctgcaaacgtgcatcatcccgtgctgggcatgaccggttcagggattcacacacctttggagagcttctggtatcatgacatggagaaccccaaatctcaccttattatcgcacaagtggcgaaaaatcctgtaggactcatcggcgccgagaatgccacaggagaaactgaccccagtcacagcaaatttttgaagattttgtcgggagacccatactgtgaaaaggatgcccaggaagtccactgtgatgaggcaactaagtggaatgttaacgcccctccaactttccacagtgaaatgatgtacgataatttcacactcgtcccggtctgggggaaggagggatacctccatgtgtgtagtaacgggctctgttgctacctcctgtacgaacgaccaactctttctaaagagctctacgccctcggtgtgtttgatggtttacacacagtccacgggacctactatatacaggtgtgcgcattagtgagatgcggcggcctggggttcgacacttgtggacaagaaatcacggaagccaccgggatcttcgagttccacctctggggtaacttttccacgtcttatatcttccctctcttcctgacctcggggatgaccctggaggtcccagatcagctcggatgggagaatgaccactacttcctgagaaaatctcgcctgtcatccggccttgttacggcggccctgtatggcagactttacgagcgtgattag

SEQ ID NO: 790 - DNA, 1632 bp, Artificial Sequence
  derived and/or modified sequence
atggcccacgcccacatccagggcggccggcgggccaagagcagatttgtggtgtgcatcatgtctggggcccggagcaagctggccctcttcctgtgtggctgctacgtggtggccctgggcgcccacactggagaggagagcgtggccgaccaccatgaagctgagtactacgtggccgctgtgtatgagcaccccagcatcctgagcctgaaccccctggccctgatcagccggcaggaggccctggagctgatgaaccagaacctggacatctatgagcagcaggtgatgacagctgcccagaaggatgtgcagatcatcgtgtttcctgaagatggcatccacggcttcaacttcaccaggaccagcatctaccccttcctggacttcatgcccagcccccaggtggtgcgctggaacccctgcctggagccccaccgcttcaatgacacagaggtgctgcagaggctgagctgcatggccatccggggggacatgttcctggtggccaacctgggcaccaaggagccctgccacagcagtgacccccgctgccccaaggatggccgctaccagttcaacaccaacgtggtgttcagcaacaacggcaccctggtggaccgctacaggaagcacaacctgtactttgaagctgcctttgatgtgcccctgaaggtggacctgatcacctttgacaccccatttgctggccgcttcggcatcttcacctgctttgacatcctcttctttgatcctgccatccgggtgctgcgggactacaaggtgaagcacgtggtgtaccccacagcctggatgaaccagctgcccctgctggccgccatcgagatccagaaggcctttgctgtggccttcggcatcaacgtgctggccgccaacgtgcaccaccctgtgctgggcatgactggaagtggcatccacacccccctggagagcttctggtaccatgacatggagaaccccaagagccacctgatcatcgcccaggtggccaagaaccctgtgggcctgattggagcagaaaatgccactggagaaacagaccccagccacagcaagttcctgaagatcctgagcggggacccctactgtgagaaggatgcccaggaggtgcactgtgatgaggccaccaagtggaatgtgaatgccccacccaccttccacagcgagatgatgtatgacaacttcaccctggtgcctgtgtggggcaaggagggctacctgcacgtgtgcagcaatggcctgtgctgctacctgctgtatgaaagacccaccctgagcaaggagctgtatgccctgggcgtgtttgatggcctgcacacagtgcacggcacctactacatccaggtgtgtgccctggtgcgctgtggcggcctgggctttgacacctgtggccaggagatcacagaggccaccggcatctttgagttccacctgtggggcaacttcagcaccagctacatcttccccctcttcctgaccagcggcatgaccctggaggtgcctgaccagctgggctgggagaatgaccactacttcctgaggaagagccggctgagcagcggcctggtgacagctgccctgtatggccgcctgtatgaaagagactag

SEQ ID NO: 791 - DNA, 1632 bp, Artificial Sequence
  derived and/or modified sequence
atggcccacgcccacatccagggcggccggcgggccaagagccggtttgttgtgtgcattatgtcaggggcacggtctaaactggctctctttctgtgcgggtgctacgtggtggcattaggcgcacatactggggaggaatcagtggctgaccaccacgaagctgaatactacgtggcagcagtgtatgagcacccgagcattctgtcattgaatcctctcgccttgatctcacgacaggaagccctggaacttatgaaccaaaatctggatatctacgagcaacaggtgatgacagccgcccagaaagatgtgcagatcatcgtattccccgaggacggcattcatgggttcaactttaccagaaccagtatctacccttttttagactttatgccatccccccaggtagtcagatggaacccctgccttgaaccacacagatttaacgatacggaggtcctccagcgcctgtcctgcatggctattaggggggatatgttcttggttgcgaatctcggcacgaaggagccctgccacagctctgatccaagatgccccaaggacgggcgatatcagtttaacaccaatgtcgttttttctaataacggtacattggtggatcgatatcgaaaacacaatttgtactttgaggccgccttcgacgtgcccctgaaagtggatctaatcacctttgatacaccctttgctggtcgcttcggaatatttacatgttttgatatccttttttttgaccctgccatccgggttctgagagattacaaggtcaaacatgtggtctaccccacagcctggatgaatcagctgccgctgttagccgctattgaaatccagaaggcctttgcggtagccttcggaattaatgtgctggcagcgaatgtgcatcatccagtgctgggtatgaccggatcgggcatacacacgcctctggaatcgttctggtaccacgacatggagaacccaaagagtcacctgataatcgcccaggtcgctaaaaaccccgtgggattaatcggggccgagaacgccactggcgagacggatccttcacatagtaagtttttgaagattttatctggcgatccctactgcgagaaagatgcccaggaagttcactgcgatgaagcaaccaagtggaatgttaacgcaccccctaccttccactcagagatgatgtatgacaacttcaccctggtgcccgtgtggggcaaggagggatacctccatgtgtgttctaacggactgtgctgctacttgctgtacgaacgacctactctctccaaggagttgtacgcacttggggtttttgacggcctgcacacagtgcacggtacatactacatccaggtgtgtgctctggtccgatgtggagggcttgggtttgacacttgtgggcaggaaatcactgaggctaccgggatattcgagttccacctgtggggaaacttctccacaagttacatctttccactgttccttaccagcggcatgactttagaagtacccgatcaactaggctgggaaaatgatcattacttcctgagaaaatcaagattgtctagcgggcttgtgactgctgccctgtacggccggctgtacgagcgagactag

SEQ ID NO: 792 - DNA, 1632 bp, Artificial Sequence
  derived and/or modified sequence
atggctcatgcgcacatccaggggggacgcagagctaaaagtagatttgtggtttgcattatgtccggagcacgttctaaactagcattgttcctgtgcggttgttatgtggtggcactcggagctcatactggagaggagtccgtggcggatcaccatgaggctgagtactacgtcgccgcagtatatgagcatccgagcattctgagcctcaaccccttagctttgatttcccgacaggaggcattggagctcatgaaccagaatttagacatctatgaacagcaggtcatgaccgctgcacaaaaagacgtacaaattattgtgtttccagaagacggtatccacggttttaattttacaagaacctccatctatcccttcttggacttcatgccctcaccacaggtcgtaagatggaacccctgccttgagccccaccgcttcaacgacaccgaagtgctgcaaaggttgagttgcatggccattcgaggtgatatgttcctggtggccaatctcggtaccaaggagccctgtcatagctctgacccccgttgccctaaggacggccgttatcagttcaacacgaatgtggttttttctaacaatggcaccctggtggaccgctatagaaagcataacctgtactttgaggctgcctttgatgtcccgcttaaagttgacctgatcaccttcgacacaccctttgccggacggtttgggatttttacatgcttcgatatcctgttctttgaccccgctatccgcgtcctgcgcgattacaaagtgaaacatgttgtgtatcctaccgcatggatgaatcagcttccactcctggccgctattgagattcagaaggcattcgctgtagcattcggaatcaatgtcctggcggctaatgtgcaccaccccgtgctgggcatgaccggaagtggaatacatacaccactcgagtcattttggtaccacgacatggagaatccaaaatcccacctcatcatcgcgcaagtggctaagaaccctgtgggcctgatcggagccgagaatgctactggcgagacagacccttctcactccaaattcctaaagatcttgtcgggggatccttactgcgagaaagatgcccaggaggtgcattgcgacgaggctacaaagtggaatgtgaacgcacctccaactttccatagtgaaatgatgtacgataattttactctcgtcccagtctggggtaaggaaggttacttgcacgtttgttcaaacggcctgtgctgttatctcctgtatgaacggccaactctgagtaaggagctgtacgctctaggggtgttcgacggtctccacacggtgcacggaacctactacattcaggtttgtgcccttgttaggtgcggcggtttggggtttgacacttgtggacaggagatcacggaagccacagggattttcgaattccatctgtgggggaatttcagcacttcttatattttccctctgttccttacctcaggtatgactctcgaggtgcccgaccagcttggttgggagaacgaccattatttcctaaggaagagcagacttagctctggcctcgtcacagcggcactgtacggaaggctgtatgagagggattag

SEQ ID NO: 793 - DNA, 2075 bp, Artificial Sequence
  derived and/or modified sequence
agcaggagattgctgcctatgcaaagcaggtaagaagccgaactctgaggcctctcgccattgtctccgagtcggccagctggagcgttttcggggctgtaaagggagaatggcgcatgcgcatattcagggcggaaggcgcgctaagagcagatttgtggtctgcattatgtctggagccagaagtaagcttgctcttttcctctgcggctgttacgtggttgccctgggagcccacaccggggaggagagcgtggctgaccatcacgaggctgaatattatgtggctgccgtgtatgagcatccatccatcctgagtctgaaccctctggctctcatcagccgccaagaggccttggagctcatgaaccagaaccttgacatctatgaacagcaagtgatgactgcagcccaaaaggatgtacagattatagtgtttccagaagatggcattcatggattcaactttacaagaacatccatttatccatttttggacttcatgccgtctccccaggtggtcaggtggaacccatgcctggagcctcaccgcttcaatgacacagaggtgctccagcgcctgagttgtatggccatcaggggagatatgttcttggtggccaatcttgggacaaaggagccttgtcatagcagtgacccaaggtgcccaaaagatgggagataccagttcaacacaaatgtcgtgttcagcaataatggaacccttgttgaccgctaccgtaaacacaacctctactttgaggcagcattcgatgttcctcttaaagtggatctcatcacctttgataccccctttgctggcaggtttggcatcttcacatgctttgatatattgttctttgaccctgccatcagagtcctcagagactacaaggtgaagcatgttgtgtacccaactgcctggatgaaccagctcccactcttggcagcaattgagattcagaaagcttttgctgttgcctttggcatcaacgttctggcagctaatgtccaccacccagttctggggatgacaggaagtggcatacacacccctctggagtccttttggtaccatgacatggaaaatcccaaaagtcaccttataattgcccaggtggccaaaaatccagtgggtctcattggtgcagagaatgcaacaggtgaaacggacccatcccatagtaagtttttaaaaattttgtcaggcgatccgtactgtgagaaggatgctcaggaagtccactgtgatgaggccaccaagtggaacgtgaatgctcctcccacatttcactctgagatgatgtatgacaatttcaccctggtccctgtctggggaaaggaaggctatctccacgtctgttccaatggcctctgctgttatttactttacgagaggcccaccttatccaaagagctgtatgccctgggggtctttgatgggcttcacacagtacatggcacttactacatccaagtgtgtgccctggtcaggtgtgggggtcttggcttcgacacctgtggacaggaaatcacagaggccacggggatatttgagtttcacctgtggggcaacttcagtacttcctatatctttcctttgtttctgacctcagggatgaccctagaagtccctgaccagcttggctgggagaatgaccactatttcctgaggaaaagtaggctgtcctctgggctggtgacggcggctctctatgggcgcttgtatgagagggactaggaaaagtgtgtggtctgtggggcggactctggccatcatgttgacagccttgcacttccacaggctacaagccctgggaccatctttctgccttaagggcaggagcccacttctgtggcaccagattccaccctgggaactgtggaaaaagtaggagaggcagattccctcagtgtcttcctcttaaacctcaatcatcgagacattagggggtattttctgttcacatttatctttttcaagccacatcttcctctaacaaatctctcagtatgcgattggtctcaagctaaaacaaaaataaatgtcagtttatattttacacatccacaaa

SEQ ID NO: 794 - DNA, 2138 bp, Artificial Sequence
  derived and/or modified sequence
agttggacttggggagggctgcgcaaaggctgccgggagctgggaagcccggcgcgcgtcgtttgctggggctgtttgtgcgttgctgctgtgctaccgcgttgcgttttctaggcatttacttacacgctttgtggtttacgctctcataaccttgtggttttatagtccttaaattattgtagcgcacgttacttaaatccagaagcagatgtgtaccccagcaagagataaaatgacgctcagagtcagtagatccagaccgtgcctgagatcctgaatcctgtttcctacccactattcagccattgggtcacaagcgatgaaaagagcaccttgaagatttgtggtctgcattatgtctggagccagaagtaagcttgctcttttcctctgcggctgttacgtggttgccctgggagcccacaccggggaggagagcgtggctgaccatcacgaggctgaatattatgtggctgccgtgtatgagcatccatccatcctgagtctgaaccctctggctctcatcagccgccaagaggccttggagctcatgaaccagaaccttgacatctatgaacagcaagtgatgactgcagcccaaaaggatgtacagattatagtgtttccagaagatggcattcatggattcaactttacaagaacatccatttatccatttttggacttcatgccgtctccccaggtggtcaggtggaacccatgcctggagcctcaccgcttcaatgacacagaggtgctccagcgcctgagttgtatggccatcaggggagatatgttcttggtggccaatcttgggacaaaggagccttgtcatagcagtgacccaaggtgcccaaaagatgggagataccagttcaacacaaatgtcgtgttcagcaataatggaacccttgttgaccgctaccgtaaacacaacctctactttgaggcagcattcgatgttcctcttaaagtggatctcatcacctttgataccccctttgctggcaggtttggcatcttcacatgctttgatatattgttctttgaccctgccatcagagtcctcagagactacaaggtgaagcatgttgtgtacccaactgcctggatgaaccagctcccactcttggcagcaattgagattcagaaagcttttgctgttgcctttggcatcaacgttctggcagctaatgtccaccacccagttctggggatgacaggaagtggcatacacacccctctggagtccttttggtaccatgacatggaaaatcccaaaagtcaccttataattgcccaggtggccaaaaatccagtgggtctcattggtgcagagaatgcaacaggtgaaacggacccatcccatagtaagtttttaaaaattttgtcaggcgatccgtactgtgagaaggatgctcaggaagtccactgtgatgaggccaccaagtggaacgtgaatgctcctcccacatttcactctgagatgatgtatgacaatttcaccctggtccctgtctggggaaaggaaggctatctccacgtctgttccaatggcctctgctgttatttactttacgagaggcccaccttatccaaagagctgtatgccctgggggtctttgatgggcttcacacagtacatggcacttactacatccaagtgtgtgccctggtcaggtgtgggggtcttggcttcgacacctgtggacaggaaatcacagaggccacggggatatttgagtttcacctgtggggcaacttcagtacttcctatatctttcctttgtttctgacctcagggatgaccctagaagtccctgaccagcttggctgggagaatgaccactatttcctgaggaaaagtaggctgtcctctgggctggtgacggcggctctctatgggcgcttgtatgagagggactaggaaaagtgtgtggtctgtggggcggactctggccatcatgttgacagccttgcacttccacaggctacaagccctgggaccatctttctgccttaagggcaggagcccacttctgtggcaccagattccaccctgggaactgtggaaaaagtaggagaggcagattccctcagtgtcttcctcttaaacctcaatcatcgagacatta

SEQ ID NO: 795 - DNA, 1632 bp, Artificial Sequence
  derived and/or modified sequence
atggcccacgcccacatccagggcggcagaagagccaagagcagattcgtggtgtgcatcatgagcggcgccagaagcaagctggccctgttcctgtgcggctgctacgtggtggccctgggcgcccacaccggcgaggagagcgtggccgaccaccacgaggccgagtactacgtggccgccgtgtacgagcaccccagcatcctgagcctgaaccccctggccctgatcagcagacaggaggccctggagctgatgaaccagaacctggacatctacgagcagcaggtgatgaccgccgcccagaaggacgtgcagatcatcgtgttccccgaggacggcatccacggcttcaacttcaccagaaccagcatctaccccttcctggacttcatgcccagcccccaggtggtgagatggaacccctgcctggagccccacagattcaacgacaccgaggtgctgcagagactgagctgcatggccatcagaggcgacatgttcctggtggccaacctgggcaccaaggagccctgccacagcagcgaccccagatgccccaaggacggcagataccagttcaacaccaacgtggtgttcagcaacaacggcaccctggtggacagatacagaaagcacaacctgtacttcgaggccgccttcgacgtgcccctgaaggtggacctgatcaccttcgacacccccttcgccggcagattcggcatcttcacctgcttcgacatcctgttcttcgaccccgccatcagagtgctgagagactacaaggtgaagcacgtggtgtaccccaccgcctggatgaaccagctgcccctgctggccgccatcgagatccagaaggccttcgccgtggccttcggcatcaacgtgctggccgccaacgtgcaccaccccgtgctgggcatgaccggcagcggcatccacacccccctggagagcttctggtaccacgacatggagaaccccaagagccacctgatcatcgcccaggtggccaagaaccccgtgggcctgatcggcgccgagaacgccaccggcgagaccgaccccagccacagcaagttcctgaagatcctgagcggcgacccctactgcgagaaggacgcccaggaggtgcactgcgacgaggccaccaagtggaacgtgaacgccccccccaccttccacagcgagatgatgtacgacaacttcaccctggtgcccgtgtggggcaaggagggctacctgcacgtgtgcagcaacggcctgtgctgctacctgctgtacgagagacccaccctgagcaaggagctgtacgccctgggcgtgttcgacggcctgcacaccgtgcacggcacctactacatccaggtgtgcgccctggtgagatgcggcggcctgggcttcgacacctgcggccaggagatcaccgaggccaccggcatcttcgagttccacctgtggggcaacttcagcaccagctacatcttccccctgttcctgaccagcggcatgaccctggaggtgcccgaccagctgggctgggagaacgaccactacttcctgagaaagagcagactgagcagcggcctggtgaccgccgccctgtacggcagactgtacgagagagactag

SEQ ID NO: 796 - protein, 659 aa, Artificial Sequence
  derived and/or modified sequence
MAAVILESIFLKRSQQKKKTSPLNFKKRLFLLTVHKLSYYEYDFERGRRGSKKGSIDVEKITCVETVVPEKNPPPERQIPRRGEESSEMEQISIIERFPYPFQVVYDEGPLYVFSPTEELRKRWIHQLKNVIRYNSDLVQKYHPCFWIDGQYLCCSQTAKNAMGCQILENRNGSLKPGSSHRKTKKPLPPTPEEDQILKKPLPPEPAAAPVSTSELKKVVALYDYMPMNANDLQLRKGDEYFILEESNLPWWRARDKNGQEGYIPSNYVTEAEDSIEMYEWYSKHMTRSQAEQLLKQEGKEGGFIVRDSSKAGKYTVSVFAKSTGDPQGVIRHYVVCSTPQSQYYLAEKHLFSTIPELINYHQHNSAGLISRLKYPVSQQNKNAPSTAGLGYGSWEIDPKDLTFLKELGTGQFGVVKYGKWRGQYDVAIKMIKEGSMSEDEFIEEAKVMMNLSHEKLVQLYGVCTKQRPIFIITEYMANGCLLNYLREMRHRFQTQQLLEMCKDVCEAMEYLESKQFLHRDLAARNCLVNDQGVVKVSDFGLSRYVLDDEYTSSVGSKFPVRWSPPEVLMYSKFSSKSDIWAFGVLMWEIYSLGKMPYERFTNSETAEHIAQGLRLYRPHLASEKVYTIMYSCWHEKADERPTFKILLSNILDVMDEES

SEQ ID NO: 797 - protein, 208 aa, Artificial Sequence
  derived and/or modified sequence
VIRHYVVCSTPQSQYYLAEKHLFSTIPELINYHQHNSAGLISRTQQLLEMCKDVCEAMEYLESKQFLHRDLAARNCLVNDQGVVKVSDFGLSRYVLDDEYTSSVGSKFPVRWSPPEVLMYSKFSSKSDIWAFGVLMWEIYSLGKMPYERFTNSETAEHIAQGLRLYRPHLASEKVYTIMYSCWHEKADERPTFKILLSNILDVMDEES

SEQ ID NO: 798 - protein, 74 aa, Artificial Sequence
  derived and/or modified sequence
VIRHYVVCSTPQSQYYLAEKHLFSTIPELINYHQHNSAGLISRLKYPVSQQNKNAPSTAGLGYGMSWMMNTQAQ

SEQ ID NO: 799 - protein, 172 aa, Artificial Sequence
  derived and/or modified sequence
VIRHYVVCSTPQSQYYLAEKHLFSTIPELINYHQHNSAGLISRLKYPVSQQNKNAPSTAGLGYGSWEIDPKDLTFLKELGTGQFGVVKYGKWRGQYDVAIKMIKEGSMSEDEFIEEAKVMMNLSHEKLVQLYGVCTKQRPIFIITEYMANGCLPCTVAGMRKQMSVPLSKFF

SEQ ID NO: 800 - protein, 197 aa, Artificial Sequence
  derived and/or modified sequence
VIRHYVVCSTPQSQYYLAEKHLFSTIPELINYHQHNSAGLISRLKYPVSQQNKNAPSTAGLGYGSWEIDPKDLTFLKELGTGQFGVVKYGKWRGQYDVAIKMIKEGSMSEDEFIEEAKVMMNLSHEKLVQLYGVCTKQRPIFIITEYMANGCLLNYLREMRHRFQTQQLLEMCKDVCEAMEYLESKQFLHRDLVCPG

SEQ ID NO: 801 - protein, 51 aa, Artificial Sequence
  derived and/or modified sequence
IRHYVVCSTPQSQYYLAEKHLFSTIPELINYHQHNSAGEDSAAARDVQGCL

SEQ ID NO: 802 - DNA, 627 bp, Artificial Sequence
  derived and/or modified sequence
gttattaggcactatgtggtgtgcagcacaccccaaagccagtattacctagctgaaaaacacttgttctccaccatcccagagctgatcaactaccatcagcataactctgcagggttgatatccagaacccaacagctcctggagatgtgtaaagacgtatgcgaggcgatggagtacctggagagcaaacagtttctccatagagatcttgcggcccggaactgcttggttaacgaccaaggcgtggtgaaggtgtcagacttcgggttgtcccgctacgtactcgacgatgaatacacttcttccgtgggctcgaaattccccgtgcgatggtccccccccgaagtgttgatgtatagcaaattttctagcaaaagtgatatatgggccttcggcgttctgatgtgggaaatctattcattgggaaaaatgccatacgaacgctttacaaacagtgagacggcagaacacatagcacagggcctgcggttatacaggcctcacctggcgagtgaaaaggtgtatacaatcatgtacagttgttggcatgaaaaagccgatgaacgtcctacattcaagattttgttatccaatatcctcgatgttatggacgaagaatcatag

SEQ ID NO: 803 - DNA, 705 bp, Artificial Sequence
  derived and/or modified sequence
cgacattacgtcgtgtgcagtacaccccaatctcagtactatttggcagagaagcacctattcagtaccattcccgagctgatcaattatcaccagcataatagtgccgggttgatttcccgcctgaagtatcctgtatcacaacagaataaaaacgctccctctaccgccggcctaggctatggctcttgggagatcgacccaaaggatctcactttcctcaaggagttggggacgggccagttcggtgttgtcaaatatggtaagtggaggggccagtacgacgtcgctataaagatgatcaaggagggctcaatgtccgaggacgagtttatcgaagaagcaaaagtgatgatgtacgtgttggatgatgaatatacatcttctgtcggatccaaatttccagttcggtggtccccgcctgaggtgctcatgtactccaagttttcatctaagtctgacatctgggcatttggcgtgctcatgtgggagatctatagccttgggaagatgccctatgagagatttaccaactcagagactgcggaacacatcgctcaaggactaagactgtatagaccacatctggcatcagaaaaagtgtataccatcatgtattcttgctggcacgagaaagccgacgaacgacccacttttaaaatcctactctcaaatattcttgacgtaatggatgaagaatcctag

SEQ ID NO: 804 - DNA, 225 bp, Artificial Sequence
  derived and/or modified sequence
gtcattagacattatgtcgtgtgtagtacccctcaatcacagtactacctggcagagaagcatctattttctaccattcccgagctgatcaactaccaccaacacaacagtgcagggctgatctcccgacttaaatacccagtttctcaacagaacaaaaacgcgcctagtacagcaggactgggatacgggatgtcatggatgatgaatacgcaggcccaatag

SEQ ID NO: 805 - DNA, 519 bp, Artificial Sequence
  derived and/or modified sequence
gttatccgccactacgtggtgtgttcgacccctcaatcccagtactacttggcagagaagcatctgttcagcaccatccccgaactgattaattatcaccaacacaactccgctgggctgatttctaggttgaaataccctgtgagtcagcaaaataagaacgcaccgtccacggccggtctaggctacggcagctgggagattgatccaaaggaccttactttcttaaaggagctgggaaccgggcaattcggagtggtgaagtacggaaagtggagaggtcagtacgatgttgccataaaaatgataaaggagggctcgatgagcgaagacgaatttatcgaagaggccaaggtgatgatgaacctgtcacatgaaaagttggtgcagctgtatggagtgtgtacaaagcagcgccccattttcataattactgaatacatggcgaacggctgcctgccctgtactgtagctgggatgagaaagcaaatgagcgttccactatccaagttcttctag

SEQ ID NO: 806 - DNA, 594 bp, Artificial Sequence
  derived and/or modified sequence
gttataaggcactatgtcgtatgcagcactcctcagtctcagtactatctggccgaaaagcatctgttttcaacaattcctgagctgatcaactatcatcaacacaatagcgccggcctaatatccaggcttaagtatcccgtgtcccagcagaacaagaatgcgccctctactgcgggcctgggttatggatcctgggagatcgatcctaaggacctcactttcctgaaagagctcggtacagggcagtttggcgtggtgaaatatggcaagtggcgaggacagtatgatgtcgccatcaagatgatcaaagaaggttccatgagtgaagacgagtttattgaggaagccaaggtgatgatgaatctgtctcatgagaaactcgttcagctgtacggcgtctgtacaaaacagaggccgatcttcataatcacagagtatatggcgaacggatgtttgctgaactacttgcgagaaatgcggcataggttccagacccagcagctcctcgagatgtgcaaagatgtttgtgaggcaatggaatatttagaaagcaagcagtttcttcatagggacctcgtctgtcctggatag

SEQ ID NO: 807 - DNA, 156 bp, Artificial Sequence
  derived and/or modified sequence
attcgtcactacgtagtttgctccacccctcagtcccagtactacctggctgagaagcatttgtttagcacgattcctgagcttataaactaccaccagcataacagcgcgggcgaggactcggcggccgctcgcgatgtccagggctgtctctag

SEQ ID NO: 808 - DNA, 627 bp, Artificial Sequence
  derived and/or modified sequence
gtcatccgccactacgtggtgtgcagcaccccccagagccagtactacctggccgagaagcacctgttcagcaccatccctgagctgatcaactaccaccagcacaacagcgctggcctcatcagcaggacccagcagctgctggagatgtgcaaggatgtgtgtgaggccatggagtacctggagagcaagcagttcctgcaccgggacctggccgccaggaactgcctggtgaatgaccagggcgtggtgaaggtgtctgactttggcctgagccgctacgtgctggatgatgagtacaccagctctgtgggcagcaagtttcctgtgcgctggagccccccagaggtgctgatgtacagcaagttcagcagcaagagtgacatctgggccttcggcgtgctgatgtgggagatctacagcctgggcaagatgccctatgagcgcttcaccaacagcgagacagctgagcacatcgcccagggcctgcggctgtaccggccccacctggccagcgagaaggtgtacaccatcatgtacagctgctggcatgagaaggcagatgagcggcccaccttcaagatcctgctgagcaacatcctggatgtgatggatgaggagagctag

SEQ ID NO: 809 - DNA, 705 bp, Artificial Sequence
  derived and/or modified sequence
cgccactacgtggtgtgcagcaccccccagagccagtactacctggccgagaagcacctgttcagcaccatccctgagctgatcaactaccaccagcacaacagcgctggcctcatcagccggctgaagtaccctgtgtcccagcagaacaagaatgcccccagcacagctggcctgggctacggctcctgggagattgaccccaaggacctgaccttcctgaaggagctgggcaccggccagtttggagtggtgaagtatggcaagtggaggggccagtatgatgtggccatcaagatgatcaaggagggctccatgtctgaagatgagttcatcgaggaggccaaggtgatgatgtatgtgctggatgatgagtacaccagctctgtgggcagcaagtttcctgtgcgctggagccccccagaggtgctgatgtacagcaagttcagcagcaagagtgacatctgggccttcggcgtgctgatgtgggagatctacagcctgggcaagatgccctatgagcgcttcaccaacagcgagacagctgagcacatcgcccagggcctgcggctgtaccggccccacctggccagcgagaaggtgtacaccatcatgtacagctgctggcatgagaaggcagatgagcggcccaccttcaagatcctgctgagcaacatcctggatgtgatggatgaggagagctag

SEQ ID NO: 810 - DNA, 225 bp, Artificial Sequence
  derived and/or modified sequence
gtcatccgccactacgtggtgtgcagcaccccccagagccagtactacctggccgagaagcacctgttcagcaccatccctgagctgatcaactaccaccagcacaacagcgctggcctcatcagccggctgaagtaccctgtgtcccagcagaacaagaatgcccccagcacagctggcctgggctacggcatgtcctggatgatgaacacccaggcccagtag

SEQ ID NO: 811 - DNA, 519 bp, Artificial Sequence
  derived and/or modified sequence
gtcatccgccactacgtggtgtgcagcaccccccagagccagtactacctggccgagaagcacctgttcagcaccatccctgagctgatcaactaccaccagcacaacagcgctggcctcatcagccggctgaagtaccctgtgtcccagcagaacaagaatgcccccagcacagctggcctgggctacggctcctgggagattgaccccaaggacctgaccttcctgaaggagctgggcaccggccagtttggagtggtgaagtatggcaagtggaggggccagtatgatgtggccatcaagatgatcaaggagggctccatgtctgaagatgagttcatcgaggaggccaaggtgatgatgaacctgagccatgagaagctggtgcagctgtatggagtgtgcaccaagcagaggcccatcttcatcatcacagagtacatggccaacggctgcctgccctgcaccgtggccggcatgaggaagcagatgtctgtgcccctgagcaagttcttctag

SEQ ID NO: 812 - DNA, 594 bp, Artificial Sequence
  derived and/or modified sequence
gtcatccgccactacgtggtgtgcagcaccccccagagccagtactacctggccgagaagcacctgttcagcaccatccctgagctgatcaactaccaccagcacaacagcgctggcctcatcagccggctgaagtaccctgtgtcccagcagaacaagaatgcccccagcacagctggcctgggctacggctcctgggagattgaccccaaggacctgaccttcctgaaggagctgggcaccggccagtttggagtggtgaagtatggcaagtggaggggccagtatgatgtggccatcaagatgatcaaggagggctccatgtctgaagatgagttcatcgaggaggccaaggtgatgatgaacctgagccatgagaagctggtgcagctgtatggagtgtgcaccaagcagaggcccatcttcatcatcacagagtacatggccaacggctgcctgctgaactacctgcgggagatgaggcaccgcttccagacccagcagctgctggagatgtgcaaggatgtgtgtgaggccatggagtacctggagagcaagcagttcctgcaccgggacctggtgtgccccggctag

SEQ ID NO: 813 - DNA, 156 bp, Artificial Sequence
  derived and/or modified sequence
atccgccactacgtggtgtgcagcaccccccagagccagtactacctggccgagaagcacctgttcagcaccatccctgagctgatcaactaccaccagcacaacagcgctggagaagattctgctgctgccagagatgtgcagggctgcctgtag

SEQ ID NO: 814 - DNA, 627 bp, Artificial Sequence
  derived and/or modified sequence
gtgatccggcactacgtggtgtgcagcaccccccagagccagtactaccttgcagaaaaacatctttttagcacgatacctgaactgattaattaccaccagcacaattccgccggtctgattagcaggacccagcagttactggaaatgtgcaaagacgtgtgcgaggccatggagtatcttgagagtaagcaattcctccaccgggatctggctgcacgcaactgccttgtaaacgaccagggggtggtcaaggtgtccgattttggcctaagccggtatgttctggatgatgagtatacctcaagtgtcggcagtaaatttcctgtaaggtggagcccccctgaagttctgatgtacagtaaattctcatctaaatctgatatttgggcattcggcgtcctcatgtgggaaatctatagtttggggaaaatgccctacgagcggtttacaaattctgagactgctgagcatatcgctcaaggactcaggctgtacagaccccaccttgcatctgaaaaggtttacactattatgtacagttgctggcatgaaaaagccgatgagagacccacttttaaaattctcctgtcgaatattctggacgtgatggatgaggaaagctag

SEQ ID NO: 815 - DNA, 705 bp, Artificial Sequence
  derived and/or modified sequence
cggcactacgtggtgtgcagcaccccccagagccagtactacctggctgagaagcatctctttagcacaatacccgaactgattaattatcaccagcacaactccgccggccttatctcccggttaaaatacccagtgtcccagcagaacaagaacgccccttcaacagcaggcctggggtatggaagctgggagatagacccaaaagatctgactttcctcaaagaactcggaaccggccagtttggcgtcgtcaaatacggcaagtggagaggacagtacgatgtggccattaagatgattaaggagggaagcatgtccgaggatgagtttatcgaagaggcaaaggtgatgatgtatgttctggacgacgagtacactagcagcgttgggtccaagttcccagtaagatggagcccacctgaggtgctgatgtactctaaattttctagcaagagcgacatctgggctttcggcgtcctcatgtgggagatctattccctcggtaaaatgccatacgagcgatttacgaattcagaaacagcagaacacattgcccaagggcttcgactttatcgaccccatttggcctcggagaaggtctatacaatcatgtactcctgctggcatgagaaggccgacgagcgtccgacattcaagatactgctgtctaatatcttagacgtgatggatgaagagagctag

SEQ ID NO: 816 - DNA, 225 bp, Artificial Sequence
  derived and/or modified sequence
gtgatccggcactacgtggtgtgcagcaccccccagagccagtactatctcgctgagaaacatctgttttcaacaataccggaactgatcaactaccaccaacataatagtgcaggactgatatctcggcttaaatatcccgttagtcaacagaataaaaatgccccatctacagccggactgggatacggtatgagttggatgatgaacacacaggcacagtag

SEQ ID NO: 817 - DNA, 519 bp, Artificial Sequence
  derived and/or modified sequence
gtgatccggcactacgtggtgtgcagcaccccccagagccagtactatcttgccgagaaacatttgttctccacaatccccgagctgatcaattatcatcaacacaatagcgctgggctgatttcaagacttaagtaccccgtcagccaacagaataagaatgcgcccagtacagccggccttggctatggcagttgggaaattgaccccaaagatctgactttcctgaaggaactgggcactggacagttcggcgtcgtgaagtacggaaaatggcgcgggcagtatgatgtggctatcaaaatgatcaaagagggatcaatgagtgaagacgaattcattgaagaggcaaaggtcatgatgaacctttcgcatgagaaactggtgcagctctacggtgtttgcactaagcaacgcccaatctttatcattaccgagtacatggccaatggctgtctgccgtgtaccgtagctggcatgcgcaaacagatgagcgtgccactgtctaaattcttctag

SEQ ID NO: 818 - DNA, 594 bp, Artificial Sequence
  derived and/or modified sequence
gtgatccggcactacgtggtgtgcagcaccccccagagccagtactacctggctgaaaagcatctgtttagcaccatcccagaactcatcaattaccaccagcacaattctgcaggattgatttctaggctaaagtaccctgtgtcccagcagaacaagaatgcgccgagcacagcaggcttgggctatggctcttgggagatcgatccaaaagatctcacgtttctgaaggagctggggaccggccagttcggtgtagtgaaatacgggaagtggcgtggtcagtacgacgtggccatcaagatgatcaaggagggctccatgtcagaagatgagtttattgaggaggcaaaggtgatgatgaatttgtcacacgagaagctggtgcagttatacggcgtctgcacgaaacagcgcccgatctttatcatcacggagtacatggcaaatgggtgtcttttgaattacttaagagagatgcggcacagatttcaaacccagcagttactcgaaatgtgcaaggacgtgtgcgaagccatggaatatcttgagagcaagcaattcctgcatcgcgatctggtttgccccggctag

SEQ ID NO: 819 - DNA, 156 bp, Artificial Sequence
  derived and/or modified sequence
atccggcactacgtggtgtgcagcaccccccagagccagtactacctcgccgaaaaacaccttttcagcaccatccctgaactcattaattaccatcagcataacagcgcaggcgaggactccgcagctgctcgggatgtgcaaggctgcctgtag

SEQ ID NO: 820 - DNA, 627 bp, Artificial Sequence
  derived and/or modified sequence
gtaattagacactatgtcgtgtgcagcactccacaaagccagtactaccttgcagagaaacacctcttcagcactattcctgagctgattaattaccatcagcacaactccgccggtctgatcagtaggacccagcagctcttggaaatgtgcaaagacgtatgcgaggccatggagtatctggagagcaagcagtttctgcatagagatctagctgcacgaaactgtctggtcaatgaccagggcgtggtgaaagtgagcgatttcggtctaagcaggtacgtcttagacgacgaatacactagctccgtagggtccaagtttcctgtgagatggtcaccccctgaggtcctcatgtactccaaattcagcagcaagtccgatatctgggcctttggggtcttgatgtgggaaatctattcactgggcaagatgccgtatgaacgcttcactaacagcgaaacggcagagcacattgcccagggactgcgcctatacagacctcatctggcctctgaaaaggtctacactattatgtactcatgctggcatgagaaggccgatgaacggccaacttttaagatcctgctctcaaacatcctagacgtaatggatgaagagtcttag

SEQ ID NO: 821 - DNA, 705 bp, Artificial Sequence
  derived and/or modified sequence
cgccattacgtagtgtgtagcacaccccagtctcagtactatcttgctgagaaacacctgttttcaaccataccagaactaatcaactaccatcagcataacagcgccggtctgatcagtaggctgaaatatcccgtgagccagcagaacaaaaatgcaccttccaccgcgggtttggggtacggctcttgggagatcgaccccaaagacttaaccttcctgaaggaacttgggaccggccagttcggagtcgtgaagtacgggaagtggcgaggccagtatgatgtggccataaaaatgatcaaagagggaagtatgtccgaggatgagtttatcgaggaagctaaagtgatgatgtatgttctcgacgacgaatacacctcatccgtaggatctaaatttcccgtgcgatggagccccccagaggtcttgatgtactccaagttttcatccaaatcggacatttgggccttcggagtcttaatgtgggaaatctactccctcggaaaaatgccttatgagcggttcacaaacagcgagacagcagagcacatcgcgcaaggactgcgtctttaccggcctcaccttgctagcgaaaaggtgtacactatcatgtacagctgctggcacgagaaagccgacgaacggcctacatttaagatcttgctgagtaatattctggacgtcatggacgaagagtcttag

SEQ ID NO: 822 - DNA, 225 bp, Artificial Sequence
  derived and/or modified sequence
gtgatcaggcactatgtcgtttgttccactccacagagccagtattatctggctgagaagcacctcttcagtaccatccctgaactgatcaactatcaccaacataactcagctggactcatttccaggctgaaatatccagtttcgcagcaaaacaagaacgctccctccaccgctgggttgggctatgggatgtcctggatgatgaatacacaggcccagtag

SEQ ID NO: 823 - DNA, 519 bp, Artificial Sequence
  derived and/or modified sequence
gtgatccggcattatgttgtgtgtagtaccccacagtcacagtactaccttgccgaaaagcacttgtttagcactattccagagctcatcaattaccaccagcacaattcagcgggtctgatctctcggcttaagtatcccgtttctcagcagaacaaaaatgctccctctactgccggactgggctacggctcgtgggaaatagatcccaaagacctgacatttctcaaggaactcggcaccggccagttcggtgtggttaaatatggcaagtggaggggccaatatgacgtagccatcaagatgataaaggagggatccatgagcgaggatgagtttatcgaagaggcaaaagtcatgatgaatctgagtcacgaaaagcttgttcagctctacggggtttgtaccaaacagcggccaatctttatcatcaccgagtacatggccaacggttgccttccatgtacagtggcaggaatgcgcaagcaaatgtcagtccccctaagtaagtttttctag

SEQ ID NO: 824 - DNA, 594 bp, Artificial Sequence
  derived and/or modified sequence
gtgatcagacactacgtggtgtgctccacaccacagagccagtactatctagcagagaaacatttattctcaactattcctgaactgatcaattaccaccaacacaacagcgccggtctcatttcgaggttgaagtatcccgtgagccagcagaataagaatgcacccagcaccgcaggactgggctatggctcatgggagattgaccccaaagatttgacctttcttaaggaactcggaaccggtcaattcggagtggtcaagtacggtaaatggcgcggacaatatgacgttgccatcaaaatgatcaaagaagggtcgatgtccgaagatgaatttatagaggaagcaaaagtcatgatgaacctgtcccacgaaaagcttgtccagctttacggagtctgtacgaagcagcggccaatcttcatcatcacagaatatatggcaaatggctgtctcctcaattacctgcgggagatgaggcaccgcttccagacccagcaactgttggaaatgtgcaaagatgtatgcgaagctatggaatatcttgagagcaaacagttcctgcacagggatctagtgtgccccggatag

SEQ ID NO: 825 - DNA, 156 bp, Artificial Sequence
  derived and/or modified sequence
attcggcactacgttgtttgttccactccgcaatcccagtattacctcgcagaaaagcatctttttagtaccataccagaactgatcaactaccaccagcacaacagtgcaggggaagacagcgccgctgcacgagatgtgcaggggtgtctgtag

SEQ ID NO: 826 - DNA, 1065 bp, Artificial Sequence
  derived and/or modified sequence
gtgatacgtcattatgttgtgtgttccacacctcagagccagtattacctggctgagaagcaccttttcagcaccatccctgagctcattaactaccatcagcacaactctgcaggactcatatccaggactcagcagctgctagagatgtgcaaggatgtctgtgaagccatggaatacctggagtcaaagcagttccttcaccgagacctggcagctcgaaactgtttggtaaacgatcaaggagttgttaaagtatctgatttcggcctgtccaggtatgtcctggatgatgaatacacaagctcagtaggctccaaatttccagtccggtggtccccaccggaagtcctgatgtatagcaagttcagcagcaaatctgacatttgggcttttggggttttgatgtgggaaatttactccctggggaagatgccatatgagagatttactaacagtgagactgctgaacacattgcccaaggcctacgtctctacaggcctcatctggcttcagagaaggtatataccatcatgtacagttgctggcatgagaaagcagatgagcgtcccactttcaaaattcttctgagcaatattctagatgtcatggatgaagaatcctgagctcgccaataagcttcttggttctacttctcttctccacaagccccaatttcactttctcagaggaaatcccaagcttaggagccctggagcctttgtgctcccactcaatacaaaaaggcccctctctacatctgggaatgcacctcttctttgattccctgggatagtggcttctgagcaaaggccaagaaattattgtgcctgaaatttcccgagagaattaagacagactgaatttgcgatgaaaatattttttaggagggaggatgtaaatagccgcacaaaggggtccaacagctctttgagtaggcatttggtagagcttgggggtgtgtgtgtgggggtggaccgaatttggcaagaatgaaatggtgtcataaagatgggaggggagggtgttttgataaaataaaattactagaaagcttgaaagtc

SEQ ID NO: 827 - DNA, 1143 bp, Artificial Sequence
  derived and/or modified sequence
cgtcattatgttgtgtgttccacacctcagagccagtattacctggctgagaagcaccttttcagcaccatccctgagctcattaactaccatcagcacaactctgcaggactcatatccaggctcaaatatccagtgtctcaacaaaacaagaatgcaccttccactgcaggcctgggatacggatcatgggaaattgatccaaaggacctgaccttcttgaaggagctggggactggacaatttggggtagtgaagtatgggaaatggagaggccagtacgacgtggccatcaagatgatcaaagaaggctccatgtctgaagatgaattcattgaagaagccaaagtcatgatgtatgtcctggatgatgaatacacaagctcagtaggctccaaatttccagtccggtggtccccaccggaagtcctgatgtatagcaagttcagcagcaaatctgacatttgggcttttggggttttgatgtgggaaatttactccctggggaagatgccatatgagagatttactaacagtgagactgctgaacacattgcccaaggcctacgtctctacaggcctcatctggcttcagagaaggtatataccatcatgtacagttgctggcatgagaaagcagatgagcgtcccactttcaaaattcttctgagcaatattctagatgtcatggatgaagaatcctgagctcgccaataagcttcttggttctacttctcttctccacaagccccaatttcactttctcagaggaaatcccaagcttaggagccctggagcctttgtgctcccactcaatacaaaaaggcccctctctacatctgggaatgcacctcttctttgattccctgggatagtggcttctgagcaaaggccaagaaattattgtgcctgaaatttcccgagagaattaagacagactgaatttgcgatgaaaatattttttaggagggaggatgtaaatagccgcacaaaggggtccaacagctctttgagtaggcatttggtagagcttgggggtgtgtgtgtgggggtggaccgaatttggcaagaatgaaatggtgtcataaagatgggaggggagggtgttttgataaaataaaattactagaaagcttgaaagtc

SEQ ID NO: 828 - DNA, 992 bp, Artificial Sequence
  derived and/or modified sequence
gtgatacgtcattatgttgtgtgttccacacctcagagccagtattacctggctgagaagcaccttttcagcaccatccctgagctcattaactaccatcagcacaactctgcaggactcatatccaggctcaaatatccagtgtctcaacaaaacaagaatgcaccttccactgcaggcctgggatacggatcatgggaaattgatccaaaggacctgaccttcttgaaggagctggggactggacaatttggggtagtgaagtatgggaaatggagaggccagtacgacgtggccatcaagatgatcaaagaaggctccatgtctgaagatgaattcattgaagaagccaaagtcatgatgaatctttcccatgagaagctggtgcagttgtatggcgtctgcaccaagcagcgccccatcttcatcatcactgagtacatggccaatggctgcctcccatgtacagttgctggcatgagaaagcagatgagcgtcccactttcaaaattcttctgagcaatattctagatgtcatggatgaagaatcctgagctcgccaataagcttcttggttctacttctcttctccacaagccccaatttcactttctcagaggaaatcccaagcttaggagccctggagcctttgtgctcccactcaatacaaaaaggcccctctctacatctgggaatgcacctcttctttgattccctgggatagtggcttctgagcaaaggccaagaaattattgtgcctgaaatttcccgagagaattaagacagactgaatttgcgatgaaaatattttttaggagggaggatgtaaatagccgcacaaaggggtccaacagctctttgagtaggcatttggtagagcttgggggtgtgtgtgtgggggtggaccgaatttggcaagaatgaaatggtgtcataaagatgggaggggagggtgttttgataaaataaaattactagaaagcttgaaagtc

SEQ ID NO: 829 - DNA, 698 bp, Artificial Sequence
  derived and/or modified sequence
atacgtcattatgttgtgtgttccacacctcagagccagtattacctggctgagaagcaccttttcagcaccatccctgagctcattaactaccatcagcacaactctgcaggtgaagactcagcagctgctagagatgtgcaaggatgtctgtgaagccatggaatacctggagtcaaagcagttccttcaccgagacctggcagctcgaaactgtttggtaaacgatcaaggagttgttaaagtatctgatttcggcctgtccaggtatgtcctggatgatgaatacacaagctcagtaggctccaaatttccagtccggtggtccccaccggaagtcctgatgtatagcaagttcagcagcaaatctgacatttgggcttttggggttttgatgtgggaaatttactccctggggaagatgccatatgagagatttactaacagtgagactgctgaacacattgcccaaggcctacgtctctacaggcctcatctggcttcagagaaggtatataccatcatgtacagttgctggcatgagaaagcagatgagcgtcccactttcaaaattcttctgagcaatattctagatgtcatggatgaagaatcctgagctcgccaataagcttcttggttctacttctcttctccacaagccccaatttcactttctcagaggaaatcccaagcttagg

SEQ ID NO: 830 - DNA, 627 bp, Artificial Sequence
  derived and/or modified sequence
gtgatcagacactacgtggtgtgcagcaccccccagagccagtactacctggccgagaagcacctgttcagcaccatccccgagctgatcaactaccaccagcacaacagcgccggcctgatcagcagaacccagcagctgctggagatgtgcaaggacgtgtgcgaggccatggagtacctggagagcaagcagttcctgcacagagacctggccgccagaaactgcctggtgaacgaccagggcgtggtgaaggtgagcgacttcggcctgagcagatacgtgctggacgacgagtacaccagcagcgtgggcagcaagttccccgtgagatggagcccccccgaggtgctgatgtacagcaagttcagcagcaagagcgacatctgggccttcggcgtgctgatgtgggagatctacagcctgggcaagatgccctacgagagattcaccaacagcgagaccgccgagcacatcgcccagggcctgagactgtacagaccccacctggccagcgagaaggtgtacaccatcatgtacagctgctggcacgagaaggccgacgagagacccaccttcaagatcctgctgagcaacatcctggacgtgatggacgaggagagctag

SEQ ID NO: 831 - DNA, 705 bp, Artificial Sequence
  derived and/or modified sequence
agacactacgtggtgtgcagcaccccccagagccagtactacctggccgagaagcacctgttcagcaccatccccgagctgatcaactaccaccagcacaacagcgccggcctgatcagcagactgaagtaccccgtgagccagcagaacaagaacgcccccagcaccgccggcctgggctacggcagctgggagatcgaccccaaggacctgaccttcctgaaggagctgggcaccggccagttcggcgtggtgaagtacggcaagtggagaggccagtacgacgtggccatcaagatgatcaaggagggcagcatgagcgaggacgagttcatcgaggaggccaaggtgatgatgtacgtgctggacgacgagtacaccagcagcgtgggcagcaagttccccgtgagatggagcccccccgaggtgctgatgtacagcaagttcagcagcaagagcgacatctgggccttcggcgtgctgatgtgggagatctacagcctgggcaagatgccctacgagagattcaccaacagcgagaccgccgagcacatcgcccagggcctgagactgtacagaccccacctggccagcgagaaggtgtacaccatcatgtacagctgctggcacgagaaggccgacgagagacccaccttcaagatcctgctgagcaacatcctggacgtgatggacgaggagagctag

SEQ ID NO: 832 - DNA, 225 bp, Artificial Sequence
  derived and/or modified sequence
gtgatcagacactacgtggtgtgcagcaccccccagagccagtactacctggccgagaagcacctgttcagcaccatccccgagctgatcaactaccaccagcacaacagcgccggcctgatcagcagactgaagtaccccgtgagccagcagaacaagaacgcccccagcaccgccggcctgggctacggcatgagctggatgatgaacacccaggcccagtag

SEQ ID NO: 833 - DNA, 519 bp, Artificial Sequence
  derived and/or modified sequence
gtgatcagacactacgtggtgtgcagcaccccccagagccagtactacctggccgagaagcacctgttcagcaccatccccgagctgatcaactaccaccagcacaacagcgccggcctgatcagcagactgaagtaccccgtgagccagcagaacaagaacgcccccagcaccgccggcctgggctacggcagctgggagatcgaccccaaggacctgaccttcctgaaggagctgggcaccggccagttcggcgtggtgaagtacggcaagtggagaggccagtacgacgtggccatcaagatgatcaaggagggcagcatgagcgaggacgagttcatcgaggaggccaaggtgatgatgaacctgagccacgagaagctggtgcagctgtacggcgtgtgcaccaagcagagacccatcttcatcatcaccgagtacatggccaacggctgcctgccctgcaccgtggccggcatgagaaagcagatgagcgtgcccctgagcaagttcttctag

SEQ ID NO: 834 - DNA, 594 bp, Artificial Sequence
  derived and/or modified sequence
gtgatcagacactacgtggtgtgcagcaccccccagagccagtactacctggccgagaagcacctgttcagcaccatccccgagctgatcaactaccaccagcacaacagcgccggcctgatcagcagactgaagtaccccgtgagccagcagaacaagaacgcccccagcaccgccggcctgggctacggcagctgggagatcgaccccaaggacctgaccttcctgaaggagctgggcaccggccagttcggcgtggtgaagtacggcaagtggagaggccagtacgacgtggccatcaagatgatcaaggagggcagcatgagcgaggacgagttcatcgaggaggccaaggtgatgatgaacctgagccacgagaagctggtgcagctgtacggcgtgtgcaccaagcagagacccatcttcatcatcaccgagtacatggccaacggctgcctgctgaactacctgagagagatgagacacagattccagacccagcagctgctggagatgtgcaaggacgtgtgcgaggccatggagtacctggagagcaagcagttcctgcacagagacctggtgtgccccggctag

SEQ ID NO: 835 - DNA, 156 bp, Artificial Sequence
  derived and/or modified sequence
atcagacactacgtggtgtgcagcaccccccagagccagtactacctggccgagaagcacctgttcagcaccatccccgagctgatcaactaccaccagcacaacagcgccggcgaggacagcgccgccgccagagacgtgcagggctgcctgtag

SEQ ID NO: 836 - protein, 500 aa, Artificial Sequence
  derived and/or modified sequence
MASRLTLLTLLLLLLAGDRASSNPNATSSSSQDPESLQDRGEGKVATTVISKMLFVEPILEVSSLPTTNSTTNSATKITANTTDEPTTQPTTEPTTQPTIQPTQPTTQLPTDSPTQPTTGSFCPGPVTLCSDLESHSTEAVLGDALVDFSLKLYHAFSAMKKVETNMAFSPFSIASLLTQVLLGAGENTKTNLESILSYPKDFTCVHQALKGFTTKGVTSVSQIFHSPDLAIRDTFVNASRTLYSSSPRVLSNNSDANLELINTWVAKNTNNKISRLLDSLPSDTRLVLLNAIYLSAKWKTTFDPKKTRMEPFHFKNSVIKVPMMNSKKYPVAHFIDQTLKAKVGQLQLSHNLSLVILVPQNLKHRLEDMEQALSPSVFKAIMEKLEMSKFQPTLLTLPRIKVTTSQDMLSIMEKLEFFDFSYDLNLCGLTEDPDLQVSAMQHQTVLELTETGVEAAAASAISVARTLLVFEVQQPFLFVLWDQQHKFPVFMGRVYDPRA

SEQ ID NO: 837 - protein, 505 aa, Artificial Sequence
  derived and/or modified sequence
MASRLTLLTLLLLLLAGFLEPQDRASSNPNATSSSSQDPESLQDRGEGKVATTVISKMLFVEPILEVSSLPTTNSTTNSATKITANTTDEPTTQPTTEPTTQPTIQPTQPTTQLPTDSPTQPTTGSFCPGPVTLCSDLESHSTEAVLGDALVDFSLKLYHAFSAMKKVETNMAFSPFSIASLLTQVLLGAGENTKTNLESILSYPKDFTCVHQALKGFTTKGVTSVSQIFHSPDLAIRDTFVNASRTLYSSSPRVLSNNSDANLELINTWVAKNTNNKISRLLDSLPSDTRLVLLNAIYLSAKWKTTFDPKKTRMEPFHFKNSVIKVPMMNSKKYPVAHFIDQTLKAKVGQLQLSHNLSLVILVPQNLKHRLEDMEQALSPSVFKAIMEKLEMSKFQPTLLTLPRIKVTTSQDMLSIMEKLEFFDFSYDLNLCGLTEDPDLQVSAMQHQTVLELTETGVEAAAASAISVARTLLVFEVQQPFLFVLWDQQHKFPVFMGRVYDPRA

SEQ ID NO: 838 - protein, 448 aa, Artificial Sequence
  derived and/or modified sequence
MLFVEPILEVSSLPTTNSTTNSATKITANTTDEPTTQPTTEPTTQPTIQPTQPTTQLPTDSPTQPTTGSFCPGPVTLCSDLESHSTEAVLGDALVDFSLKLYHAFSAMKKVETNMAFSPFSIASLLTQVLLGAGENTKTNLESILSYPKDFTCVHQALKGFTTKGVTSVSQIFHSPDLAIRDTFVNASRTLYSSSPRVLSNNSDANLELINTWVAKNTNNKISRLLDSLPSDTRLVLLNAIYLSAKWKTTFDPKKTRMEPFHFKNSVIKVPMMNSKKYPVAHFIDQTLKAKVGQLQLSHNLSLVILVPQNLKHRLEDMEQALSPSVFKAIMEKLEMSKFQPTLLTLPRIKVTTSQDMLSIMEKLEFFDFSYDLNLCGLTEDPDLQVSAMQHQTVLELTETGVEAAAASAISVARTLLVFEVQQPFLFVLWDQQHKFPVFMGRVYDPRA

SEQ ID NO: 839 - protein, 160 aa, Artificial Sequence
  derived and/or modified sequence
MASRLTLLTLLLLLLAGDRASSNPNATSSSSQDPESLQDRGEGKVATTVISKMLFVEPILEVSSLPTTNSTTNSATKITANTTDEPTTQPTTEPTTQPTIQPTQPTTQLPTDSPTQPTTGSFCPGPVTLCSDLESHSTEAVLGDALVDFSLKLYHAFSAM

SEQ ID NO: 840 - protein, 133 aa, Artificial Sequence [sequence omitted]

SEQ ID NO: 841 - DNA, 1500 bp, Artificial Sequence
  derived and/or modified sequence
atggccagccgcctgaccctgctgaccctgctgctgctgctgctggccggcgaccgcgccagcagcaaccccaacgccaccagcagcagcagccaggaccccgagagcctgcaggaccgcggcgagggcaaggtggccaccaccgtgatcagcaagatgctgttcgtggagcccatcctggaggtgagcagcctgcccaccaccaacagcaccaccaacagcgccaccaagatcaccgccaacaccaccgacgagcccaccacccagcccaccaccgagcccaccacccagcccaccatccagcccacccagcccaccacccagctgcccaccgacagccccacccagcccaccaccggcagcttctgccccggccccgtgaccctgtgcagcgacctggagagccacagcaccgaggccgtgctgggcgacgccctggtggacttcagcctgaagctgtaccacgccttcagcgccatgaagaaggtggagaccaacatggccttcagccccttcagcatcgccagcctgctgacccaggtgctgctgggcgccggcgagaacaccaagaccaacctggagagcatcctgagctaccccaaggacttcacctgcgtgcaccaggccctgaagggcttcaccaccaagggcgtgaccagcgtgagccagatcttccacagccccgacctggccatccgcgacaccttcgtgaacgccagccgcaccctgtacagcagcagcccccgcgtgctgagcaacaacagcgacgccaacctggagctgatcaacacctgggtggccaagaacaccaacaacaagatcagccgcctgctggacagcctgcccagcgacacccgcctggtgctgctgaacgccatctacctgagcgccaagtggaagaccaccttcgaccccaagaagacccgcatggagcccttccacttcaagaacagcgtgatcaaggtgcccatgatgaacagcaagaagtaccccgtggcccacttcatcgaccagaccctgaaggccaaggtgggccagctgcagctgagccacaacctgagcctggtgatcctggtgccccagaacctgaagcaccgcctggaggacatggagcaggccctgagccccagcgtgttcaaggccatcatggagaagctggagatgagcaagttccagcccaccctgctgaccctgccccgcatcaaggtgaccaccagccaggacatgctgagcatcatggagaagctggagttcttcgacttcagctacgacctgaacctgtgcggcctgaccgaggaccccgacctgcaggtgagcgccatgcagcaccagaccgtgctggagctgaccgagaccggcgtggaggccgccgccgccagcgccatcagcgtggcccgcaccctgctggtgttcgaggtgcagcagcccttcctgttcgtgctgtgggaccagcagcacaagttccccgtgttcatgggccgcgtgtacgacccccgcgcc

SEQ ID NO: 842 - DNA, 1515 bp, Artificial Sequence
  derived and/or modified sequence
atggccagccgcctgaccctgctgaccctgctgctgctgctgctggccggcttcctggagccccaggaccgcgccagcagcaaccccaacgccaccagcagcagcagccaggaccccgagagcctgcaggaccgcggcgagggcaaggtggccaccaccgtgatcagcaagatgctgttcgtggagcccatcctggaggtgagcagcctgcccaccaccaacagcaccaccaacagcgccaccaagatcaccgccaacaccaccgacgagcccaccacccagcccaccaccgagcccaccacccagcccaccatccagcccacccagcccaccacccagctgcccaccgacagccccacccagcccaccaccggcagcttctgccccggccccgtgaccctgtgcagcgacctggagagccacagcaccgaggccgtgctgggcgacgccctggtggacttcagcctgaagctgtaccacgccttcagcgccatgaagaaggtggagaccaacatggccttcagccccttcagcatcgccagcctgctgacccaggtgctgctgggcgccggcgagaacaccaagaccaacctggagagcatcctgagctaccccaaggacttcacctgcgtgcaccaggccctgaagggcttcaccaccaagggcgtgaccagcgtgagccagatcttccacagccccgacctggccatccgcgacaccttcgtgaacgccagccgcaccctgtacagcagcagcccccgcgtgctgagcaacaacagcgacgccaacctggagctgatcaacacctgggtggccaagaacaccaacaacaagatcagccgcctgctggacagcctgcccagcgacacccgcctggtgctgctgaacgccatctacctgagcgccaagtggaagaccaccttcgaccccaagaagacccgcatggagcccttccacttcaagaacagcgtgatcaaggtgcccatgatgaacagcaagaagtaccccgtggcccacttcatcgaccagaccctgaaggccaaggtgggccagctgcagctgagccacaacctgagcctggtgatcctggtgccccagaacctgaagcaccgcctggaggacatggagcaggccctgagccccagcgtgttcaaggccatcatggagaagctggagatgagcaagttccagcccaccctgctgaccctgccccgcatcaaggtgaccaccagccaggacatgctgagcatcatggagaagctggagttcttcgacttcagctacgacctgaacctgtgcggcctgaccgaggaccccgacctgcaggtgagcgccatgcagcaccagaccgtgctggagctgaccgagaccggcgtggaggccgccgccgccagcgccatcagcgtggcccgcaccctgctggtgttcgaggtgcagcagcccttcctgttcgtgctgtgggaccagcagcacaagttccccgtgttcatgggccgcgtgtacgacccccgcgcc

SEQ ID NO: 843 - DNA, 1344 bp, Artificial Sequence
  derived and/or modified sequence
atgctgttcgtggagcccatcctggaggtgagcagcctgcccaccaccaacagcaccaccaacagcgccaccaagatcaccgccaacaccaccgacgagcccaccacccagcccaccaccgagcccaccacccagcccaccatccagcccacccagcccaccacccagctgcccaccgacagccccacccagcccaccaccggcagcttctgccccggccccgtgaccctgtgcagcgacctggagagccacagcaccgaggccgtgctgggcgacgccctggtggacttcagcctgaagctgtaccacgccttcagcgccatgaagaaggtggagaccaacatggccttcagccccttcagcatcgccagcctgctgacccaggtgctgctgggcgccggcgagaacaccaagaccaacctggagagcatcctgagctaccccaaggacttcacctgcgtgcaccaggccctgaagggcttcaccaccaagggcgtgaccagcgtgagccagatcttccacagccccgacctggccatccgcgacaccttcgtgaacgccagccgcaccctgtacagcagcagcccccgcgtgctgagcaacaacagcgacgccaacctggagctgatcaacacctgggtggccaagaacaccaacaacaagatcagccgcctgctggacagcctgcccagcgacacccgcctggtgctgctgaacgccatctacctgagcgccaagtggaagaccaccttcgaccccaagaagacccgcatggagcccttccacttcaagaacagcgtgatcaaggtgcccatgatgaacagcaagaagtaccccgtggcccacttcatcgaccagaccctgaaggccaaggtgggccagctgcagctgagccacaacctgagcctggtgatcctggtgccccagaacctgaagcaccgcctggaggacatggagcaggccctgagccccagcgtgttcaaggccatcatggagaagctggagatgagcaagttccagcccaccctgctgaccctgccccgcatcaaggtgaccaccagccaggacatgctgagcatcatggagaagctggagttcttcgacttcagctacgacctgaacctgtgcggcctgaccgaggaccccgacctgcaggtgagcgccatgcagcaccagaccgtgctggagctgaccgagaccggcgtggaggccgccgccgccagcgccatcagcgtggcccgcaccctgctggtgttcgaggtgcagcagcccttcctgttcgtgctgtgggaccagcagcacaagttccccgtgttcatgggccgcgtgtacgacccccgcgcc

SEQ ID NO: 844 - DNA, 480 bp, Artificial Sequence
  derived and/or modified sequence
atggccagccgcctgaccctgctgaccctgctgctgctgctgctggccggcgaccgcgccagcagcaaccccaacgccaccagcagcagcagccaggaccccgagagcctgcaggaccgcggcgagggcaaggtggccaccaccgtgatcagcaagatgctgttcgtggagcccatcctggaggtgagcagcctgcccaccaccaacagcaccaccaacagcgccaccaagatcaccgccaacaccaccgacgagcccaccacccagcccaccaccgagcccaccacccagcccaccatccagcccacccagcccaccacccagctgcccaccgacagccccacccagcccaccaccggcagcttctgccccggccccgtgaccctgtgcagcgacctggagagccacagcaccgaggccgtgctgggcgacgccctggtggacttcagcctgaagctgtaccacgccttcagcgccatg

SEQ ID NO: 845 - DNA, 1500 bp, Artificial Sequence
  derived and/or modified sequence
atggcttcaaggctcacgttgctgacactgttactacttttactggccggggacagggccagctctaacccaaacgccactagctcttcctcacaagacccagagtctctgcaggaccgcggggagggtaaggttgccaccaccgtaattagcaagatgctgttcgtggaaccaatccttgaggtgtcttcacttccaaccacaaatagcaccacgaattcagccaccaagatcactgcgaacacgaccgacgagcccacgactcagcctaccaccgagcctaccacccagcccaccatccaacctacccagccaacaacccagttaccaactgactctccaactcagcccactactggatccttttgtcctggcccagtcactctgtgcagcgacctggaatcacactcgaccgaagccgtgcttggcgacgctctggtagacttctcgttgaaactttaccatgctttttctgcgatgaagaaagtagagacaaacatggccttcagccccttctccatcgcatccctgcttactcaagtcttgctgggcgccggggaaaataccaagacgaacctagagtccatcctgagctatcccaaagattttacatgtgtgcatcaggcgttgaagggattcaccactaagggcgttacttccgtctcacagatctttcatagccccgatctcgcaatacgcgatacctttgtgaatgcatctcgcactttgtactcttcctctccaagagtgcttagcaacaacagtgacgccaacctggaactgattaacacatgggtagctaagaatactaataacaagatctctagactgctggattctctgccaagcgatacacggctcgtccttctgaacgctatctatctatcagcaaagtggaaaactacctttgatccaaaaaaaacccgcatggaacccttccatttcaagaatagtgtcataaaagtgcccatgatgaatagcaagaaatatcccgtcgcccacttcatcgatcagactcttaaagctaaggtagggcagctccagctgagccacaacctgagcctggtgatcttagtgccccagaaccttaagcatcggctcgaggacatggaacaagccctctctcctagcgtgttcaaagcaatcatggagaaactggaaatgtcaaagttccaacctacactgttaactctgccccggattaaagtaactacttctcaggacatgctgtcaatcatggaaaaactggaattcttcgacttttcctacgatctgaatctatgcggcctcaccgaggacccagacctacaggtttcagcgatgcagcaccaaactgttctcgaactgacagaaaccggtgtggaggcggccgctgcttcagccatcagcgtagccagaactctgctggtgtttgaagtccagcagcctttcttgtttgttttatgggatcagcagcataagtttcctgtgttcatgggccgcgtttacgatcctagagcc

SEQ ID NO: 846 - DNA, 1500 bp, Artificial Sequence
  derived and/or modified sequence
atggcgagccgactcacattgctcaccttgctgctgctgttattggccggggaccgagccagctctaatccaaatgccacctcttcaagttcccaggatccagagagccttcaggaccgtggcgaggggaaggtcgctacaaccgtcatttcgaaaatgctgtttgttgaacctatccttgaggtcagttcactccctacaacaaactcgaccactaactcagcaaccaagatcaccgcaaacactaccgacgaacccaccacacagccgaccaccgaacccacaactcaacccactatccagcctactcaacctaccacccagctgcccacagattctcctacgcagcccactaccgggagcttctgcccaggacctgttacactttgcagcgatctggagagtcatagtaccgaggccgtgttgggcgacgccctggtagatttcagcctcaagctctaccacgcattcagcgctatgaaaaaagtggagaccaatatggccttcagccctttctcaatcgcctcattgctgactcaggtgctgctcggagcaggggagaacactaaaactaacttagagagcatcctctcttacccgaaggatttcacctgtgtccaccaggcgctgaaaggctttacaactaagggggtaacgagtgttagccagatctttcattcacctgatctggcaatcagagatacatttgtaaacgcatctcgaactctttacagcagcagtcccagggtgttaagcaacaatagcgacgcaaatctggagctgattaatacttgggtggcaaaaaataccaacaataagatcagccgattgctggactcattgcccagcgatactagactggttttactgaacgccatctacctgtcagctaaatggaagactacgttcgacccaaagaagacgcggatggaaccctttcatttcaaaaattctgtgatcaaagtgccaatgatgaactccaagaagtatccagtcgcgcacttcatagaccagaccctcaaggctaaggtgggccagctgcagctctcgcacaatctttcgttggttattcttgtgccacaaaatctgaagcaccgacttgaagacatggagcaagcattgtcaccgtcagtctttaaggctataatggagaagctggagatgtctaagttccaaccaactctgctgactttgcctaggatcaaggtgacaacctctcaggacatgctatccattatggagaagctagagttctttgacttttcgtatgatttgaatctctgtggtctgacagaagacccagacctgcaggtgtcagccatgcaacatcaaactgtcctggaactcaccgaaacaggagtggaggcagcagccgcctccgcaattagcgttgctagaactctgctggtctttgaagttcagcaaccgtttctcttcgttttatgggaccagcagcacaaatttcccgtgtttatgggtagggtttacgatcctcgagcc

SEQ ID NO: 847 - DNA, 1500 bp, Artificial Sequence
  derived and/or modified sequence
atggcgtcccggcttaccctgttaaccctgctgctgttgctgctggccggcgacagggcatcctccaatcctaatgccacttcttcttctagccaggaccctgagtcgctccaggataggggggagggcaaggtggcgaccactgttatttcgaagatgctttttgtggagcctattcttgaggtctcgtccctgcccactaccaatagcacgacaaactccgccaccaaaattaccgctaacacgactgatgagccaaccactcagcctactactgagcccaccacccaaccaactatccagcccactcagcccacgacacagctgccgacagatagtccgacacagcccacgactggttcgttttgccccgggccagtgacgctatgttctgatctcgagtcacatagcaccgaagcagttctcggcgatgctctggtcgattttagtctcaaactctaccacgcgttctccgccatgaagaaagtcgagaccaatatggcattctcaccgttcagtatcgcttcactgctcacccaggttctgttgggagccggagagaacactaaaaccaacctggaatcaatcctctcctatcccaaggatttcacctgcgtgcaccaggcccttaaaggctttacaaccaagggggttacgtcagtgtcccagatatttcactcccctgatttggcaatcagggacaccttcgtgaacgcaagtagaaccctatatagctctagccctcgggtgcttagtaacaattctgacgcaaatcttgaactcattaacacctgggtcgctaagaataccaataataagataagcaggctcctggattctctcccttcagatactaggttggttctactgaacgccatttacttgtctgccaaatggaaaactacatttgatcccaaaaaaacccggatggaaccttttcactttaagaattccgtaataaaggtccccatgatgaactctaaaaagtatcctgtggcgcacttcatagatcaaaccctgaaagccaaggttgggcagctgcagctgagccacaacttgtctctggtaattttggtgcctcagaacctgaagcacaggctggaagatatggagcaggctctgtctccatccgtgttcaaagcaatcatggaaaagctcgaaatgtcgaaattccagccgaccttgttaactctccctcggatcaaggtcacgacttctcaagacatgcttagcataatggagaaactggaattcttcgacttcagctatgatcttaacttatgcggtttgaccgaagacccagatctgcaggtatccgccatgcaacatcagacggtcttagaactgacggagacaggggttgaggcggccgcggcatccgcaatttccgtggcgcgtactctgctggtctttgaagtgcagcaaccattcttgtttgtgctctgggaccagcagcacaagttccccgttttcatggggagggtttatgaccctcgagcc

SEQ ID NO: 848 - DNA, 1500 bp, Artificial Sequence
  derived and/or modified sequence
atggcttcgcggctgacgctgctgaccctcctccttcttcttctggcaggagatagagcatcgagcaacccaaatgccacttcaagctcaagccaggatcctgagagccttcaagatcgaggtgagggaaaagtggccaccaccgtcatatccaagatgctcttcgtcgagccaatactcgaagtctcgtcacttcctacgaccaatagcactactaactcggccactaagattactgcgaatacgaccgatgagccaaccacccaaccgactactgaacctaccacccaacctaccatacaacctacccagccaaccacgcagctgccaactgattcgccgacccaacccaccactggctctttctgcccaggacctgtcactctttgttcggaccttgaatcgcactcgactgaagctgtgcttggtgatgcacttgtggatttcagccttaagctgtaccacgctttctctgcaatgaagaaggtggaaacgaacatggcctttagccctttttcaattgcatcgctcctcacccaagtgttgcttggagcaggtgagaacaccaagacgaacctggaatccattcttagctaccctaaagattttacctgtgtgcatcaagcacttaaagggtttaccaccaagggggtcactagcgtctcccagattttccactcccctgatttggcaatcagagatactttcgttaatgcatcaagaactttgtacagcagctcgccgagggtgttgagcaacaactcggatgcaaacctggagctgatcaatacgtgggttgcgaagaatactaacaataagatttcacggctgctcgactcgctgccctcagatactagactggtgctgctgaacgcaatttacctttccgcgaaatggaaaactacctttgatcctaaaaagacccgtatggaaccttttcatttcaaaaactccgtcataaaggtgcccatgatgaactcgaagaaataccctgtggcccatttcattgatcaaactcttaaggccaaagtcggccagcttcagctctcacataatctgtccctggtcattcttgtccctcagaaccttaagcaccgcctggaggatatggagcaggctctgtccccttcggtgtttaaggcaataatggaaaagctcgaaatgtccaagttccagcctacgctgcttacccttccgcgtattaaggtgaccacctctcaagatatgctttcaataatggagaagttggaattctttgacttttcgtacgacctgaatctgtgcggactcactgaagatccagacctccaagtgagcgccatgcaacatcagactgtcttggaattgaccgaaacgggagtggaggccgcagccgcctccgcaatctcagtggcccgcactcttctggtctttgaggtgcaacagccctttctgtttgtgctttgggatcaacagcacaagttcccggtgtttatgggacgggtctatgatccaagagcg

SEQ ID NO: 849 - DNA, 1500 bp, Artificial Sequence
  derived and/or modified sequence
atggcgtcacggctcaccttgctgacgttgctgctcctgctgctggcaggtgaccgcgcaagctcaaatcctaatgccactagctcctcgagccaagacccggagtcgctccaagataggggcgaaggcaaggtggcgaccaccgtgatcagcaagatgctgttcgtggagcccattctggaagtgtccagcctgccgaccacgaactccaccactaactctgccactaagatcaccgctaacactacggatgaaccaacgacccaaccaacgactgaaccgaccacccagccaacgatccagccaacgcagccgaccacccaactccccacggatagccctacgcagcctactactggatcattctgcccgggaccggtcactctgtgtagcgacctggagtcacattcaaccgaggcggtcttgggtgatgcgctcgtggatttttcccttaagctgtaccacgcgttctccgcaatgaagaaggtcgagactaatatggcatttagcccattctcaatcgcctccctcctcactcaagtcctgctgggagccggcgagaataccaagactaacctggagagcatcctctcgtatccgaaggatttcacttgcgtgcaccaggccctgaaaggattcactactaagggagtcacttcggtgtcccagatctttcactccccggacctggccattcgcgatacttttgtgaacgcctcgcggaccctgtactcatcgagcccgcgtgtgctctcgaacaattcggatgccaatcttgaactcattaacacttgggtggcaaagaatactaacaacaagatttcccgcctgttggactcgttgccatcggacaccagactcgtgttgctgaatgctatctacctgtccgcaaagtggaaaaccaccttcgacccgaagaaaactcgcatggaaccgtttcactttaagaactcggtgattaaggtgccgatgatgaattcgaagaagtatccggtggcccacttcatcgatcagactttgaaggcgaaggtcggacaactgcagctgtcccacaacctgtcattggtgatcttggtgccacagaacttgaagcatagactcgaggacatggaacaggccctcagcccgtcggtgttcaaagcaatcatggaaaagctggagatgagcaaatttcagccgactctgctgactctgcccaggattaaagtgactacctcacaggatatgctgtccattatggagaagttggagttcttcgacttttcatacgacctcaatctctgcggactgaccgaggacccggaccttcaagtctccgcaatgcagcaccaaaccgtgctcgaactgaccgaaaccggtgtggaggctgctgcggcgtccgccatctccgtggcgagaaccctcctcgtgtttgaggttcagcagccattcctgttcgtgttgtgggatcaacaacacaaattcccagtgttcatgggccgcgtgtacgacccgcgggcg

SEQ ID NO: 850 - DNA, 1500 bp, Artificial Sequence
  derived and/or modified sequence
atggcctcaagattaacactgctgactctattattgctgctgctcgctggcgaccgggcttcatccaatcccaacgctacctctagtagttcacaagaccccgaaagtctgcaggacaggggagagggtaaggtggccaccacggtaatctcaaagatgctgttcgtggaacccattcttgaggttagcagtctccctacaacgaatagcacaactaactccgctacaaaaatcactgctaatacaactgatgaaccgacaacccagccaactactgaacctacaacccagccaactatccagccaacgcaacctaccacccaactcccaacagacagccccacccagcctactacaggcagcttctgccctggtcctgttactctctgttccgatttggagtcccatagcacagaggcggtgcttggggacgcattggtcgactttagccttaagctgtatcatgcattcagtgcaatgaaaaaagtcgaaacaaatatggccttttccccattttccatcgcatcgctgttgacacaggtgctcctcggcgcaggggagaataccaagaccaatctcgagtccatcctcagctatccaaaagacttcacatgcgtacaccaggcccttaaaggcttcacaaccaagggcgtgactagcgtgtcccaaatcttccactcccccgatctcgctattcgagacaccttcgtcaacgcgtccaggactctgtactccagctccccaagagtgctctccaacaattcagacgcaaacctagaactgattaacacatgggtcgccaagaataccaacaataaaatcagcagactactagactctctcccctctgatactagacttgtgttactgaatgctatatacctatccgccaagtggaaaacgactttcgaccctaagaaaactaggatggagccctttcacttcaagaattccgtcatcaaagtgcccatgatgaacagcaagaagtaccccgttgcccacttcatagatcagacactgaaggcaaaggtcggccagctacagctttctcataacctctccctcgtgattcttgtcccccagaatctgaagcaccgcttggaggatatggagcaggccctgagcccgagtgtgtttaaggctataatggagaaactggagatgtctaagttccagccgaccctgctgaccctgccacgcattaaggtcaccaccagccaggacatgctctctattatggaaaaactcgagtttttcgatttcagttacgacctgaacctctgtggactaacagaggacccggaccttcaggtgtctgcaatgcagcatcaaacagtactcgagctgaccgaaaccggcgtggaagcagccgctgcctcggccatttcagttgccaggactctcctagtgttcgaagtgcagcagcccttcttgttcgtgctgtgggatcagcagcacaaatttccagtgttcatgggaagagtgtatgatcctagggcg

SEQ ID NO: 851 - DNA, 1500 bp, Artificial Sequence
  derived and/or modified sequence
atggcctcaaggttgacactccttactctgctcctcctgctcctggctggagacagggcctcttcaaacccaaacgcgacatcgtctagttcacaggatcctgagagcttgcaggatcgaggtgaaggcaaggtcgccactaccgttatctccaagatgctttttgtcgaaccaatcctagaagtgtcctctttgccaaccacaaacagcacaacaaattcggctaccaagattaccgctaacacgacagacgaaccgacaacccagcctaccactgagcccaccacccagccaacaattcagcctacccagccaacaacgcagctgccaactgacagtcccacacagcccaccacaggcagcttctgccccgggccagtaaccctatgcagcgaccttgagagtcactccactgaagccgtgctcggagatgctctggtagatttctcgctgaagctctatcatgctttttcggccatgaagaaagtagaaacgaatatggccttctcccctttttccattgcctcgcttctgacgcaggtgctgctcggagctggagagaacaccaaaactaatctcgagtctatcttgagttaccccaaggactttacatgtgtccatcaggccctgaagggcttcactacaaaaggagttacctcagtcagccagattttccactccccggacctggcgatcagggacacttttgttaacgctagcaggacgctgtattcaagtagcccccgggtcctgagtaacaacagtgacgccaacctggagctgatcaatacatgggtcgccaagaacactaataacaagatttccaggttactggactctctccccagtgatacgcgtctggtgctactgaacgcaatttacttgagcgcgaagtggaagacaactttcgaccctaagaaaacaagaatggaaccatttcacttcaagaattcggtcattaaagtgccaatgatgaacagcaaaaagtaccccgtggctcacttcatagaccagactttaaaggctaaggtagggcagctgcagctttctcacaatttaagcttagtgatccttgtgccccaaaaccttaagcatagacttgaggatatggaacaggctctctcaccttccgtgttcaaagccataatggagaagctggagatgagtaaatttcagccaactttactcaccctgcccagaattaaggtgaccacgtctcaggacatgttatccattatggaaaagttagaatttttcgatttttcatacgacttgaacctttgtggcctgactgaggatcctgatctgcaggtgtccgctatgcagcatcagaccgtgctcgaacttactgagaccggggttgaggcagcagcagcttctgcaatttccgtcgcccggacactgttagtgtttgaggtgcagcagcctttcctgtttgtgttgtgggatcagcaacacaaattccccgttttcatgggtcgcgtgtacgatccacgtgct

SEQ ID NO: 852 - DNA, 1500 bp, Artificial Sequence
  derived and/or modified sequence
atggcaagccgtctcaccctccttacgttgctgcttctgctgcttgctggggatcgggcttcctcaaaccctaacgcgacgagctctagcagccaggacccagaatccttgcaagaccgcggagagggaaaagtggccacgactgttatcagcaagatgctcttcgttgaacctatcttggaagtatcgagcctcccaaccaccaacagcaccacgaacagcgctactaaaatcaccgcaaatactactgacgaaccgactacccagccaaccactgagcccactactcaaccaactattcagccgactcaaccaaccacgcagctgccaaccgacagccccacccaacccaccaccggttcgttttgccctggaccggtgactctgtgttctgatctggagtcacattcgactgaagcggtgcttggagatgccctggtggacttctcgctcaaactctaccatgcgttttcggccatgaagaaagtggagacgaatatggcattctccccattctcaatagcctcgctgctgacccaggtcctccttggagcaggcgaaaacaccaagaccaatctcgagtcgatcttgtcgtatccaaaggatttcacgtgcgtgcaccaagctctcaagggtttcactactaagggggtcacttcggtgtcgcaaatctttcattcgccggacctggcgattagagataccttcgtgaatgcctcccgcactctctactcatcctcacctcgagtgctttcaaataactccgatgcgaatctggaactcattaacacctgggtggcgaaaaacactaataacaagatctcccgtctgctggactcgttgccgtcggacactcggttggtcctcctcaacgcaatttacttgtccgctaagtggaaaactaccttcgaccctaagaaaacgcggatggagccgttccacttcaagaacagcgtcatcaaagtccctatgatgaactccaaaaagtacccggtcgctcatttcatcgaccagactctgaaagcgaaagtcgggcaactgcagctgtcacacaatctctccctggtgatcctggtcccgcagaaccttaaacacaggctggaggacatggagcaggccctgagcccgtcggtctttaaggcaataatggagaagctcgaaatgtcgaagttccagccaactctgcttaccttgcctcgcatcaaggtgaccacttcgcaagacatgctctccatcatggaaaagttggagtttttcgacttttcgtacgacctgaacctgtgcggactcaccgaagatcccgatctgcaggtgtcggcgatgcagcaccagaccgtgctcgagctgaccgaaacgggcgtggaggcggccgccgcctcggctatctcagtcgctcgcaccctcctggtttttgaagtgcagcagcctttcctgtttgtcctgtgggaccaacaacacaagttccccgtgttcatggggcgggtgtacgatcctagggcc

SEQ ID NO: 853 - DNA, 1500 bp, Artificial Sequence
  derived and/or modified sequence
atggcttccaggctgactctgttaaccttgctgttgctgctgctggccggcgaccgcgcctcttccaacccaaacgcaaccagctcttcctcacaagatccagaatccctccaagatcgcggggaaggaaaggtagccaccacggtgatatctaagatgcttttcgttgagcctattctggaggtttcgagtctgcctactactaacagcactacaaacagcgcaacaaaaattaccgcgaatacgacagatgagcctaccacccaaccgaccactgagcctactacacaacctactattcagccaacccagccaaccactcagctgccaacagatagtccgacacagcctacaacaggtagcttctgccccggacccgtaactttatgtagtgatctagagagccattccaccgaggctgtgctgggcgatgccctggtggatttcagtctgaagctgtatcatgccttttcggccatgaagaaggtcgagaccaatatggcgtttagcccgttttcaatcgctagtctgctgactcaagtactgctgggggccggagaaaatacaaagacgaatctcgaatcaattctgtcgtacccaaaggatttcacgtgtgtgcaccaagctttgaagggatttacaacgaagggcgtgacatctgtgagtcagatatttcatagtccagatttggcgatcagagacactttcgtgaatgcttcccggacactctatagttcttcaccacgggttctgtcaaataattcagacgctaatctggagcttataaacacatgggttgccaaaaatactaataacaaaatatctcgcttgctggattcactgccttctgacacccgcttggtgctgctaaatgccatctatctgtccgcaaagtggaagacgactttcgaccctaagaagacccgtatggagccattccacttcaaaaacagtgtcatcaaggttcccatgatgaatagcaagaagtatccagtggcacattttattgatcagactttgaaagctaaggtggggcagttgcagctctcccataatttgtcactggtcatcctggttcctcagaatttgaaacaccggttggaggacatggagcaggccctcagtccatcagtattcaaagccatcatggagaaactcgagatgtcaaagttccagcccacccttttaaccctgccccgcattaaagtgaccaccagccaggacatgctgagcatcatggaaaagctcgaatttttcgacttctcgtacgatcttaatctgtgcgggctgacagaagacccagacctgcaggtaagtgcaatgcagcatcagacagtgctggaactcaccgaaactggtgtggaggccgcagcagcaagcgctatttcagtcgcaaggactctgctcgtcttcgaagtccagcaaccatttcttttcgttctgtgggaccagcagcataagttccccgtattcatgggcagagtctacgatccccgcgcc

SEQ ID NO: 854 - DNA, 1500 bp, Artificial Sequence
  derived and/or modified sequence
atggcctcaagattgaccttgctgacgctgctgctgcttcttctggccggcgatagagcatcgtcgaacccaaatgcaacctcctcgtcgagccaggaccctgaaagcctgcaagacaggggagaaggtaaggtggcaactactgtgatctccaagatgctgtttgtcgaaccaattctcgaagtgtcgtcgctgcccactactaattccactactaactccgctaccaagatcactgctaacaccactgatgaaccaactacccaaccaaccacggaacccaccactcaaccaaccattcagccaactcagcctactacccagcttcctaccgattcaccgactcagcctaccaccggatccttttgtcccggacctgtgactctctgctccgatcttgagtcgcactctactgaggcagtgcttggcgatgcccttgtggacttctcgctgaaactctaccatgctttttccgcaatgaagaaggtggagactaatatggccttttcaccattttcgatagcatcactgctcacgcaagttctgctgggcgccggagaaaacaccaaaactaaccttgagtctattctttcttaccctaaggatttcacttgtgtgcatcaggcacttaagggttttactactaagggcgtcaccagcgtgtcccagatattccactcccccgaccttgcaattcgtgatactttcgtgaacgcatcgcgaaccctttactcgagcagccctagggtgctttcgaataactcggacgcaaatctggaactgatcaacacgtgggtcgcaaagaatacgaataacaagatcagcaggcttctggatagtctcccttcagatacccggcttgtgctccttaacgcaatttacctttctgccaagtggaaaaccacctttgaccctaagaaaacccggatggaaccatttcactttaagaactctgtgataaaagtgccaatgatgaatagcaagaagtaccctgtggcacactttatcgatcagactcttaaagcaaaagtgggtcagcttcagctgagccataatctttcattggtcattcttgtcccgcaaaatcttaagcatcgacttgaggatatggaacaggctctgtcgccctcggtgttcaaggctattatggaaaagctggagatgtcgaaatttcagccaaccctgctcaccctgccgcggatcaaggtgaccacctcgcaagatatgctctcaattatggagaagctggagtttttcgacttttcctacgatctgaatctgtgtggtctgaccgaagatcctgatcttcaagtctcagcgatgcagcatcaaaccgtgctggaactgaccgaaaccggcgtggaggcggccgctgcttcagcaatttcggtggcaagaaccttgctcgtattcgaggtgcagcagccatttctttttgtgctctgggatcaacaacataagttcccagtctttatggggagagtctacgatcctagagct

SEQ ID NO: 855 - DNA, 1500 bp, Artificial Sequence
  derived and/or modified sequence
atggcaagccgcctcaccctgctgactctcctgctgctgctgctcgctggagacagagcctcctcaaacccgaatgcaaccagctcgtccagccaagacccggaatcgcttcaagaccggggcgaaggaaaggtggccaccactgtgatctccaaaatgctcttcgtcgaacctatcctcgaggtgtcatcacttcctaccaccaactcaaccaccaactccgcaactaagatcaccgccaatactacggacgaaccgacgacccagccgacgactgaaccaactactcagccgaccatccagccgactcagccgactacccagctccctactgattccccaactcaaccgaccaccgggtccttctgccctggaccggtgaccctgtgtagcgatcttgaatcgcactcgaccgaggccgtcttgggagatgcgctggtcgacttttcccttaaactctaccatgccttctccgctatgaaaaaggtagaaaccaatatggcattctcccccttctcaatcgcgtcactgctgactcaggtgctgctcggagcgggcgaaaatactaagactaacctggagtcgatcctgtcctacccaaaggacttcacgtgcgtccatcaggcactcaaaggatttactactaagggcgtgacttccgtctcgcagatctttcacagcccggatctggcaattcgggacacctttgtgaacgcctcccgtaccctgtacagtagctccccgcgggtgctctccaacaattcggacgccaatctggaactgatcaacacctgggtggcaaagaacaccaacaacaagatttcacgcttgttggactccctgccgtccgatactcgcctggtgctgctgaacgccatctatttgagcgccaagtggaaaaccacgtttgacccaaaaaagacccgtatggaacctttccacttcaagaactcggtcatcaaagtgccgatgatgaactctaagaaataccccgtcgcgcatttcatcgaccaaaccctgaaggccaaggtgggacagctccagctcagccataatctctcactggtgatcctggtgccgcagaacctgaagcatcgcctggaggatatggagcaggccctgtcgccttccgtctttaaggccatcatggaaaagctggaaatgtccaaattccagccaacgctgctgaccctgcctagaatcaaggtcaccacttcccaggacatgctttcgatcatggagaaacttgaattcttcgacttctcgtacgatctgaacttgtgtggactgactgaagatcccgacctccaggtgtcagcaatgcaacaccaaaccgtgctggaactcactgagacgggagtggaagcggctgccgcctccgcgatctcagttgcccgcacccttctcgtgtttgaagtccaacagccgtttctgttcgtgctctgggaccagcaacacaagttccccgtctttatgggccgggtgtacgacccccgcgct

SEQ ID NO: 856 - DNA, 1500 bp, Artificial Sequence
  derived and/or modified sequence
atggcctcacgcctgactctgttgacccttctcctgctgctgctggccggcgatagggcatcatctaaccctaatgcaactagttcctcaagccaagaccccgagagtctgcaggatagaggcgagggtaaagtcgccacgaccgttatctccaagatgctctttgtggaacccatcctcgaagtatcctcattaccaactacaaattcgactactaactctgccaccaaaattaccgccaatacgacagatgagcccactacccagcctacaactgagccaaccacccagcctaccattcagcctactcagcccactacacagcttcccacggactccccgacgcagcctacgaccgggagcttttgtcccggacctgtgaccctgtgctcagatctggaatcacactccaccgaggcagtactgggagatgcgcttgttgatttttctcttaaactgtaccacgccttctctgctatgaaaaaggtggagactaatatggccttctcgcccttttcaatagcttccttgctgacacaggtcctactgggtgccggcgagaataccaaaacaaatctggagtctatcctttcctatcccaaggacttcacttgcgtgcaccaggcactcaagggcttcacgacaaagggagtcacgagcgtgtctcagatctttcacagtcctgatttagctatccgcgacacctttgtgaacgcatcacggacactttactcctccagccccagagtgctgagcaacaatagtgacgccaatcttgagcttatcaatacctgggtggccaagaacaccaataataaaatcagcagactgctcgactcactgccctcggataccagattggtactccttaatgctatctatttgagcgcaaagtggaagacgacattcgaccccaaaaaaacacggatggagccttttcactttaagaattcagtaattaaagttcctatgatgaatagtaaaaagtatccagttgcgcatttcatcgaccaaacgcttaaggccaaggtgggccaactccaactctcacacaatttaagtctggtgatattggttcctcagaacctgaagcaccgcctggaggatatggagcaggcattatctccgagtgtgttcaaggcgattatggagaagctggaaatgtctaagttccagcccactctactgacccttccccggatcaaggtgacaacaagccaggacatgttgtccataatggaaaagctagagttctttgacttctcatatgatctgaacctgtgcgggcttaccgaggacccggatcttcaggtgtccgccatgcaacatcagacggttttggagttgaccgaaaccggcgtggaggcagccgcagccagcgcaattagtgtggctagaacactcttggtgttcgaggtgcagcaaccttttctgtttgtactgtgggaccagcaacacaaattccctgtcttcatgggtagagtttacgaccccagagcc

SEQ ID NO: 857 - DNA, 1500 bp, Artificial Sequence
  derived and/or modified sequence
atggcaagtcgactcacattgcttaccctacttctgctgttgttggctggcgacagagccagctcaaatcctaatgccacaagcagctcaagccaggatcccgagtccttgcaggaccgcggggaaggcaaggtggccacgacagtgataagtaagatgctctttgtggaacccatcctcgaagttagtagcttaccaaccactaacagcacaacgaattccgcaacaaagatcaccgccaacacaacagatgagccaacgacacagccgaccacagagcccacaacccagccgacgatccagcccacccagcctaccacccagctgccaaccgattcacccactcagccaactacgggctccttctgtccaggccctgtgacgctctgctctgacttggaatctcacagcacagaggcggtgcttggggatgcactggtggacttttctctgaaattgtatcacgcattcagcgccatgaagaaagtggaaactaatatggcattctctcctttcagtattgcctccctgcttacccaagtgctgctcggcgctggggagaatactaaaactaatctggagagcatcctgtcctatcctaaagacttcacgtgcgtgcaccaggcactcaaggggtttactacaaaaggagtgacttctgtgagccagatcttccacagtcccgacctcgctatccgggatacctttgttaacgccagtcggacgttgtacagcagttcccccagagtgctgtctaacaactctgatgctaacctggaactgatcaacacttgggtggccaagaataccaataacaagatttccaggctgctggactctttgcctagcgacacacgcttagtgctgctgaacgccatatacctgtctgccaaatggaagactacctttgacccaaagaagactcgcatggagccatttcacttcaagaactcagtgattaaggtgcctatgatgaattctaagaagtaccccgtggcacacttcatcgaccagaccttaaaggccaaagtaggccagcttcagctgtcccacaatctgagtttggtcatactggttccacagaatctaaagcaccggctagaggacatggagcaggctctgtctcctagtgtgtttaaggccattatggaaaagctggagatgagcaagtttcagcctaccctcctgacactgccaaggattaaagtcaccacatcacaggatatgctgagtattatggagaaactggagttcttcgatttttcttacgacctgaacctctgtggacttacagaggatcctgatttgcaggtgtccgctatgcagcatcagactgtgctggagttaaccgagactggagttgaggcagcagctgcatccgcgatatcagtggcaaggactttgctcgttttcgaggtacaacagccttttctcttcgtgttgtgggatcagcaacataagttcccagtgttcatgggacgggtctatgacccccgagcg

SEQ ID NO: 858 - DNA, 1500 bp, Artificial Sequence
  derived and/or modified sequence
atggcatcaagactgactcttcttacccttctgctgctgctgcttgcaggagatcgcgctagttccaatcccaacgccactagctcttcttcgcaggacccggaatcactgcaagatcgaggagagggtaaggtggcgaccaccgtgatatctaagatgttgttcgtagagcctattctggaagtgtcgtcgcttcccacgactaatagcacgaccaattctgccacgaagattacggcaaataccaccgatgaaccaactacccaacctactaccgaacctactactcagcctactatccaaccaactcagcccacgactcaactgccgacggatagtcctactcaaccaacgacgggttcattttgcccagggcccgtgacgctttgttcggatcttgaatcacatagtactgaagccgtcctgggcgatgcacttgtggattttagccttaagttgtaccatgcattttcggctatgaagaaggttgagacgaacatggcgttcagcccttttagcattgcatcactcttgacgcaagtgctcctcggcgcaggggaaaacaccaagactaaccttgaatcgattctgtcgtacccaaaggactttacctgtgtgcatcaggccctgaagggttttacgacgaagggagtcacctcggtgtcccaaatcttccactccccagaccttgcaatccgtgacactttcgtgaatgcatctcggaccttgtatagctcgtcgccacgggtgcttagcaacaacagcgatgcaaaccttgaattgattaacacctgggtcgcaaaaaacaccaacaacaagatctcgagactgctcgactctcttccctccgacactcgcctcgtgctgctcaacgctatttacctgtcagctaagtggaaaactacctttgatccgaaaaagaccaggatggagccattccatttcaaaaactccgtcataaaagtcccaatgatgaattccaaaaagtacccggtggcccatttcatcgaccagactctgaaggcaaaggtggggcaactgcaactgtcacacaaccttagccttgtcatcttggtcccacagaatcttaaacacagattggaggatatggagcaggccttgtccccttcagtgttcaaggccattatggagaagctggaaatgtcgaagtttcaacctaccctgctgaccctgccccggatcaaggttactacttcgcaagatatgcttagcatcatggaaaaacttgagttttttgatttctcatacgacctcaatctgtgtggactgactgaagatcctgatttgcaagtgtcagcaatgcagcatcagaccgtgctggaacttaccgaaaccggcgtcgaggcagccgcagcaagcgcaatttccgtcgctaggacgctcctggtgtttgaggtgcagcagccatttctcttcgtgctgtgggatcaacaacacaaatttccagttttcatgggacgggtgtacgaccctagagca

SEQ ID NO: 859 - DNA, 1500 bp, Artificial Sequence
  derived and/or modified sequence
atggccagcaggcttacgctcttgaccttgctgttgctactccttgccggagatagggctagctctaaccctaacgcaacctcatcttcaagccaggatcccgagtctttacaggatagaggcgaaggaaaggtcgccacaactgtgatatccaaaatgctctttgtagaacctatactggaagtgtccagcctgccaaccactaactcaactacaaatagtgcaactaagatcacagccaacacgacggatgagcctacgacccagccaaccaccgagcccacaacacagccaacgatccaacccactcagcccaccactcagctgcccacagattctcccactcagcccactaccggctcattctgcccaggccccgtgacactgtgttccgatttagagtctcactcaacggaggctgtgcttggggatgctttggtcgatttttcgcttaaattgtatcacgcatttagcgccatgaaaaaggtggagacaaatatggccttcagtccattttccattgcgtcccttctcacccaggtgttactgggggcaggagagaacacaaaaacaaacctcgagtctatactttcgtatccaaaggactttacgtgtgtacatcaggccttaaaggggtttactaccaaaggcgtgacatctgtttcacagatttttcatagccccgatctcgcaatcagagatacattcgtgaacgccagtagaacactctactcttcttcacctcgggtgctctccaacaacagtgacgccaacttggaactaattaacacctgggtggctaagaacacaaataataagatatccagactcctggacagtctcccatctgataccaggttggtgctgctgaacgcgatctatctatcagccaaatggaagacaacattcgacccaaagaaaacccggatggagccattccactttaagaacagtgtgattaaggtaccaatgatgaatagtaaaaagtacccggttgcccatttcatcgatcaaacactgaaagcaaaagtgggtcagttgcagttgtctcacaatctgagcctggtgatccttgtgccacagaatctcaagcatagactcgaagacatggaacaggccctgtcaccctccgtctttaaagcaattatggagaagctagaaatgtctaagttccagccaactctcttgacactccctcggatcaaagtgaccacttctcaggacatgctcagcattatggaaaagctcgagtttttcgacttttcatatgacctcaacctctgcggattgacggaggacccagacctacaagtctctgccatgcagcaccagaccgtgctggagctgactgagaccggggtcgaagctgctgctgcatcagcgatttcagtcgcccggacccttttagtctttgaggttcagcagccattcctgtttgtgctctgggaccagcagcataaatttccggtgttcatgggacgagtctacgacccaagagca

SEQ ID NO: 860 - DNA, 1500 bp, Artificial Sequence
  derived and/or modified sequence
atggcctctcgactcaccctgctcactcttctgctgttgctcttggcgggagatagagcgtccagtaaccccaatgccacttcttcctcctctcaggatcccgagtccctccaggaccggggggagggcaaggtggcaacaactgtcatatccaaaatgctcttcgtggaacccatcctcgaagttagctctctccccacaaccaactctactaccaacagtgcaacaaagattacggcgaacactacagatgagccaacaactcagccgactacagaaccaactacccagccaaccattcagcccacacagcctaccactcagctcccaactgactcccccactcagccgacaactggaagcttctgcccaggccctgtaaccctgtgttccgatctggagtcgcattctaccgaggccgtgctaggggacgccctggtggacttttctctgaagttgtatcacgcatttagcgccatgaaaaaggtggaaacaaacatggccttttcccctttctcaattgcatccctattaacgcaagtcctactgggtgccggggaaaacactaagaccaacctggagagcattctgagctatcccaaagacttcacgtgcgttcaccaggctctaaaaggcttcacgactaagggagttacttctgtgagtcaaattttccattccccagaccttgccatccgcgacacattcgtcaatgcaagtcgcactctgtactcctcatcacccagggttctgtccaacaacagcgatgccaatctggagctgattaacacgtgggttgcaaagaacacaaacaacaagatttcacgcctcctagatagccttccgtccgacacacggctagtgctgttaaacgcaatatacctgtccgcaaaatggaaaaccactttcgacccaaaaaagacccgcatggagcctttccacttcaagaacagtgttatcaaagtaccaatgatgaatagcaaaaagtaccctgtggcccactttatagaccagacgcttaaggctaaggtagggcagttacagttaagccacaatttgagcctcgttatcttggtgcctcagaacctgaaacaccggctggaagatatggaacaggccctgagcccctcagtttttaaggcgatcatggagaagctcgagatgagtaagtttcagcctaccctgttgactttgccgaggataaaggtcaccacatctcaggatatgctcagcattatggagaagcttgagttctttgatttttcttacgacctaaatctctgcggccttactgaggacccagatctacaggtcagtgcaatgcagcaccaaacagttttagaactgactgagacaggagtggaggctgcagcagcatctgctatcagtgttgcgcggaccttgctcgttttcgaggtgcagcagcccttcctgtttgtgttgtgggaccaacagcataagtttcccgttttcatgggccgagtctacgatccgcgagca

SEQ ID NO: 861 - DNA, 1500 bp, Artificial Sequence
  derived and/or modified sequence
atggcctcgcgactgaccttgctgaccctcctcctcctgcttctcgctggagatagagcctcgagcaacccgaatgcgaccagctcttcgtcgcaggacccggaatcgctgcaggatcgtggagaagggaaagtggcaaccaccgtgatatcgaagatgttgtttgtggagccaattctcgaagtgtcgtccctcccaaccactaactcgaccacgaacagcgctacgaaaatcaccgccaatacgaccgacgaaccgaccactcaaccaactactgagccaactacccagccgactatccaaccgacgcagccaacgacccaactccccactgatagcccgacccagcctactaccggatccttctgtccggggccagtgaccctgtgctcagaccttgagtcccattccaccgaagctgttctcggtgacgccctggtggacttctcgctgaagctctaccacgcattttccgcgatgaagaaggtcgaaaccaacatggcattctccccgtttagcatcgcgtccctgcttacccaggtgctgctcggcgcaggagagaacaccaaaaccaacctcgagtcgattctgtcctaccctaaggatttcacttgcgttcaccaagctctgaagggatttacgaccaagggagtgacgagcgtgtctcagattttccattcgccagacctggccattcgcgatacctttgtcaacgcctccaggactctttactcctcctcgccgcgcgtgctgtctaacaatagtgacgctaatctggagctcattaacacctgggtggccaaaaacacgaacaataagatctcacggcttctcgactcactcccgtcagacactaggctggtcctgttgaacgctatctacctgtcggccaagtggaaaactaccttcgacccgaagaaaacccgcatggagccgttccacttcaaaaactccgttatcaaggtcccgatgatgaacagcaagaaatacccggtggcgcacttcatcgaccaaacccttaaggccaaagtgggacaactgcagctcagtcataacctgtccctcgtgatcttggtgccacaaaacctgaaacaccggctggaggatatggaacaggcgctctcgccaagcgtgtttaaggcaatcatggaaaaactggaaatgtcaaaattccagccgactctcctcacgctgccccggatcaaggtcacgactagccaggacatgctgtccattatggagaaactggagttcttcgactttagctacgacctgaacctgtgcggactgaccgaagatccggacctgcaagtctcggcgatgcaacatcagaccgtgttggagctgaccgaaaccggggtggaagcggctgccgcgtcagccatctccgttgctcggaccttgctcgtgtttgaggtgcagcaacctttcctgttcgtcctttgggaccagcagcacaaattcccggtgtttatgggccgggtctacgacccgcgcgcc

SEQ ID NO: 862 - DNA, 1500 bp, Artificial Sequence
  derived and/or modified sequence
atggccagcaggcttacactcttaacgctcttgcttctcttgctcgctggagatcgcgcttcgagcaaccctaacgcgacgagctcctccagccaggacccggagtccctgcaggatcggggcgaaggtaaggtggccaccaccgttattagtaagatgctgtttgtggagcctatcttggaggtctcctcactccctacgacgaatagtaccaccaactctgctaccaagataaccgcgaacacaaccgatgaacccacgacccagcctaccaccgagcctactactcagcccacaatccagccgacacaacctactactcagcttcccaccgatagtcccactcaacctactactggatctttctgcccggggccggtcaccctgtgctcggatttggagtcccacagcacagaggcggtactgggtgatgcactcgtcgatttcagtctgaagctgtatcatgcattctcggccatgaaaaaggttgagactaacatggctttttcccctttcagcattgccagcctgctgacacaggtacttttgggtgcgggagagaacaccaagactaacctcgagtcgatcctttcctatccgaaggacttcacctgcgtccaccaggcgctgaagggcttcacgacaaagggggtgaccagcgtctctcagatctttcactcgcccgaccttgccatccgggatacgtttgtgaacgcctcccgtacgctgtactccagctctccgcgcgttctgtccaacaactcagatgccaatctggagctcattaatacttgggtcgcaaaaaacaccaacaataaaattagtcgcttgttggatagcctgcccagtgacacccgtctcgtcctgctgaatgctatttacctctctgccaagtggaagaccacgtttgatcccaagaaaactcggatggagcccttccacttcaagaatagcgtgataaaggtacctatgatgaactccaagaagtacccggtggcgcattttatcgaccagacccttaaggccaaggtgggacaactccagctgagccacaacttgtctctggtcattctagtccctcaaaaccttaaacaccgtcttgaggatatggagcaggccctctctccaagtgttttcaaggccattatggaaaagctggaaatgtcgaagttccagccgacgcttctaaccctgccccgtatcaaagtcactacctcacaggacatgctgtccatcatggagaagctggaatttttcgacttttcgtatgatctcaatctctgcgggcttaccgaggaccctgatctgcaggttagcgctatgcaacaccagaccgtgcttgagctgaccgaaacaggcgtcgaagccgcggcggcgtccgccatctccgtcgcccgcactttgctcgttttcgaggtccagcagcccttcctctttgtgctctgggaccaacagcacaagttcccggtcttcatgggcagggtctacgatcctagggcg

SEQ ID NO: 863 - DNA, 1500 bp, Artificial Sequence
  derived and/or modified sequence
atggctagtcgtctgacccttttgactctcctgctcctgctgttggccggggaccgagcttcgagcaaccctaatgcaacgagctcctctagtcaagaccccgagtccctacaggataggggtgaaggtaaggtggcaactactgtgatctctaagatgctcttcgtggaacccattcttgaggtgtcctccctcccgaccacaaattctactacaaattctgccaccaaaattactgcgaataccactgatgagcctaccactcagcccactacggagcctaccacccagcccacaatacaacccacacaacccacgacccagctacccacagatagcccaacccagcccaccaccggaagtttctgtccagggccggtgactctttgcagcgatctagaatctcactccaccgaagccgttctgggcgacgctcttgtggatttctccctgaaactgtaccacgcctttagcgccatgaagaaggtggagacaaacatggcattctcgcctttctcaatcgcatccctcctgacccaggtgctcctgggtgccggggaaaataccaaaaccaatctggagagtatcctgagctaccctaaagactttacgtgcgtgcaccaggctctaaagggcttcaccactaagggtgtcacaagtgtttcacagatctttcattctccggatctggccattagggatacatttgtcaatgcatctagaacgttgtactcaagtagcccgcgggtgctgtccaataactccgatgccaatctggagcttatcaacacgtgggtagccaaaaacaccaacaataagatctcccggctcctggattcattgccatccgacactcgcctcgtgctgctgaatgctatttacctcagtgctaaatggaagactacatttgacccaaaaaagacacgcatggagccatttcattttaagaacagtgtcataaaggtcccgatgatgaattcaaagaagtaccctgttgcacacttcattgatcagacattgaaagccaaagtcggacagttgcagctttctcacaatctttccttggtgattctggtgccccagaacctgaagcacaggctagaggatatggagcaggctctgtcaccatcagttttcaaggcgatcatggagaagctcgaaatgtctaagttccaaccaacattgcttacactaccaaggattaaggttaccactagccaagatatgctctccataatggagaagcttgagttctttgacttcagttatgatctgaacttgtgtggcttgaccgaagatcccgacttgcaggtatcagcaatgcagcatcaaactgtgctggagttgacggagaccggagtcgaagcagctgccgcctccgccatttccgtggcgcgcacccttctggtattcgaggtacagcagccatttctattcgtgttatgggatcaacagcacaagttccccgtctttatggggcgcgtgtatgaccccagagca

SEQ ID NO: 864 - DNA, 1500 bp, Artificial Sequence
  derived and/or modified sequence
atggcctcacggctgactttgctgacgctgcttctgctgttgctcgctggagacagggcgagctcaaaccccaatgcaacttcgtccagcagccaggacccagagtcactgcaggaccgcggagaggggaaggtggccaccaccgttatctcaaagatgctgttcgtggagcccattctggaggtgtcatcgcttccgaccaccaactcgactaccaattcggctactaagatcaccgccaacaccactgacgagccgacgactcagccgacgactgaacccaccacccagccgactatccagccgacgcaacccaccactcaactgccaaccgactctccgactcaaccaacgactggatctttttgcccaggaccagtgactttgtgctcggacctggaatcacatagcaccgaggctgtgctcggtgacgccttggttgatttttccctgaagctgtaccatgcattttccgccatgaagaaagtcgagactaacatggcgttctccccgttctctattgcatcactgctgactcaggtcttgctgggcgctggagagaatacgaagactaacctggagtccatcctctcgtaccccaaggacttcacttgtgtgcatcaagccctcaaaggtttcactaccaagggtgtcacctccgtttcacagatttttcactcaccagacctggccatccgggatacgttcgttaatgccagccgcactctgtattcttcgtcccctcgagtcctttccaacaactctgatgcaaatcttgaactcatcaatacctgggtggcgaaaaacacgaacaacaaaatcagccggctccttgactccctcccctcagataccagactcgtgttgctgaacgcgatctacctgagcgctaagtggaaaactaccttcgatcccaagaagaccagaatggaaccatttcatttcaagaattcagtcatcaaggtgccgatgatgaactccaagaagtacccggtggcccacttcatcgaccagaccctgaaagcaaaggtggggcagctgcaactgtcccacaacttgagcctggtgattctggtccctcaaaatctgaagcaccgactcgaagatatggagcaggcactcagcccttcggtgttcaaggccatcatggagaaattggaaatgagtaagttccagccaaccctgctgaccttgccgcgcatcaaagtgaccacttcgcaggacatgctctcgattatggaaaagttggaattcttcgatttttcgtacgatctgaacctgtgtggcctcactgaagacccggaccttcaggtgtcggctatgcaacaccaaaccgtcttggaattgaccgagactggggttgaagcggccgctgcctctgcaattagcgtggcacggactctccttgtgtttgaagtgcagcaaccgttcttgtttgtgctgtgggatcaacagcataagttcccggtgttcatgggacgggtgtacgatcctcgcgcc

SEQ ID NO: 865 - DNA, 1500 bp, Artificial Sequence
  derived and/or modified sequence
atggctagcaggttgactttgcttaccttgctgctgctcctgttggccggcgatcgcgcatccagcaatccaaacgcaacctcttccagttcgcaggacccagaaagcctgcaggacaggggggaaggcaaagtggctaccacagtgatcagcaaaatgctctttgtggagccaatcctggaagtgagttccctgcccaccactaactccaccactaattccgcgactaagattaccgctaatacaaccgacgaaccaactacccagccaactaccgagcccaccacacagcctacaatccagcctacccagccaactacgcaactccccacagacagccctactcaaccaaccactggaagtttttgcccaggaccagtcacgctgtgctcggatctggagtctcactctacagaggccgtgcttggagatgcacttgtagacttctcactcaaactgtaccacgcgttctcagctatgaaaaaggttgagactaatatggcgttcagcccattcagcatcgctagtctcctgacacaggtcctgctcggggctggcgaaaatacaaagacaaacctggagagtattctcagctaccccaaagattttacttgcgtgcatcaagcattgaaaggattcacaactaagggggtcaccagcgtgtcacagatctttcattcaccggacctggctattcgcgataccttcgttaacgcatcgaggactctttactctagctcacccagggtcctgtctaacaattctgatgccaacctggagcttatcaacacttgggtggccaagaacaccaacaataaaatcagtaggctgctggactcacttcctagtgatacccgccttgttcttctgaacgctatctacctgtcagcgaagtggaaaaccaccttcgatcccaaaaaaacaaggatggaacctttccactttaaaaactccgtgattaaagttcccatgatgaactctaaaaagtacccagtcgctcacttcatcgaccagactttgaaagctaaggtcggacaactccagctcagtcataatctgtccctggtaattctggtgccccagaatctcaagcaccgactggaggatatggagcaggctctgagcccttcggtgttcaaagctatcatggagaagttggaaatgagcaagtttcagcctactcttctgacactccccaggattaaagtgactacaagccaggacatgctgtctatcatggaaaagctggaattttttgacttctcctatgacctcaacctgtgtggtctgactgaggaccccgatctgcaggtcagcgccatgcaacaccagaccgttttagaattgacagagactggggttgaggctgctgccgcctctgcgatttctgttgcacggaccctgttggtgtttgaggtccagcagccctttctgttcgtcctgtgggatcagcaacataaatttcccgttttcatggggagggtctatgaccctagagca

SEQ ID NO: 866 - DNA, 1500 bp, Artificial Sequence
  derived and/or modified sequence
atggcatcacggctcacgcttctgacactgctgctgctgctgctggccggtgaccgcgcgagctctaacccgaatgccacatccagctcttctcaggaccctgaatccctgcaggaccgaggcgaggggaaagtcgcgacgactgtcataagcaagatgctgttcgtggagcctatcctggaagtgagcagccttcctaccacaaatagcaccacgaacagcgcgacgaagatcacagcaaataccaccgacgaaccaaccacgcagccgactacggagcctactacccaaccaaccatccagccgacacagccaaccacgcagctgccgaccgacagcccgacgcaaccgacgaccgggagcttctgtccgggtcccgtgacgctgtgtagcgatctggaatctcattctaccgaggccgttctgggagatgccctagtggatttctcactcaaactgtaccacgccttctctgccatgaaaaaggtggagaccaacatggctttcagtcctttttccattgcgtctctgctgacgcaagtgttgctgggtgccggcgaaaacacgaagaccaatctggagtcgattctgagctacccgaaagatttcacatgtgtacatcaggcgttgaaaggttttaccaccaagggtgtgacctccgtcagccagatatttcactcccctgatctggcgattcgtgatactttcgtcaacgcgagccgcaccctttacagctccagcccacgtgtcctgtccaacaacagcgatgcgaatttggaactgattaacacttgggtggcaaaaaacacgaataacaaaattagccggctgctggatagcctgccttccgatactcgcctagtcctgcttaacgcaatctacctgagcgctaagtggaagaccaccttcgaccctaagaagacgcggatggaaccgtttcactttaagaactctgtcatcaaagttcctatgatgaacagtaaaaagtatcctgttgctcactttattgaccaaactctgaaggcaaaggtcggacagctgcaactgagccataatctgagcctggtcatattggtcccacaaaacctaaagcaccgtcttgaagacatggagcaggctctgtctccgtccgtctttaaagctattatggagaagttggaaatgtctaaattccaaccaactctgctgaccttacctcggattaaagttactacctcgcaggatatgctgtctatcatggagaagctggagttcttcgacttctcttatgacctgaatctctgcggtctgaccgaggatcccgacctgcaggtcagcgcaatgcagcaccagaccgtcctggaactgactgagactggagttgaagccgccgcagcgagcgctatctctgttgcccgcactctgctcgtgttcgaggtgcaacagcccttcctgtttgttctgtgggaccagcagcacaaattcccggtgttcatgggccgagtttacgacccacgtgca

SEQ ID NO: 867 - DNA, 1500 bp, Artificial Sequence
  derived and/or modified sequence
atggcttccagactgacactactgaccctcctcttgctgctcttggcgggagatcgagcctcgagtaatcctaacgccaccagcagcagcagccaggatcccgagtcgttgcaggatcgaggcgaaggaaaggttgcaactaccgtcatcagtaagatgctgttcgtggagcctattctggaggtgagcagcctcccaaccacaaactctacaacaaactctgccacaaaaatcaccgccaataccactgatgaacctaccactcaacccactacagagccaaccacgcagcccaccatccaaccaactcaaccaacaacccagctgcccacagatagtcccactcagcccaccactgggtccttctgtccaggcccagttaccctatgttctgacctggagtcacacagcactgaggctgtgctcggagacgccctggtggacttcagcctgaaactctaccatgcattcagcgccatgaaaaaggtcgagacaaacatggccttctcgcccttctccattgcatcgctcctaacccaggtacttctgggcgcaggagagaacacaaaaactaacctggaatcaatactctcttaccctaaagacttcacttgtgtgcaccaagcccttaagggcttcactacaaagggcgtaacaagcgtgtctcaaatcttccatagtcccgatctagcaattcgagatacttttgtgaacgcaagtagaactctttactcatcatcccctcgggtgctatccaacaactccgacgcaaatctcgagctgattaatacctgggtcgccaagaacacaaataataagatctcccgtctgctggatagccttccctccgacacgcgtttagttctgctgaatgccatatatctcagcgcgaaatggaagactactttcgaccctaaaaagactaggatggaaccattccatttcaaaaactccgttatcaaggtgcctatgatgaattctaagaaataccctgtggctcatttcatcgatcagaccctgaaggcgaaagtggggcaattgcagttgtcacacaacctgagcctagttattctggtcccgcagaatcttaagcatcggctggaggatatggagcaggccctctcaccctcagtgttcaaggccataatggagaagcttgagatgtctaaatttcagcccacactgcttactctgccgcgaatcaaagtaactacctcccaggacatgctgtccataatggaaaagctcgaatttttcgactttagttacgacctaaacctgtgcggactgactgaagatccggacctgcaagtctctgcaatgcagcaccagaccgtccttgaactgactgagaccggagtcgaagctgctgctgcaagcgcgatctccgtcgccagaacgctgctggtctttgaggtgcaacagccctttctgttcgtactgtgggaccaacagcacaagttccccgtgttcatgggacgcgtctatgacccccgcgcc

SEQ ID NO: 868 - DNA, 1500 bp, Artificial Sequence
  derived and/or modified sequence
atggcttcaagacttacccttttgactctacttttgttattgcttgcaggcgatagagctagctcgaatccaaatgctaccagcagtagctcgcaagatccggaatcattacaggatcgtggagaaggaaaagttgcaaccactgtcatcagtaaaatgttatttgtcgagccaattctggaggtgtcaagtcttcctacaaccaattcaactacgaattctgcgaccaagataacggcaaacactacagacgaacccacaactcaaccaacaacagagccgacaacgcaaccgactatccagccaactcagccaacgactcagttgccaacagactcaccgacacaacctacaacaggctcgttctgtccaggaccagtcaccctttgttcagatctcgaatctcatagtacagaagcagtccttggagatgctctcgtggatttctctctcaagctttatcatgcattctcagctatgaaaaaggttgaaacaaacatggctttcagtccattctccattgcttccctgttaacacaagtattattgggagctggagaaaacaccaaaaccaatttagaatcaatattgtcgtatccaaaggacttcacttgcgtccaccaggctcttaaaggatttacaacgaaaggagtgacttcagtgtctcagatctttcattcaccggatctcgccatacgagatacattcgtcaatgcatctcgtactctttactcctcctccccaagagtgttatctaataatagcgatgctaatttggaattgataaacacatgggtggcgaaaaacaccaataataagatatcacggctactagatagcctaccgagcgatactaggctcgtcttgctcaatgcaatatatttgtctgcaaagtggaaaacaacgtttgatccaaagaagactcgaatggagccatttcactttaagaatagtgtgataaaagttccaatgatgaattcgaaaaagtaccctgtggcgcatttcattgaccaaactctcaaggccaaggttggtcagcttcaattgtcacataacttatcgcttgttatccttgttccgcagaatctaaaacatcgacttgaagacatggagcaagctttatcgccaagcgtatttaaggctatcatggaaaaattagaaatgtcaaagtttcagccaactttactaactcttccaagaattaaagttaccacgagtcaggatatgctttcaattatggaaaaacttgaatttttcgacttttcatatgacctgaatctttgcggattgacagaagatcccgatcttcaagtgagcgcgatgcaacatcaaacagttctagagctgacagaaactggcgtggaagccgcagcggcgtctgcaatttctgtagctcgcactttactggttttcgaggtgcaacaaccatttcttttcgtcctttgggatcaacagcataagtttcccgttttcatgggtcgagtatacgacccacgagcg

SEQ ID NO: 869 - DNA, 1500 bp, Artificial Sequence
  derived and/or modified sequence
atggcctcccgcctcacccttctgacccttctgctcctgctgctggccggggaccgggccagctctaatccaaacgccacctcatcctcctcccaagatccggaatccttgcaggaccgcggcgaaggaaaggtcgccaccacggtcatcagtaagatgctcttcgtcgaacccatcctggaggtttcgtccttgccaacgacgaattcaactaccaattcagcgaccaagatcaccgccaacactactgatgaaccaaccacccaaccaactaccgagcctactacccagccgactatccagccgactcaaccaacgacccagctgccgaccgactcgcctacccagccaaccactggatctttctgtcctggccccgtgactctctgcagcgacctggaaagccactcgactgaagcggtcctgggagatgccctggtggatttctcccttaagttgtaccatgctttctcagctatgaaaaaggtggaaaccaacatggccttctcacctttctcgatcgcatcgctcctgacccaagtgcttctgggagcgggggagaataccaaaacgaacctggagtcgattctctcctacccaaaggacttcacctgtgtccatcaagcgctgaaaggattcaccaccaaaggagtgacttccgtcagccagatcttccactccccagatctcgccattcgcgacacctttgtgaacgcatcgcggactctgtactcatcgagccctagggtcctgtctaacaattcagatgccaaccttgaactcatcaacacgtgggttgccaagaataccaataacaagatctcgcggttgctggattcgctcccaagcgacacccggcttgtgctgcttaacgccatctacctctccgcgaaatggaaaaccacctttgacccaaaaaagacccgaatggaaccgttccatttcaagaattcggtgatcaaggtccctatgatgaattccaagaagtacccggtggcccactttattgatcaaaccctgaaggcaaaggtgggtcagctccaactttcacataacctgagcctggtcatcctggtcccgcagaatttgaagcaccggctggaggacatggagcaggcgctgtcgccttcggtctttaaggcgatcatggaaaagctggaaatgtcgaagttccagcctacgttgcttaccctccctcggatcaaggtgaccacctcacaggacatgctgtccatcatggaaaaactggagtttttcgattttagctacgacctgaatctgtgtggactcactgaggacccggaccttcaggtgtcggccatgcagcaccagactgtgctggagctgactgaaactggtgtggaggcagcggcggcttccgcgatcagcgtggctcgcaccctgttggtctttgaggtgcaacaacccttcctgttcgtactgtgggatcaacaacataagtttccagtctttatggggagagtctacgatcctcgggca

SEQ ID NO: 870 - DNA, 1500 bp, Artificial Sequence
  derived and/or modified sequence
atggcttctcggctgaccctcctgactttgctcctgctgctgttggccggcgatcgggcatcctcgaaccctaatgccacttcgtcatcgtcccaagatccggaatctctgcaggacaggggtgaaggaaaggtggcgactaccgtaatctcaaagatgctcttcgtggaaccgatcttggaggtgagctcacttcctaccactaactctaccaccaactccgcaactaagatcaccgcgaacactactgacgagcctacgacgcagcccactactgaaccgactacccagccgactatccagccgacccagccgaccacccagctcccgacggattccccaactcaaccaaccaccggatccttttgcccgggaccagtgaccctgtgctccgacctggagagccatagcacggaagcggtgctgggagatgccctcgtcgacttctcactcaagctctaccatgctttctctgccatgaagaaagtggaaactaacatggcattctcgcccttttccatcgcctcgcttctgacccaagtgcttctcggggctggcgagaacaccaagacgaatttggaatccatcctgagctacccaaaagatttcacctgtgtgcaccaggccctgaagggtttcaccaccaagggagttacttctgtgagccagatctttcattcccctgacctggccatcagagacactttcgtcaatgcttcccggacgctgtatagttcatcaccgcgcgtcctgtcgaacaactcggatgcgaacctcgaactcattaacacctgggtggcgaagaatactaacaataagatctcgagactgctggacagccttccgagcgacacccgcctcgtgctcctcaacgccatctacctgagcgccaagtggaaaacgacttttgaccccaaaaagactaggatggaaccatttcacttcaagaattccgtgatcaaggtcccgatgatgaactccaagaaatacccagtcgcccatttcatcgaccagaccctgaaggcgaaggttggccagctgcaactgtcgcacaatctgtctctcgtgattttggtaccccaaaatctgaagcacagacttgaggacatggagcaggcgttgagcccgagcgtgttcaaagctattatggaaaaactggaaatgtcaaagttccagcccacgcttcttaccctgccgcgcattaaggtcaccacttcgcaagatatgctgtcgatcatggagaagctggaattcttcgacttctcctacgatcttaacctgtgcgggctgaccgaggaccctgatttgcaggtgagcgccatgcagcaccaaaccgtactggagctgaccgaaactggagtggaggccgcagcagcaagcgctatctcagtggcgcggaccttgctcgtgttcgaggtgcaacagccatttctgttcgtcctctgggatcaacagcacaaatttcctgtgttcatgggacgagtctacgacccacgcgct

SEQ ID NO: 871 - DNA, 1500 bp, Artificial Sequence
  derived and/or modified sequence
atggcctcccgcctgactctattgaccctgttgctcttgctgctcgccggcgaccgggcatccagtaaccctaatgccacatcaagcagttcccaggacccagaatcccttcaagatcggggcgagggcaaggtggctaccaccgtgatttcaaagatgctctttgttgagcccatcttggaagtgtccagccttcctaccacaaactctaccacgaactcggcgacaaagattaccgcaaataccaccgacgagcccacaacccagccgacaaccgaacccacgacccagcccaccatccagcctacacagcccaccactcaactgcccaccgatagccctacccaacctacaactgggtcgttctgcccggggccagttactttgtgctctgatctggagtcccactccaccgaggcagtgctgggagatgctcttgtcgatttctcactgaaattgtaccatgccttttccgcaatgaaaaaagtggaaactaacatggcattttcaccgtttagcattgcctcactgctgacccaggtgctgctgggcgccggcgaaaacactaaaacaaacctggaatcaatcttaagttacccaaaagacttcacgtgcgtgcatcaggccctgaagggctttacaacgaagggcgtgaccagcgtgtcgcagattttccacagccccgatctggcgatcagagacacattcgtcaacgcctcccgaacactgtattccagctccccccgcgtgctctccaataactccgacgcgaacctcgaactgatcaacacctgggttgcgaagaacacaaataataagatttcgcgtctcctcgatagtcttcccagtgataccagactagtactgctgaatgcaatctacctgtccgcaaaatggaagaccacattcgacccaaagaaaacacgaatggagccattccactttaagaactctgtgattaaagtgcccatgatgaactctaaaaagtatcccgtggcacattttatagatcagacacttaaagcaaaagtgggtcagttgcagctcagccataatctgtcactggtgattctggtgcctcagaacctgaagcaccgcctggaggacatggagcaagcactgagcccatccgtattcaaggctatcatggagaagctcgaaatgtccaagtttcagcctaccctgctgacactcccccggattaaagttaccacgtctcaagacatgttgagtataatggaaaaacttgagttttttgacttcagttatgatctgaatctgtgtgggcttactgaagaccccgatttacaggtctctgccatgcagcatcaaaccgtgctggagctgactgaaaccggagtggaagctgcggctgcatccgctatcagcgtcgcccgcacactgctggtattcgaagtacagcagccttttctgttcgtgttatgggatcaacagcacaagtttcctgtgttcatgggccgggtgtacgatccacgggct

SEQ ID NO: 872 - DNA, 1500 bp, Artificial Sequence
  derived and/or modified sequence
atggctagcagactcacgcttcttactctccttctgctccttcttgccggggatcgtgcatcgtcgaacccaaatgcaactagctcctcgtcacaggatcctgaatccctccaagatcgtggagaagggaaggtcgcaaccactgtcattagcaaaatgcttttcgtggagccgattcttgaagtctccagcctgcctaccaccaatagcactaccaactcagcaactaagataaccgccaataccacggacgaaccaaccacccagcccactactgaacccaccacccaacctaccattcaaccaacccaacccaccactcaacttcccaccgatagcccaacccaacctacgaccggatcgttttgtcctggtcctgtgactctgtgcagcgatctggaatcacattcgaccgaggcagtgcttggggacgcacttgtggacttttcgctgaagttgtaccatgcattctcggcaatgaagaaggtcgaaactaacatggcgttcagcccattctcaatcgcatcacttcttacccaggtcctgcttggagcgggagaaaatacgaaaactaatctggaatccatcctgtcctaccctaaggatttcacttgtgtgcatcaagccctgaagggcttcactactaagggcgtcacctcggtgtcccaaatcttccattcccctgaccttgcaattcgtgatacctttgtcaacgcatccagaaccttgtattcttcgtctccgcgggtgctgagcaacaattccgatgcaaacctggaactgattaacacctgggtggcaaaaaacaccaacaacaagataagtagactgctggattctcttccttccgatactaggctcgtgcttttgaatgcaatttacctttcagcaaagtggaaaaccacgtttgacccgaaaaagaccagaatggagccctttcactttaagaactcggtgattaaagtccctatgatgaattccaagaaataccctgtggcacactttatcgatcagaccctgaaagcgaaagtagggcagctgcaactttcgcataacctttcactcgtcattcttgtcccacagaacctgaagcatcggctggaagatatggagcaggcactttcaccttccgtctttaaggcaattatggaaaagctggagatgtccaagttccagcccaccctccttacccttcctcggattaaggtgactactagccaagatatgctttccatcatggagaagctggagttttttgatttttcatacgatctgaacctgtgtggtcttaccgaggacccggaccttcaggtgtcggccatgcaacaccaaaccgtgctcgagctgactgaaactggagtcgaggcagcagctgccagcgcaatttcggtggcacggacccttctggtctttgaggtccagcagccgtttctttttgtgctttgggatcagcaacataagtttccggtgttcatgggtcgagtgtacgatcctcgcgca

SEQ ID NO: 873 - DNA, 1500 bp, Artificial Sequence
  derived and/or modified sequence
atggcctctagactgacccttctgactctgctactactccttcttgctggcgaccgcgcaagcagcaatccgaacgccacctctagctcatcgcaggatcctgagtccttacaggacagaggtgaagggaaggtggctactacagtcatatccaagatgctgttcgtggagcccattctggaagtttcaagcctgcctacaacaaatagcaccacaaacagcgcaacaaagattacagctaacaccaccgatgagccaacaacacagcctaccacagagcctaccactcaacctactatccagcccacacagcctactacacagctacctacagattcacctacacagcctaccacagggagcttctgtccaggccctgtaaccctgtgctccgatttggaatcacatagcaccgaggctgtgctgggcgacgctctcgtcgacttctcactgaaactgtaccacgctttctcagccatgaagaaggtcgagacaaatatggccttctcccccttcagcattgccagcctgctgacgcaggtgcttttgggggccggcgagaatactaagaccaatctggagagtatcctgtcttatcccaaggactttacgtgcgtgcatcaagcacttaaggggtttacaaccaagggagtcacctccgtctcccagatctttcatagtccagacttggcaattagggatactttcgttaacgcttcaaggacactgtattccagtagtcctcgggtgttaagtaacaattctgacgccaacctggaactgattaatacttgggtggctaaaaatactaataataaaattagccgtctgctggacagcctaccctcggacacaaggttggttcttctgaacgctatttatttgagcgcaaaatggaagacgactttcgacccgaaaaaaacgcgcatggagccctttcatttcaagaattctgtgattaaagtccccatgatgaattctaagaaatatccagtggctcatttcatagaccagacacttaaggcaaaagtaggtcaactccagctttctcacaatttatcactagttatactcgtgccgcaaaaccttaaacatcgactagaagatatggaacaggctctttcccccagcgtgttcaaggccatcatggagaaattagagatgtctaagttccagcccactcttctgaccctgcccaggattaaagtaactacatcccaagacatgctaagcattatggagaagctggaatttttcgacttcagctacgatttgaatttatgcggtcttaccgaggacccagacctgcaggtgtcggcaatgcaacaccaaacagtcctcgagctgactgaaaccggcgttgaagcagcagctgcttctgcaatttccgtggcacgcacgctgctggttttcgaagtccagcagccattcctgtttgtgctgtgggatcagcaacataagtttcctgttttcatgggacgggtgtacgatccccgcgca

SEQ ID NO: 874 - DNA, 1500 bp, Artificial Sequence
  derived and/or modified sequence
atggcttcacggctgactctgctcactctgctgctgcttctgctcgctggcgatcgcgccagcagcaacccgaatgcgacttcgtcgtcgagccaagatccggagtccttgcaagatcggggggaaggtaaggtcgccaccactgtcattagcaagatgctgtttgtggagccgatcctggaggtgtcctcgctgcctactactaattcgaccacgaattcggcgactaagatcaccgcgaatactaccgacgaacctaccactcaacccactactgaaccaaccactcaaccgaccatccaaccaacccagcctaccacgcagcttccgactgactccccaacccagccgactactggatcgttttgcccgggaccggtcaccctgtgttcagatttggagtcccactccacggaagccgtgctgggagacgcgctggttgacttttcgttgaagttgtaccacgcattctcagctatgaagaaggtggaaactaacatggccttctccccattctccatcgcctcgcttctgacccaagtgctgctgggggctggtgaaaacaccaagaccaacctggagagcatccttagctacccgaaggatttcacctgcgtgcatcaggctctcaaaggcttcaccactaagggagtgacctccgtctcgcagatattccacagcccggacctggccatcagggacacctttgtgaacgcatcacggacgttgtactcctcatcaccacgggtcctgtccaacaacagcgatgctaatctcgagctgatcaatacctgggtggcaaagaatactaacaataagattagcagactgctcgactcattgccgtcggacactcggctggtgctgttgaacgctatctacctctcagccaagtggaaaacgaccttcgaccccaagaaaactcggatggaacccttccactttaagaattcagtgatcaaggtgccgatgatgaactcgaagaagtaccccgtggcccactttatcgaccaaaccctgaaggcaaaggtgggtcagctgcaactcagccataacctctcgctggtgatcctcgtcccacagaacttgaagcatagactggaggatatggaacaggccttgtcgccgagcgtctttaaagcgattatggagaagctcgaaatgtcgaagttccagcctaccctgctgactctgccgcgcatcaaagtgaccacctcgcaggacatgctctcgatcatggagaagttggaattcttcgacttctcatacgacctgaacctgtgcggactgacggaggaccctgacctgcaggtttcggccatgcagcaccagaccgtgctcgaactgaccgaaaccggggtcgaagccgccgcagccagcgccatctccgtggcacgcactctgctcgtgtttgaagtgcaacaaccgttcctgtttgtgttgtgggatcaacaacacaaattcccggtgttcatgggacgcgtgtacgacccgagagcc

SEQ ID NO: 875 - DNA, 1500 bp, Artificial Sequence
  derived and/or modified sequence
atggctagtcggcttaccctcctgacactgctgctgctgctgctggccggggacagggcctccagcaacccaaacgccacaagttcctcatctcaagatccagaaagtctgcaggaccgcggtgaaggcaaggtggcgactacagtcatttctaagatgctttttgttgagcccattcttgaggtaagcagcctacctactacgaattccaccacaaactccgctaccaaaattactgccaatacaaccgatgagcctacaacccagcccacgacagagcctaccacgcagcctacaatccagcccacccagccaaccactcagttaccgaccgactcacccactcagcctaccactgggtctttttgtccaggtccggtgacgctctgctccgatttggagagccatagcactgaagccgttttgggtgatgcactggtagatttcagcctcaaactgtatcacgccttctccgccatgaaaaaagtggagacgaatatggccttctcacccttctccattgcgtcactactgactcaggtgctgttgggagccggagaaaataccaagacaaacctggagtccatcttgagctatcccaaagattttacgtgtgtccatcaagccttgaaaggatttacaacaaagggcgttacaagcgtgtctcagatttttcatagcccagatctcgccatccgggatacctttgtgaacgcatcaagaactctctactccagctccccacgggtcctttccaacaattccgatgccaacctggagttgattaatacctgggttgcgaaaaatacgaacaataagatctcaaggctgctagacagcctacctagtgatactagactggtgttactcaatgccatatacctgtcagctaagtggaagactacctttgatcctaagaagaccaggatggagccatttcattttaagaatagtgtgatcaaggtcccaatgatgaactccaaaaagtaccctgttgcccacttcattgaccaaaccctaaaggcaaaggtggggcagctacagctgtcccacaatcttagtcttgtcattctggtgccacagaacctgaagcaccggcttgaggacatggaacaggcactgtccccgagcgtgtttaaagccatcatggagaaacttgaaatgtccaaattccagccaacattgctcaccctgccacgtatcaaggtgacaacttctcaggatatgctcagtatcatggaaaagttggaattttttgattttagctacgacctgaacctgtgcggcctgaccgaggatcccgacctgcaggtgagtgccatgcagcatcaaactgtgctcgaactcactgaaactggggtggaagcagccgcggcctccgctattagcgtggctcgcactcttttggtgtttgaggttcagcaaccgtttttattcgtactctgggatcaacagcacaagttccccgtattcatgggccgagtgtacgacccccgggcg

SEQ ID NO: 876 - DNA, 1500 bp, Artificial Sequence
  derived and/or modified sequence
atggcctcacgcctgactctgctgactttgctcttgctgctcctcgctggtgaccgagcgtccagcaacccgaatgcgacctcgtcgtcgtcccaagatccggagtcactgcaagacagaggagagggcaaagtggccaccacggtgatctcgaaaatgctgttcgtcgaaccgatcctggaagtgtcgagcctgcctactaccaactcgactaccaatagcgccaccaagatcaccgcaaacaccaccgatgaacctactacgcagccaaccacggaaccaaccacccaacccactatccaaccaacccaaccgactacccaattgccgacggactccccgacccagccgaccacgggttcattctgccctgggccggttactctctgttcggacctcgagtcccattccactgaggccgtcctcggcgatgcgctggtggatttttcgcttaagctgtaccacgctttcagcgcgatgaaaaaggtggaaaccaatatggcttttagcccattcagcatcgccagtctgcttacgcaggtgttgctgggcgccggagagaacactaaaactaacctggagtccattctgagctacccgaaggacttcacctgtgtgcaccaagctctgaaaggatttactaccaagggggtgacctcggtgtcacagatttttcatagcccggacctggccatcagggatacgttcgtgaacgcctcccggaccctctactcctcgtcgccgcgagtcctgtcaaacaattcggatgccaacctggaactgattaacacctgggtcgccaagaatacgaacaataagatctcgaggcttctggactcactcccgtctgatactcgcctggtgctgctgaatgcaatctacctgtccgccaagtggaaaaccaccttcgacccgaaaaagacccgcatggaaccgttccacttcaagaattccgtgataaaagtaccaatgatgaacagtaagaagtatcctgtggcccatttcatcgatcagaccctgaaagcaaaggtcggacagctgcagctctcgcacaacctctcgctcgtcattctggttccgcaaaacctcaagcacaggttggaagatatggagcaggcgctgtcccctagcgtctttaaggcgatcatggagaagctcgagatgtctaaattccagccaaccttgttgacgcttccaaggatcaaggtgaccacttcacaggacatgctctccatcatggaaaagctcgagttctttgacttctcgtacgacctgaacctctgtggactcaccgaggatcccgacctccaggtgtcggcaatgcaacaccagactgtcctcgagctcacggagactggagtcgaagccgcggcagcttcggcgatctcggtcgcacggactcttttggtgtttgaagtacagcagccattcctgttcgtgctttgggaccagcagcataagttcccagtgtttatggggcgcgtgtacgacccccgggcg

SEQ ID NO: 877 - DNA, 1500 bp, Artificial Sequence
  derived and/or modified sequence
atggcatcccgactgactctgttgaccctgctcctgctccttcttgcgggggatcgagcatcgagcaaccctaatgcaacctcctcctcatcacaagaccctgagtcacttcaagatcggggcgaaggtaaagtggcgactactgtgatatcgaagatgctttttgtcgaaccaattcttgaagtgtcctcccttcccactaccaactcaaccactaactccgccaccaagattaccgcgaacaccaccgatgagccaaccacccaaccgaccaccgagcctactacccaacctactattcaaccgactcaaccaaccactcagcttcccaccgatagcccaactcaacccactaccggatccttttgccccggaccggtgactttgtgtagcgacctggagtcacatagcacggaggcagtgcttggtgacgcactcgtggacttttcgttgaagctgtaccatgcctttagcgcgatgaaaaaagtggaaacgaatatggcattttccccttttagcattgcatccctgctgactcaagtcctcctcggagcgggagagaacaccaagaccaacctggaatcgatcctctcgtacccaaaggactttacttgcgttcaccaagctctgaagggattcaccactaagggtgtcacctcagtgagccagatattccatagccctgaccttgctatccgtgatacctttgtgaatgctagtcggactctttatagcagctcgcctagagtcctttcgaacaattcggatgcaaaccttgaactcatcaacacctgggtggcaaaaaacaccaataacaagatctcgcgtctcctggattcactgccgagcgatacccgtctcgtgctgctcaatgcaatctacctgtccgcaaagtggaaaactacttttgatcctaaaaagacccgaatggaaccttttcactttaagaactcggtgatcaaggtccctatgatgaacagcaagaaatacccagtggcccactttattgatcagaccctcaaggcaaaggtcggtcaactgcagctgtcgcacaatctgtccctggtgattctcgttcctcagaacctgaaacatcgtcttgaagatatggaacaagccctgtcgccatccgtgttcaaagccattatggagaaactggagatgtcgaagtttcaacccactcttctgactctgcctcgcatcaaggtgaccacctcgcaggacatgctctcgattatggaaaagctcgagttctttgatttttcttacgatctcaacctttgcggactgacggaggaccctgatcttcaagtatcagcgatgcagcatcaaactgtcctggaactcactgaaactggagttgaagcagccgcagcgtcggcaatcagcgtggcacgcacgctgttggtgttcgaagtccagcaaccgttcctctttgtcctttgggatcagcaacataagtttccggtgtttatgggaagagtctacgaccctcgagcc

SEQ ID NO: 878 - DNA, 1500 bp, Artificial Sequence
  derived and/or modified sequence
atggcctccagattgaccttactaacactgctgcttttacttttagctggggacagagccagttcaaaccctaacgccacatcctcttccagtcaggatccggagagtcttcaagacagaggtgagggcaaagtagctaccactgttatttctaaaatgctgttcgtcgagcctattcttgaggtgtccagtctgcctactaccaattcaaccaccaatagtgccacgaagatcaccgccaacacaacagatgaacccacaacccagccaacaacagaacctacaacccagcccacaatccaacctacacaaccaacaactcaactgcctacagattcacccactcaacctactaccggcagtttttgccctggtcctgtgactctctgctcagacctcgagagtcactccactgaggccgttctgggggacgccctggtggatttttcactgaagctgtaccacgcattctctgccatgaaaaaagtagagaccaacatggcctttagtcctttttcaatcgcctcactgctgacacaagttctgttaggagccggcgaaaacactaaaacaaacctcgaatcaatacttagctatccgaaggattttacctgcgtgcaccaagccctgaaaggctttaccactaagggagtcacatcagtgtctcagatctttcacagccctgaccttgctatccgcgataccttcgttaacgctagcagaaccctctattctagcagtcccagagtgctttcaaacaattctgacgctaacctggagctcattaacacctgggtagctaagaacaccaataacaagatctcacggctgctggactctctccccagcgacactcggttggtccttttaaacgccatctacctgagcgcgaaatggaagacgacctttgatcccaaaaaaactcgaatggaaccattccacttcaaaaacagcgtgatcaaggtgcccatgatgaatagtaaaaaatacccagtcgcacattttatcgaccaaacactgaaagcaaaggtgggccagcttcagctaagccataacctgagcctggtcatattggtcccgcaaaacttgaagcaccggctcgaagacatggaacaagcattatcccctagtgtgttcaaagcaattatggagaaactggaaatgtcgaagtttcagccaacccttctgacgctgccaaggatcaaggttaccacatctcaagacatgctttccatcatggagaaactggagttcttcgatttcagctacgatctgaatctttgcggacttacagaagacccagatctgcaggtctcagccatgcagcaccagaccgtgctggagctcaccgaaaccggagtagaagccgcagctgcctcagcaatttccgtggccagaacactccttgtgtttgaggttcaacagcctttcctgttcgttttgtgggaccagcagcacaaatttccagtctttatgggcagagtgtacgatccacgggcc

SEQ ID NO: 879 - DNA, 1500 bp, Artificial Sequence
  derived and/or modified sequence
atggcgagccgtctcactctgctcacattgctgctactcttgctggccggggacagagccagctccaaccccaacgccactagttctagctcacaagaccccgaaagcctccaagatagaggggagggcaaggtggccactaccgtcatcagtaagatgctcttcgttgaaccaattctggaggttagctcgctgcctactacaaactccacaaccaactctgccactaagattacagcgaatacaacggacgagcctaccacacaacccactaccgaaccgacaacacaaccaactatccagcccacacaaccaaccacccagctgccgacagactcacccacacagcccacgacagggagtttctgccctgggccggtaacactgtgttccgatctggagtcccattccaccgaagctgtgctcggcgatgcattggtggacttctcactcaaattataccacgccttttcagctatgaaaaaagtggagaccaacatggccttctcacccttttctattgctagtttgctgacccaggtgttgttgggcgcaggtgagaacaccaaaaccaaccttgagagtatcctctcgtacccaaaagattttacttgcgtccatcaggctctgaaaggtttcacaacgaagggtgttaccagcgtcagtcagatcttccattcccccgatttggcaattcgagatacctttgtgaatgcctcacggacgctgtattcctcttcaccccgcgtgctgtccaataactccgatgccaatctggaactgatcaacacatgggtggccaagaataccaacaataagatctctagactcctcgattcactgccgtctgacacgcgacttgtgttgttgaatgcaatctatctctcagctaagtggaagacaacctttgacccgaagaagaccaggatggaacccttccattttaaaaattcagtgattaaggttcctatgatgaactcaaagaagtatccagtggcccacttcatcgaccagacactcaaggcgaaagtgggccagctacagttgtcccacaacctgtccctggtcatcttggtgccacagaatctgaaacaccgacttgaagatatggagcaggccttgtcccccagcgtgttcaaggccatcatggaaaagctggaaatgagtaagtttcaaccaacattgctgacactgccacgcattaaagtgacaacatctcaggatatgctatcaataatggagaaactggagttttttgactttagttatgatttgaatctctgcggattgaccgaggatccagacttgcaggtgagcgcgatgcaacaccagaccgtactcgagcttacagaaactggagtggaggcggctgccgcgtccgccatttcagtcgctagaacactgttggtgttcgaggtccagcagccattcctgtttgtcctatgggatcagcagcataagtttcccgtcttcatgggcagagtgtatgatcctcgagcc

SEQ ID NO: 880 - DNA, 1500 bp, Artificial Sequence
  derived and/or modified sequence
atggcctcaaggttgaccctcttgactctgctcctcctactgcttgcaggagaccgcgcttcctctaaccctaatgctacctcatcaagttctcaggatccggagagcctccaagacaggggggagggaaaggtggctacaactgtaatttccaaaatgctgttcgtggaaccaatccttgaggtttcttcgctccccacaaccaacagtacaacaaactccgccaccaagattaccgccaatactactgacgagcctaccacccagcctactaccgaacctacgacgcagcctacaatccagccgacacagcccaccacccaattgcccaccgacagtccgacccagcctacgacagggtctttctgtccggggcccgtgacactctgttccgacctggagagtcatagcacagaagcagtgctcggcgatgcacttgtagactttagcctgaagctctatcatgcctttagcgcgatgaaaaaagtggagaccaacatggcgttttcacccttctcaatcgctagcctgctcacacaggtcctgttaggggcgggagagaacaccaagacaaatctggagtccatactgagctaccctaaggatttcacctgtgtgcaccaagcgcttaaaggattcaccacgaagggggtgactagcgtgagtcagatattccacagtcccgacctagccatacgggacaccttcgttaatgcaagtcggactctatacagcagctcccctagagttcttagcaacaacagtgatgccaaccttgagctcattaacacgtgggtggcgaagaacacgaacaacaaaatctccaggctcctcgacagcctgccctctgatacccgtttggtgcttctgaatgcaatctacttgtccgcaaaatggaaaaccacatttgatcccaaaaaaactaggatggaacctttccatttcaagaattccgtaataaaggtccctatgatgaactccaagaagtatccagtcgcccacttcattgatcagaccctaaaagccaaagttggacaattgcagttatctcacaacctcagtctcgtcatattagtaccacagaatctgaagcaccgcctggaagatatggagcaggcactgagtccatccgttttcaaggctatcatggaaaaactggaaatgtccaaattccaacccacactactgaccctcccccggattaaagtcaccacgtcgcaggacatgctgagtatcatggagaaactggagtttttcgacttcagctacgacctcaacctatgcgggctgacagaggatcctgatctccaggtgtcagccatgcagcatcagaccgtgctggaactcaccgaaaccggggtagaggctgctgccgcttctgctatcagcgtggcccgtacactgttagtcttcgaggttcaacagccatttttgttcgttctgtgggaccagcagcacaagttcccagtgttcatggggagagtgtatgatccaagggcc

SEQ ID NO: 881 - DNA, 1500 bp, Artificial Sequence
  derived and/or modified sequence
atggcatcacggttgactctcctcacccttctccttttgttgctggcgggggatcgggcctccagcaatcccaatgctacctcctcctccagccaggatccggagtccttgcaggaccggggcgagggtaaggtggcgactactgtcatttctaaaatgctgtttgtggagccgatcctcgaggtctcttctctcccaaccactaactcaaccacaaacagtgccacaaagattaccgccaacacgactgacgagcctaccactcagccaacaaccgagcccaccactcagcctacaatccagcccacgcagccaacgacccaactgccaactgacagccccacacagcccacaactgggtccttctgtcccggcccggttacactgtgcagcgacttggagtcacactccacagaggctgttctgggcgacgctctggtggacttcagcctgaaactgtatcacgctttttccgctatgaagaaggtggagacaaatatggcgtttagtccattctcaatcgcttctctcctgacacaggtgctgctgggcgcgggcgaaaatacgaagacaaatctggaatcaatactttcttaccctaaggactttacgtgcgtgcaccaagccctgaaaggctttaccactaaaggcgtcacctccgtgtctcagatcttccacagtccagacctggcaatcagagacaccttcgtgaatgctagccggaccttgtacagcagttcaccaagagtcctgagtaacaatagtgacgcgaatctggagctgattaatacttgggtggccaagaatactaataacaagatcagccggttgctggactctctgcctagtgacacgcgcctcgtgttgctcaatgccatctacttgagtgccaagtggaaaactaccttcgaccctaagaagaccagaatggagcctttccattttaaaaacagcgttatcaaggttccgatgatgaacagtaagaagtacccagtagcccattttatcgaccagactctgaaagccaaggttgggcagctgcagctgagccacaacctcagcctggtgatcctggttccgcagaatctgaaacataggttggaggacatggagcaagctctgagcccgtctgtctttaaagcgattatggagaagttggagatgtccaagttccaaccaaccctcctgacccttcctcggatcaaggtcaccacaagccaggacatgctgtcaattatggagaaactggaatttttcgatttctcatacgaccttaacttgtgcgggctcacagaagaccccgatttgcaagtttcagccatgcagcaccagaccgtgctcgaattgactgagaccggcgtcgaagccgccgctgcatccgcaatcagcgttgccaggactctgctggtctttgaggttcagcagccatttttgttcgtcctctgggatcagcagcacaagttccccgtgttcatgggcagagtatatgatccccgagct

SEQ ID NO: 882 - DNA, 1500 bp, Artificial Sequence
  derived and/or modified sequence
atggcttcacggttgaccctccttactcttctgcttctgctgcttgcaggagatagagcatccagcaatcccaacgctacctcatcctcctcgcaagatcctgaatcccttcaggatcgaggtgaaggtaaggtcgccactaccgtgatttctaaaatgctgttcgtggaaccaatactggaagtgtcatcgctgccaaccactaacagcactaccaactccgcgaccaagattactgcaaataccaccgatgaacctactactcagcctaccaccgagccgacgactcaaccaaccattcagcctacgcaacccacgacccaacttccaaccgattccccaacccaacctaccacgggttcattttgccctggcccagtgaccctttgttcagacctcgaatcccactcaacggaagcagtgcttggagatgcgctggtggacttttcgcttaaactttaccatgccttctcggcaatgaaaaaagtggaaaccaacatggccttttcacctttctccattgcgtccctcctgacccaggtgctgctcggtgccggtgaaaatactaagacgaaccttgagtctattctttcgtatccaaaagactttacctgtgtgcaccaggctttgaaaggtttcaccacgaaaggcgtcacttcagtttcgcaaatctttcacagccctgaccttgcgataagagacacctttgtgaatgcaagccggaccctttactcgtcatcaccccgagttctgtcgaacaattcggatgcaaacttggagctgatcaatacttgggtggctaagaatactaacaacaagatctccagactgctcgattctcttccaagcgacactcgactggtgcttttgaatgcaatttacctgagcgcaaagtggaaaaccaccttcgatccgaagaaaactaggatggaacctttccactttaagaattcggtgattaaagtccctatgatgaactcgaagaagtacccggtggcacactttattgatcaaacgctcaaggcgaaggtcggtcaattgcaactttcccataacctttccctggtgattctggtgccgcaaaatcttaagcacaggttggaagatatggaacaagcactttccccttcggtctttaaagctattatggaaaagctggaaatgagcaagtttcagccaactctcttgaccctcccaagaattaaggttacgacttcacaggatatgctgtcgattatggaaaaacttgaattcttcgatttttcatacgacctcaatctctgtggcctgactgaggatcccgatcttcaggtgagcgccatgcaacatcagaccgtgctggaattgactgaaaccggggtggaagccgcagccgcaagcgcaatctccgtggcaagaactcttctcgtctttgaagtgcagcaaccatttctctttgtgctctgggaccaacagcataagtttccggtgtttatggggagggtgtacgatcctcgtgca

SEQ ID NO: 883 - DNA, 1500 bp, Artificial Sequence
  derived and/or modified sequence
atggcatcccgcttgacgcttttgacgctcctccttctgcttcttgctggtgacagggcatcctccaatcctaacgctacttcgtccagttcgcaggacccggaaagcctgcaagatagaggcgaaggcaaagtggcaactactgtgatctccaaaatgctctttgtggagcctattctcgaagtgagctccctcccaactaccaattcgacgactaactccgccaccaaaatcaccgctaacaccactgacgaaccaacgacccaacccactactgaacccacgactcagcccactattcaaccaacgcaaccgaccacccaacttccgactgattcgcctactcaaccaaccacgggctcattttgccctgggcccgtcaccctttgttccgatctcgaatcgcatagcaccgaggccgtccttggagatgcccttgtcgatttttcgcttaagctctaccacgcattttcagccatgaagaaagtggaaaccaatatggcgttcagtcctttctccatcgcgtcgctgctgactcaggtgctgcttggtgcaggagagaatactaagaccaacctggagtccatcctcagttaccccaaggactttacctgcgtccatcaggcgctcaagggatttaccaccaagggggtgacttcggttagtcagattttccattcacccgatcttgcaataagggataccttcgtgaacgcgtccagaaccctttactcgtcgtcacctcgtgtgcttagcaacaactcagacgccaatcttgaattgattaacacctgggtggccaagaacaccaacaacaagatcagccggctgctggactccctgccttcggacacccggcttgtgctgttgaatgcaatttacctgtcagcaaagtggaaaactacctttgatcctaagaaaaccagaatggaaccttttcactttaagaactccgtaatcaaagtcccgatgatgaattcgaagaagtaccctgtcgcccatttcattgaccagaccttgaaagccaaagtgggacaactgcaactctctcataatctttcacttgtgattctggtgccacagaacctcaagcacagactcgaggatatggaacaggctctttcaccaagcgtattcaaggccatcatggaaaaacttgaaatgagcaagtttcagcctaccctgcttactctgcccagaattaaggtcactacttcacaagatatgctgagtataatggaaaagctcgaattctttgatttttcgtatgatctgaatctgtgtggactgactgaggatcccgatctccaagtgtcagcgatgcagcaccagaccgtgcttgagctgactgaaactggagtggaggcagccgcagcaagcgcgatttccgtcgcaaggacgcttctcgtgttcgaggttcaacaaccattcctttttgtgctgtgggatcagcaacataagtttccagttttcatgggtcgagtttacgacccacgggcg

SEQ ID NO: 884 - DNA, 1500 bp, Artificial Sequence
  derived and/or modified sequence
atggcatcacggctgactctgctgactctcctgctgctgttgctcgcgggggatcgcgcatcgtctaatcccaacgccacctcatccagctcacaggacccggaaagcctccaggacagaggagagggaaaggtggccaccaccgtcatcagcaagatgctgtttgtcgaaccaatcctggaagtgtcctccctgcctactaccaacagcaccacgaactcagccaccaagatcaccgcaaatacgactgatgagccgaccacccagccgaccactgaaccgaccactcagccgactatccagccgactcagccaactactcagctccctaccgattcaccaacccagcccaccaccggttcgttctgcccgggcccagtgaccctgtgttccgaccttgaatcccactcgaccgaagccgttctgggagacgcattggtggacttctctctgaagctctaccacgcgttttctgctatgaaaaaggtggagacgaacatggcattttccccattctcgatcgcgtccctcctcactcaagtcctgctgggagcgggagaaaacaccaaaacgaacctcgaatctattctgtcatacccgaaggacttcacttgcgtgcaccaagcgttgaagggattcaccaccaagggagtgacttccgtgtcccagatcttccactcaccggacctggccatccgagacaccttcgtcaacgcttcgcgcaccctctactcatccagcccgcgcgtgctctcgaacaactcagacgctaacctggaactgatcaatacttgggttgctaagaatactaacaataagatctcgcggttgctggactcacttccttcggatactcgcctggtgttgttgaacgccatctatctcagcgcgaaatggaaaactaccttcgacccgaaaaagacccgtatggaacctttccactttaagaactccgtcatcaaggtcccgatgatgaacagcaagaaataccctgtggcgcacttcatcgatcagaccctgaaggcaaaggtgggacagctccagctttcccacaacctgtccttggtcatcctggtgcctcaaaatctgaagcaccgcctcgaagatatggagcaggcactgtccccatccgtgttcaaggcgatcatggaaaaactggagatgtccaaattccaaccgaccctcctcaccctgccgcgcattaaggtgaccacttcccaggacatgctctcaatcatggaaaagctggaattcttcgacttcagctacgacctcaacctgtgcggccttaccgaagatccagacctgcaagtgtccgctatgcaacatcaaactgtgcttgagctgactgaaaccggagtggaggctgccgccgcaagcgcgatcagcgtggcccgcactctgctggtgttcgaggtgcagcagccatttctgtttgtgctgtgggaccaacaacataagtttccggttttcatgggccgcgtgtacgacccgcgcgcc

SEQ ID NO: 885 - DNA, 1500 bp, Artificial Sequence
  derived and/or modified sequence
atggccagtaggttaacactgctcactctcctcctcctgctgctcgctggcgacagggcttctagcaatcccaacgccacaagctcctcatcccaggatcctgaatctttgcaggaccggggggaagggaaagtcgccaccaccgtgatatccaaaatgctatttgttgaacctatcctggaggtcagttctctgcccaccaccaatagcacaaccaattctgccacaaaaatcacagccaacaccacagacgagcctaccacccaacctaccaccgagcctaccactcagcctaccatccagcccacacaacccacgactcagctgcccaccgattctccaactcaacctaccactgggagcttctgccctggaccagtgacgttatgttcggatttggaatctcactccactgaggcggtgctgggggatgcccttgttgacttctccctcaagctgtatcacgcgttttccgccatgaagaaagtagagactaacatggccttttctcccttttctatcgcttccttgctgacacaggtgttactcggagctggggagaatacaaaaactaacttggagtcaatattatcctatccgaaggattttacttgcgttcaccaagcactgaagggattcacaaccaaaggtgtgacttctgtcagccagattttccattcccccgatctggcaatccgcgatacttttgttaacgcctccagaacactgtacagcagctccccaagggtgttatcaaataatagcgacgctaatctagaattgatcaatacctgggtcgctaaaaatactaacaacaagatctctcgcctgctggatagcctaccctccgacaccaggttagtgttgctgaacgccatttatcttagtgcaaaatggaaaactacttttgatcccaaaaaaacgcgtatggaacccttccatttcaagaatagcgtgattaaggttcctatgatgaacagcaagaaatacccagtcgcccacttcattgaccagacactgaaggcgaaggttgggcaacttcaactgtcccataatcttagcctggtgattctagtcccccagaatctgaaacacaggctggaggacatggagcaggccctgtcaccttctgtctttaaggccattatggaaaagctcgagatgtccaagttccagcccaccttgttaaccttgccacgaattaaagtcacgacatcacaagacatgctatctatcatggaaaaactggagttctttgatttcagctatgacctgaacctgtgtggccttaccgaggatccggatctccaggtgagcgcaatgcaacatcaaaccgtcttggagctgactgaaaccggtgtcgaagcagccgccgcaagtgcgatatcggtggccaggaccctacttgtattcgaggtccaacagcccttcctgtttgtcctgtgggaccagcaacacaaattccccgtttttatgggccgtgtctacgacccacgcgcc

SEQ ID NO: 886 - DNA, 1500 bp, Artificial Sequence
  derived and/or modified sequence
atggcaagccgattgacccttctcactctgttactgctactgctggccggggaccgtgctagcagcaatcctaacgccacgtcctctagttctcaggacccagagtccctgcaggacaggggcgaggggaaggtcgccaccacggtcatcagtaaaatgctgttcgtggagccgattctggaagtgtcttccctcccaaccacaaactcaacgacaaactctgctactaagatcaccgccaatactaccgacgaaccaaccacccaaccaaccaccgagccgacaacccagccaacaatacagcctacccagccaaccactcagttgcccaccgattcacccacccaacctacgaccggatccttttgtccaggccctgtgacgctatgctctgatctggagagtcactctacagaagctgtacttggcgatgcactggtcgatttttccctcaaattatatcacgccttcagcgccatgaaaaaggtagagactaatatggccttctcgccattctctatcgcttctttactgacacaagtgctcctaggtgccggagagaacaccaaaacaaatcttgagagcatcctttcttacccgaaggacttcacctgcgtccatcaagccctgaaaggattcaccactaaaggcgtgacctctgtctctcagattttccattcacccgatctggcaatccgggatacctttgtgaacgcatccaggaccttgtacagttccagcccacgcgtcctgtccaacaattctgacgctaacctggagttaataaacacatgggtggcaaagaacacaaacaataagataagtcggctactggactccttgccttccgacactcggctggtgctcttgaacgccatctacctatccgctaaatggaagacaacgttcgatcctaagaaaacccggatggagccttttcacttcaagaactccgtgatcaaggttcctatgatgaacagcaagaagtatccggtggctcacttcattgaccagacactcaaggcgaaggtggggcaacttcagctttctcataatctgtctctggtcatcctcgtgccacagaacctgaagcatcgactggaagacatggaacaagccctttccccatctgtcttcaaggctataatggaaaaactggagatgtctaagttccagcctaccctactcaccctaccccgaattaaagtgaccacctctcaagacatgttaagtataatggaaaagttagagttcttcgatttctcgtatgacctgaacctgtgtggactcacggaagatcccgaccttcaggtgtctgcaatgcaacaccaaacagttctggaactgactgagacaggcgtagaggcggctgccgcgagtgctattagcgttgcgagaacattgctggttttcgaagtgcagcaaccctttctgttcgtgctctgggatcaacagcacaagttccctgtcttcatggggcgcgtctatgacccacgagct

SEQ ID NO: 887 - DNA, 1500 bp, Artificial Sequence
  derived and/or modified sequence
atggcttcgcgactgacccttcttactttactacttttgttactggccggcgacagggcctcaagcaacccaaatgcgacctcatcatcttcgcaggaccccgagagcctccaggataggggggagggcaaggtggccactaccgtgattagtaaaatgctgtttgtggaacctatcctcgaggtgtcaagccttcctacaacaaatagcaccaccaactcagccacgaagattaccgccaataccactgacgaacccaccacccagcccacaactgagcctaccacccagcccaccatacagccgacacagccaactacgcagctgccgacagattcaccaactcaacctacaactgggtctttttgccccgggcccgtgactttgtgttccgacctcgaatcccattccacagaggctgtactgggagatgcgcttgtagacttcagcctgaagctataccacgcgttttctgctatgaaaaaagtggagacgaatatggcattttcgcccttttccatcgccagtctcctgacccaggtgttgttaggagctggagagaatacaaaaactaacctcgaatccatcctatcttatccgaaagactttacctgtgtccaccaggcactgaagggctttactactaagggagtgacttcagtgtcgcagatattccatagcccagaccttgcaattcgtgacaccttcgttaacgcgagccgcacactctactcatcttcaccgagagtgctgtctaacaacagcgatgcaaatctggagctcatcaatacgtgggtcgcaaagaataccaacaataagatatctcgcctgttggactctttgccgagtgatacgcgtttggtgctgctaaacgcaatctacctgtccgcgaagtggaagactaccttcgatccaaagaagactcgaatggagccgtttcactttaaaaattccgtgatcaaggtgcccatgatgaacagtaaaaagtaccccgttgctcattttattgaccagaccctgaaggccaaggtgggccaactacagctatctcataacctcagccttgtcatcctcgttccacagaatctcaaacaccgcttggaggacatggagcaggctctgtctccctccgtcttcaaagccatcatggaaaagctggaaatgtcgaagttccagcctacactgctcactctgccacgcataaaggtcacaacctcgcaagacatgttgagcattatggaaaagctggagttcttcgatttttcatatgacttgaacttgtgcggcttaactgaggatccagacctgcaggtgtcagctatgcaacaccagaccgttcttgaactgacagagacaggagtggaggcagctgcggcctccgctatttcggtggcacgcacattgctggtgtttgaggttcagcagccgtttcttttcgtactatgggatcagcagcacaagtttccggtgttcatgggtagggtgtacgacccacgcgcc

SEQ ID NO: 888 - DNA, 1500 bp, Artificial Sequence
  derived and/or modified sequence
atggcaagtcgattgacattgttaaccttattactgttactgctggccggtgacagagcttcttctaaccccaacgcaaccagctcctccagtcaagatcccgagtctttgcaggatagaggcgaaggcaaggtggcgactaccgtgatcagtaagatgctgtttgtggagccgattctggaggtcagctctctgccgactacaaattctacaacaaattcggcaaccaaaatcacagcaaatactacagacgagcctacaacacagcctactacggagcctacaacgcagcctacgatacaaccaacgcagccaaccacccagttgcccaccgactcaccaactcaaccaactactgggtcattctgccctgggcctgtgaccctctgttccgacctggaatcccactcaactgaagctgtcctcggggacgctctcgtggacttttcactgaaactctaccacgcattcagcgctatgaagaaggtggagacaaatatggcatttagccctttcagtattgcttccctgttgactcaggtcctcttgggggcgggagaaaatactaaaaccaatctggagtccattctgtcatacccaaaagacttcacgtgcgtgcatcaagccctcaaaggatttactaccaagggcgtcacctctgttagccagatcttccacagccccgaccttgcaattcgggatacattcgtgaatgcatcacgcaccctgtactccagtagccccagggtcctctcaaacaacagcgacgccaacctggagctaataaacacctgggtcgccaaaaacaccaacaacaaaatttcacgcttgctagatagcctgcccagtgatacccgccttgtcctgctgaatgccatataccttagcgccaaatggaaaacgacctttgatcccaagaagacaagaatggagccctttcacttcaaaaactcggtgatcaaagtccccatgatgaactccaagaaatatccagtcgcccactttattgaccagacactcaaagcaaaggtggggcaactccagctaagtcataacctaagtctggtgattcttgtgccccagaacctcaaacatcgcctagaagacatggaacaggccttgtccccttcagtgttcaaagctatcatggaaaaactggaaatgagtaaatttcagccgacattgttgacgctacctagaatcaaggtgaccacctcccaggatatgctttctatcatggaaaaactggaattcttcgatttctcctacgatctgaacctgtgtggattgaccgaagacccagacctgcaagtgtctgctatgcaacaccagacggtgttggagttgactgagacgggggttgaagcagctgcggcatccgccatctccgttgcccggacgttactggtttttgaagtgcaacagcctttcctattcgtgctatgggaccaacagcacaagttccctgtcttcatgggccgggtatacgaccctagagca

SEQ ID NO: 889 - DNA, 1500 bp, Artificial Sequence
  derived and/or modified sequence
atggcctcgcgccttaccttgcttactctgttgctgcttcttctcgccggagacagagcatccagcaatccaaacgcaacctcctcatcatcccaagacccagaaagtctccaagatagaggcgaagggaaggtggccaccaccgttatcagcaagatgctgttcgtcgaacccattcttgaagtgtcctccctcccgaccaccaattccaccaccaactctgcaaccaaaatcactgcaaataccaccgatgaacctactacccagccgactacggaaccaactacccaaccaaccattcagccaactcaacccactacccagcttccaactgatagccctacgcaacctacgactggatccttttgtccaggtcctgtgaccctttgttcagatctcgagagccattccactgaagcagtgctgggagatgcattggtggatttttcactcaagttgtaccatgcattctcagcaatgaaaaaggtggaaaccaacatggcttttagcccattctcgattgcatcgctgctgacccaggtgctccttggtgcaggggaaaataccaaaaccaatcttgaaagcatcctgtcatacccaaaagattttacttgtgtgcatcaagcacttaagggttttacgactaaaggtgtgacgtcggtgtcacagatcttccatagcccagacctcgcgataagggatacttttgtgaacgcaagcagaaccctttactctagctcgccaagagtcctctccaataactccgatgcaaacctggaattgataaacacctgggtcgcgaagaataccaacaacaagatttctaggctgctggacagcctgccttccgatacccggctggtgctgcttaacgcaatttaccttagcgcaaagtggaaaactacctttgatccaaaaaagaccagaatggagccgtttcacttcaagaactccgtgattaaggtccctatgatgaatagcaagaagtaccctgtcgcgcatttcatcgaccaaaccctgaaggcaaaggttggccagctccaactttcccacaacctttccctggtgattctggttccacagaaccttaaacatcggttggaagatatggagcaagcactctccccttcggtctttaaggcaattatggaaaaacttgagatgagcaagtttcagccaaccctgctcacccttccgagaattaaggtgaccacctcccaggatatgctgagcattatggaaaagctggagtttttcgatttttcctacgacctgaatctgtgtggacttactgaggaccccgatctccaggtatccgcaatgcaacatcaaactgtgcttgagctcactgaaaccggagtcgaggctgccgcagcttcggcaatttcggttgccagaactctcctcgttttcgaggtgcaacaacccttcctttttgtcctttgggatcaacaacataagtttcccgtgtttatgggtcgggtctacgatcctagagcc

SEQ ID NO: 890 - DNA, 1500 bp, Artificial Sequence
  derived and/or modified sequence
atggcgtccaggttgaccctgctcaccctgctgcttctgcttctcgcgggagatagagcgtccagcaatccaaacgcaacctcctcgtcgtcgcaggatcctgaaagcctccaggatcgtggagagggcaaagtcgctactacggtgatctccaagatgctgtttgtagagcccatacttgaagtttcgagcctgcctactactaactcaaccactaactctgcaaccaaaatcaccgccaacactacggatgagccaacgacgcaaccaaccactgaacctaccacgcaaccgacgatacagccaactcagcctactacccagcttcccactgattcccccactcaacctacgaccggatcgttctgtcctggtcccgtcactctgtgcagcgatctggaatcacattcaactgaggcggtcctgggagatgcactggtggacttttcacttaagctctaccacgcatttagcgccatgaagaaggtagaaactaacatggcctttagccctttttccatcgcatcactgttgacccaagtgctccttggtgcgggagagaataccaaaactaacctggaaagcatcctttcataccctaaagactttacttgtgtgcatcaagccctgaagggcttcaccacgaagggggtgacctccgtgtcgcagatttttcacagcccagatctcgctattcgggacacgtttgtgaatgcctcgagaaccttgtacagttcgagcccacgcgtgttgagcaataactccgacgctaaccttgaactcattaacacctgggtggccaagaacaccaacaataagatctcacggctcctcgactccctgccctcggacaccagacttgtgctgctgaatgcaatctacctgtctgccaaatggaaaaccacctttgaccctaagaaaactaggatggagcctttccatttcaaaaactctgtgataaaggtaccgatgatgaacagcaagaagtacccggtcgcacactttattgaccaaacccttaaggctaaggtcggtcaacttcaactcagtcataatctgtctctggtcattctggttcctcaaaacttgaagcaccgactggaggatatggaacaggcactgtccccctcggtctttaaggcaatcatggaaaagctcgaaatgtcgaagtttcaaccaaccctgctgaccttgccacgcattaaagtgaccacctcccaggatatgcttagcattatggaaaagttggaattcttcgatttctcttacgatcttaatctgtgtggcttgactgaagatcctgacctccaggtgagcgcgatgcagcatcaaactgtccttgagctcacggaaactggggttgaggcagcagcagcaagcgccatttccgtggcacgcacgctgcttgtctttgaggtgcagcagccattcctttttgtgctttgggatcaacaacataagttcccagtgtttatgggacgagtgtatgatccacgtgcc

SEQ ID NO: 891 - DNA, 1500 bp, Artificial Sequence
  derived and/or modified sequence
atggcatcaaggctaacactgctgactcttctcctgctcctgctcgccggcgatcgtgctagctcaaaccctaatgcaacctcaagctcctcgcaagacccagagtctctgcaagatcgcggagaaggtaaagtagcaaccaccgtcatttcgaaaatgctgtttgtggagcctattcttgaggtctccagcttgccgaccaccaacagcaccactaatagtgcaacaaagattaccgcgaatacaactgatgaacccacaactcaaccgaccactgagccaaccacccagcccacgattcaacccacacaaccaacgactcagcttcctacggacagccctactcaacccacgacgggaagtttctgccctggcccggttactctgtgctccgacctggagtcccatagtacggaggcagtgctgggagacgcgcttgttgatttctcattgaagttgtatcacgccttctcggccatgaagaaagttgaaacaaacatggccttttccccgttcagtatcgcctcgttgctcacccaagtgctactgggcgcgggagaaaataccaaaacaaacctagagtcaatcctatcttaccccaaagatttcacatgcgttcaccaggcactcaagggtttcacaaccaaaggcgtaacgtccgtgagccagatcttccattctccggaccttgctatccgagatacattcgtgaacgccagcaggacgctttactcgtcgtccccccgtgttttatcgaataactcggacgcgaatctggaactaatcaatacatgggtggcgaagaacaccaacaataagattagccgtctcctggatagtttgccctcggacacacgcctagtacttctcaatgcaatttacttaagtgctaagtggaagacaacattcgatccgaaaaaaaccaggatggaacccttccatttcaagaactccgtcataaaggtgcccatgatgaactctaaaaagtatccagtggcccatttcatcgaccagactcttaaggccaaggttggccagctgcaactatctcataacttgagcttggtgattctagtgccacagaacctcaaacaccgtcttgaagacatggagcaagcacttagtccctccgtgtttaaggctatcatggaaaagctcgagatgtccaagttccagcccaccttgttgacgttgcctcgtatcaaggttacgacgagccaggacatgctgtctatcatggaaaagctcgagttcttcgatttcagctacgacctcaatctgtgcgggttgactgaagaccctgatcttcaggtttcggccatgcaacatcaaacagttctggagcttaccgaaacaggcgtcgaggctgctgccgcttcggccatatctgtcgcgcgtactttattggtattcgaggtccaacagccattccttttcgtcctgtgggatcaacagcacaagtttccagtattcatgggacgcgtctatgacccccgggcc

SEQ ID NO: 892 - DNA, 1500 bp, Artificial Sequence
  derived and/or modified sequence
atggcgagtagacttactttgctcacgctccttctcctgctcctcgccggtgaccgggcgtcctccaacccaaacgcaacctcatccagcagccaagatcccgaaagcctgcaggatcgcggtgagggaaaggtcgcaactaccgtgatttccaaaatgctttttgtggagccaatcctggaagttagctcccttcccactactaactccactaccaactccgcaactaagattacggctaacacgactgacgaacctaccactcagcctaccactgaacccaccacgcaacctaccatccaacctacccaacctactacccaactgccaactgattcacccacccagcctaccacgggatccttttgccctggtcctgtcaccctttgttctgatctggaatcccatagcaccgaagcagtgctgggagatgccctggtcgatttttcgctgaagttgtaccatgctttttccgcaatgaagaaagtggaaaccaacatggcattttcaccattctcgatcgcatcacttcttactcaggtgctgctgggagcgggtgaaaataccaaaacgaacttggagtcgattctctcctaccccaaggattttacctgtgtccatcaagcactgaaggggtttactactaaaggagtgacctcagtgtcccagatctttcattcacctgacctggccattagagacacctttgtaaacgcttccaggaccctttactcgagctcgcctagagtgctgtcaaacaattcagatgcgaatctggagcttatcaatacctgggtcgccaaaaacaccaacaacaagataagccgactgttggacagcctgccttcggatacgcgtctggtgctcctgaatgcaatttacctgtcggcgaagtggaaaactaccttcgaccctaaaaagacccggatggagccgtttcactttaagaatagcgtgattaaagtgcctatgatgaactcaaagaagtatcctgtggcccactttatagatcagactcttaaggcgaaggtcggtcagctccagcttagccataatctcagcctggtgattcttgtgcctcagaatctgaagcatcgactggaagatatggagcaggcactgagcccttcagtgttcaaggcaatcatggaaaagttggagatgtcgaagtttcaaccaaccctgctcactcttcctcgcattaaagtcactacttcacaagatatgctttcgataatggaaaaactggagttttttgacttttcatatgatctgaacctgtgcggactcacggaagatcctgatctccaagtttccgccatgcaacatcagacggtcttggagctgacggaaaccggagtggaagcagcagcagctagcgcaatttccgtggcaagaactttgctggtctttgaggtccagcaaccgttcctgttcgttctgtgggaccaacaacataagttcccagtgtttatgggacgggtgtatgatccgagagcg

SEQ ID NO: 893 - DNA, 1500 bp, Artificial Sequence
  derived and/or modified sequence
atggcctcacggctgactctcctgacgctgctccttctgttgcttgccggtgaccgagcctcgtccaaccctaacgcaactagctccagctcccaagatcccgaaagcctccaagataggggtgaaggcaaggtggcgacgactgtcatttccaagatgctgttcgtggaaccaatcctcgaagtctcgagcctccctaccacgaattccaccaccaatagcgcgactaagatcaccgccaacactaccgacgaacctactactcagccgactaccgagccaaccactcaaccgactattcaaccgactcagccgaccacccaactgcccactgattcaccgacccagccaacgactggtagcttctgccctggaccagtcaccctctgttccgaccttgaatcgcattcgaccgaggctgtgctcggagacgccctcgtggatttctcgttgaaattgtaccacgcattttctgctatgaaaaaagtggaaaccaacatggcattttcgccgttctccattgcgagccttcttacccaggtgctgctgggagcaggcgagaacactaagactaaccttgagtcgatcctcagctatccaaaagactttacttgtgtgcatcaagcactcaagggatttactacgaaaggtgtgacttcggtttctcaaatctttcatagcccagatcttgccattcgcgatacttttgtgaatgcttcgagaaccctgtactcgagcagcccccgggtgctctcgaacaactccgacgcaaaccttgagcttatcaacacctgggtggcaaaaaacacgaataacaagatttcaaggttgctggatagccttccatctgataccagacttgtccttctgaatgccatttacctttctgcaaagtggaaaaccacttttgatcctaagaaaaccagaatggaaccctttcactttaagaattcggtcattaaggtccccatgatgaattcgaaaaagtaccctgtggctcatttcatcgaccaaaccctcaaggcgaaggtggggcaactccaactttcccacaatctcagcttggtcatcctggtgccacaaaatcttaagcatcgcctcgaggacatggagcaagcactttctcctagcgtgttcaaagcgataatggaaaagctcgaaatgtcaaagtttcaacctacccttctgactctcccaagaattaaggtgacgacctcgcaagacatgctgtccattatggagaagctggagttctttgatttctcatacgatctgaacctttgcggtcttaccgaagatcccgatctgcaagtgagcgcaatgcagcaccagaccgtgcttgaactcactgaaacgggcgtggaagcagcagcagcgtcagctatcagcgtcgcccgtactctcctcgtgtttgaagtccagcaacccttcctttttgtgctttgggatcaacagcataagtttcccgttttcatgggacgcgtgtacgaccctagggcc

SEQ ID NO: 894 - DNA, 1500 bp, Artificial Sequence
  derived and/or modified sequence
atggcgtcacggctgacgctcctcactctgttgctccttctccttgcgggcgatagggccagcagcaatccgaatgctaccagctcgtcctcacaagatccagagtcgctccaagatcggggggaggggaaggtcgctaccacggtcatttcaaagatgctgttcgtcgagcctatcctggaagtgtcatctctgccgaccaccaattcaaccaccaactcagccactaagatcaccgcaaacactactgacgaaccaaccacgcagccaactactgagccaacgactcagccgactatacagcctacccagccaaccactcagctgccgactgactcgcctactcagcccacgacgggatccttctgcccaggtccggtgactctgtgttccgaccttgagagccacagcaccgaggctgtgctgggagatgcgcttgtggacttctcgctgaagctctaccacgccttctccgctatgaaaaaagttgaaactaatatggccttctcccccttctccatcgcatccctcttgacgcaagtgctcttgggagccggagaaaacaccaaaactaaccttgaatccatcctgtcgtaccctaaggacttcacctgcgtgcaccaggcactgaagggttttactactaagggcgtcacttccgtgagccaaatcttccacagcccggatctggcgattagagatactttcgtcaacgcctcgagaactttgtactcgtcgtctccgcgcgtgctgtcaaacaactcggacgccaacctggagctcatcaatacctgggtcgcgaagaataccaacaataaaatctcgaggctgttggactcgctgccgagcgacaccagactggtcctgttgaacgctatttacctgagcgcaaagtggaaaaccacctttgaccccaagaaaactcgaatggaaccgtttcatttcaagaactccgtgatcaaggtgccgatgatgaactccaaaaagtatcctgtggctcacttcatcgaccaaaccctgaaggcgaaggtgggccagctccagttgtcgcacaatctctccctggtgatcctggtaccacagaacctgaagcatcgcctggaagatatggagcaggcgctgtcaccctcagtgtttaaggcaatcatggagaagctggagatgtcgaagttccaaccaaccctgctcacccttccgcgcatcaaggtgaccacttcgcaagatatgctcagcatcatggaaaaactggaattctttgatttctcgtacgacctcaacctctgcggactcaccgaagatcctgacctgcaagtctccgcgatgcagcatcagaccgtgctcgaactcaccgagactggagtggaagcagccgccgccagtgccatcagcgtggcccgcacccttctggtgtttgaagtccagcagccgttcctgttcgtcctgtgggaccagcaacataaattcccggtttttatgggacgggtgtacgacccgcgggcc

SEQ ID NO: 895 - DNA, 1500 bp, Artificial Sequence
  derived and/or modified sequence
atggcttctcgcctgacactgctcaccctcctgctgcttcttcttgcaggagatcgtgcttctagcaaccccaatgctacctcaagctcctcccaagatcccgagagcctgcaggaccgtggcgagggtaaggtggctacaaccgttatctctaagatgctgtttgttgagcctatactcgaggtttcttcactgccaacaaccaactccactactaattccgctactaagattaccgcaaataccaccgacgagccaaccactcagcctacaactgaaccaaccactcagcctacaatccagcccacccaacctacaacacagctgcctaccgactctccaacacaacctacaaccggtagtttttgccccggtccagttaccttgtgcagtgatcttgagtcccattctaccgaggctgtgctgggtgacgcactcgttgacttcagtttgaaactttaccacgctttttcagctatgaagaaggttgagactaatatggcttttagtccattctcaatcgccagtttgctcacacaagttttgttgggcgctggcgaaaacacaaagacaaatctggaatcaattctctcttaccctaaggactttacctgcgtccaccaggcattgaagggctttactacaaagggcgtaaccagcgtgtcccagattttccattctccagacttggcaatcagggacaccttcgtgaacgcttctaggacactgtactctagctcaccccgtgtattgtcaaataactcagatgccaatctggagctgattaacacctgggtagcaaagaacacaaacaacaagatttccagacttttggatagcctcccatccgacacaagattggtactgttgaacgccatatacctttctgcaaagtggaaaacaactttcgacccaaagaaaacaagaatggagccttttcatttcaaaaactctgttatcaaggtcccaatgatgaacagtaagaagtacccagttgcccacttcatcgatcagacacttaaggccaaggtgggtcaactgcagctgtcacacaacctgtccctggttatcctcgtccctcagaacctgaagcaccgtctcgaggacatggagcaggctctgagcccctcagtgttcaaggccataatggagaagttggaaatgagtaagtttcagccaacactgctgactctccctcgcattaaggttacaacttcccaggacatgctcagcatcatggaaaagctggaattcttcgatttttcctatgacctcaacctctgcggtttgacagaagaccctgacctgcaggtgtccgcaatgcagcatcaaaccgtcctggaacttacagagacaggagtcgaggcagccgctgcttctgcaatttccgtggctaggacactgctggtgtttgaggtgcaacagccctttcttttcgtgttgtgggatcagcagcacaaattcccagtattcatgggaagagtctacgatcctagagct

SEQ ID NO: 896 - DNA, 1500 bp, Artificial Sequence
  derived and/or modified sequence
atggcctcccgccttaccctgttaaccctcctgctgctcttgttggccggggatagggcttcttcaaacccgaatgctacctcttcctctagccaggatcccgaaagtcttcaagaccgtggtgagggcaaggtcgccacgactgttatctcgaagatgcttttcgtggagcccattctcgaggtcagtagtttgcctacaactaatagcactaccaacagcgctaccaaaatcacagctaacaccacggacgagcccacgacccagcccactacagagccgactacacagccgactatccagcctactcagccaacaacacagctgcctaccgactcaccgacccagccaaccaccggctcattctgtccaggtcccgtcaccctgtgctctgatctggagtctcactcaacagaagccgtgttaggcgacgcattggtcgacttctccctgaagctgtatcatgccttcagcgcgatgaaaaaggtggagacaaacatggccttttcgcccttcagcattgcgtctcttttgacacaagtgctgcttggcgcaggcgagaacaccaagaccaaccttgaaagtattctgagctacccaaaggattttacttgcgtccaccaagctctgaaaggttttacaactaagggggtgacatccgtgagtcaaatttttcacagtccagatctcgctattcgggatactttcgtgaacgcttccagaacactctactccagttcacctcgagtcctttctaacaacagcgacgcgaacctggagctcataaatacatgggtggccaagaatacaaacaacaaaatcagtaggctgctggattccttgccttctgatactaggctcgtgctcctgaacgctatctacctgtcagcaaagtggaaaaccacgttcgatcctaaaaaaacacgcatggaaccatttcactttaaaaatagtgtcatcaaggttcccatgatgaatagtaaaaaatacccagttgcccattttatcgatcagaccctgaaggccaaggtgggacaactgcaactgtcacacaatttatcgctggtcatcctggtcccgcagaatctgaaacaccgcctggaggacatggaacaagccctgtcccctagtgtctttaaggcaattatggaaaagcttgagatgagtaaatttcaaccaacgctgttaaccttacctagaatcaaagtgaccacaagtcaggacatgctaagcattatggagaagctggagtttttcgatttcagctacgatctgaatctctgtggcctgactgaagacccagatctgcaagtgagtgccatgcagcatcagacagtgttagaattaacagagaccggggttgaggccgctgccgcaagcgcgatttccgttgctcgaacgctccttgtgtttgaggtgcagcaacctttcctcttcgtgttatgggatcaacaacacaagtttcccgtcttcatgggcagagtctatgaccctagggcc

SEQ ID NO: 897 - DNA, 1500 bp, Artificial Sequence
  derived and/or modified sequence
atggccagccggcttaccttgttgactctgcttctgttgctccttgccggagatagagcaagctctaatcccaacgcaacttcttcaagctcacaagatcctgagtccttgcaggatagaggagaaggtaaagtggcaactaccgtgatctcgaagatgctctttgttgagccgatcctcgaggtatcatcactgcctactactaacagcaccactaactcggccaccaagattacggcgaataccactgatgaaccaactacccagccgaccactgagcccactacccaacctaccatccaacctactcagccaactactcaactgccaaccgactcgccgacccaacctactactgggtcgttttgtcctggacctgtgactctttgcagcgaccttgagagccactcaacggaagcagtgctcggcgacgcactggtggattttagccttaaactttaccacgcgttcagcgccatgaagaaggttgaaaccaacatggcatttagccctttttcgattgcttcacttcttacccaggtcctgctgggagcgggcgaaaacaccaagaccaacctggaatcgattctctcttacccaaaagatttcacttgtgtacatcaggctttgaagggattcaccactaagggtgtcacgtccgtgtcgcagatcttccactccccggatcttgcaattcgagatacttttgtgaacgcatcgcggactctgtatagttcgtccccccgtgtgctgtcgaataacagcgacgctaacctggaactcataaacacttgggtggccaagaacaccaataacaaaatcagccggctcttggattccctgccaagtgacacgagacttgtcctgctgaacgcaatttacctctccgcaaaatggaaaacgactttcgacccaaagaaaaccaggatggaacctttccatttcaagaactccgtcataaaggtcccaatgatgaattcaaagaagtaccccgtggcccatttcatcgaccaaactctcaaggcaaaggtgggccaactgcagctgtcacataacctgtcactggtgattctggttcctcaaaatctgaagcatcgcctcgaagatatggagcaggcactttccccatccgtgtttaaggcaatcatggagaaattggagatgagcaaatttcagccaacgcttctcactctgcccaggataaaggtcactacttcgcaagatatgctttccattatggaaaagctggagttttttgatttttcctacgatcttaatctctgcggtcttactgaggaccctgatcttcaagtttcggcgatgcagcatcagaccgtgcttgaactcactgaaacgggtgtagaagcggccgcagcatcggcaatttcggtggccagaacccttttggtctttgaagtccaacaaccgttcctgtttgtcctgtgggaccaacaacacaagtttcctgtgtttatgggacgcgtgtacgatccgagagcc

SEQ ID NO: 898 - DNA, 1500 bp, Artificial Sequence
  derived and/or modified sequence
atggcttctcggctgactctgctgaccttgctccttctcctcttggcaggagatcgcgcgtcatccaatccaaatgccacttcgtcgtccagccaggacccggaatctctccaagaccgcggcgagggaaaagtggcaactaccgttatcagcaagatgctgttcgttgaaccgattttggaagtcagcagcctgccgactaccaatagcaccactaactccgccaccaaaatcacggcaaacacgactgacgagccaaccactcaaccaactactgaaccaaccacgcaaccaactatccaacccacccagccgacgacccaactgccaactgattccccgacccagccgactactggatcattctgtcctggaccggtgaccctctgttcagacctcgagagccattccaccgaggctgttctcggagacgctctggtcgatttctccctgaagctgtaccacgctttttccgccatgaagaaggtcgaaactaatatggccttttcgcctttcagcatcgcttcgctgctgacccaagtcctgttgggggccggcgagaacaccaagactaacttggaatccatcctgtcgtaccccaaggattttacctgtgtgcaccaggccttgaaggggttcactacgaagggtgtgacctcagtctcacagatcttccacagccccgacctcgcgatccgcgacaccttcgtgaatgcgtcacggaccctgtactcttcctccccgagggtcctgtcaaacaacagcgacgcgaatctggagcttatcaacacgtgggtcgccaagaatactaataacaagatctcaagactgctggattccttgccgtccgacacccggctcgtgcttctgaacgcgatttacctgtccgctaagtggaaaactactttcgatcctaagaaaactcgcatggaaccgttccactttaagaactcagtgatcaaggttccaatgatgaactccaaaaagtacccagtggcccacttcatcgaccaaaccctcaaagccaaagtcggacaactccaactgtcacataacctgtccctggtgatcttggtcccgcagaacctgaagcatcgcctcgaggacatggagcaagccctgtcgccgtccgtgttcaaggccatcatggaaaaacttgaaatgtccaagtttcagccaactttgctgaccctgccacggatcaaagtcacgacttcgcaagatatgctttcaatcatggaaaagctcgaattcttcgacttcagctacgacctgaacctctgcggactgactgaggaccctgacctccaagtctcggcgatgcagcaccagactgtgctggagctgactgaaaccggggtggaggcggccgccgcctcggcaatctcagtcgcccgcaccctgctggtgttcgaagtgcagcagccttttctcttcgtgctgtgggatcagcagcataagttccctgttttcatgggaagagtgtatgatccgcgagcc

SEQ ID NO: 899 - DNA, 1500 bp, Artificial Sequence
  derived and/or modified sequence
atggcgtcgcgtctaacgctattaacgttattattactactattagcgggtgatcgtgcgtcgtcgaatccgaatgcgacgtcgtcgtcgtcgcaagatccggaatcgctacaagatcgtggtgaaggtaaagtagcgacgacggttatatcgaaaatgctatttgttgaaccgatattagaagtatcgtcgttaccgacgacgaattcgacgacgaattcggcgacgaaaataacggcgaatacgacggatgaaccgacgacgcaaccgacgacggaaccgacgacgcaaccgacgatacaaccgacgcaaccgacgacgcaactaccgacggattcgccgacgcaaccgacgacgggttcgttttgtccgggtccggttacgctatgttcggatttagaatcgcattcgacggaagcggtattaggtgatgcgttagttgatttttcgttaaaactatatcatgcgttttcggcgatgaaaaaagttgaaacgaatatggcgttttcgccgttttcgatagcgtcgctactaacgcaagtattactaggtgcgggtgaaaatacgaaaacgaatttagaatcgatattatcgtatccgaaagattttacgtgtgtacatcaagcgctaaaaggttttacgacgaaaggtgttacgtcggtatcgcaaatatttcattcgccggatctagcgatacgagatacgtttgtaaatgcgtcgcgaacgttatattcgtcgtcgccgcgagttctatcgaataattcggatgcgaatttagaactaataaatacgtgggttgcgaaaaatacgaataataaaatatcgcgtctattagattcgctaccgtcggatacgcgattagttttattaaatgcgatatatctatcggcgaaatggaaaacgacgtttgatccgaaaaaaacgcgaatggaaccgtttcattttaaaaattcggtaataaaagttccgatgatgaattcgaaaaaatatccggttgcgcattttatagatcaaacgctaaaagcgaaagttggtcaactacaactatcgcataatctatcgctagtaatattagttccgcaaaatttaaaacatcgtttagaagatatggaacaagcgttatcgccgtcggtatttaaagcgataatggaaaaattagaaatgtcgaaatttcaaccgacgctattaacgttaccgcgaataaaagtaacgacgtcgcaagatatgctatcgataatggaaaaactagaattttttgatttttcgtatgatttaaatttatgtggtctaacggaagatccggatctacaagtatcggcgatgcaacatcaaacggttctagaattaacggaaacgggtgtagaagcggcggcggcgtcggcgatatcggttgcgcgtacgttattagtttttgaagtacaacaaccgtttctatttgtattatgggatcaacaacataaatttccggtttttatgggtcgtgtatatgatccgcgagcg

SEQ ID NO: 900 - DNA, 1500 bp, Artificial Sequence
  derived and/or modified sequence
atggcgagtcgcctcactctgctgacgctgctgctgctgttgctcgcgggagatcgtgcgtcgtccaatccgaacgcgactagtagctcaagccaagacccagaatctcttcaagaccggggcgaaggaaaggtggctactactgtgatctccaagatgctcttcgtcgagccgattctggaggtcagcagccttccaaccactaattctaccaccaactccgccactaagatcaccgcaaacactactgacgagccgaccacgcagcctactaccgagcctaccacgcaaccgaccattcaaccaacccagcccacgactcaattgccaacggactctccgacccaaccgacgactgggagcttctgtcccggtccagtcaccctgtgcagcgacctcgaatctcactccaccgaagccgtcttgggtgacgccctggtggacttctcactcaaactgtatcatgcattttccgccatgaagaaagttgagactaatatggccttttccccattttcaatcgcgagcctcctcactcaggtgctgctgggagcaggagaaaacaccaaaactaatttggaatcgattttgtcctaccctaaggatttcacttgcgtgcatcaggccttgaagggcttcaccaccaagggggtcacctctgtcagccagatcttccacagcccagatctggcgatccgcgataccttcgtgaatgcgtcgcggaccctgtactcgtcatccccccgcgtgctctcgaacaactccgatgcaaacctggagcttatcaacacttgggtggccaaaaacaccaacaacaagattagtaggctcctggattcactgccatcagacacgaggctggtcctgctcaacgccatctacctgtccgcaaagtggaaaactacctttgacccgaagaaaactcggatggagccattccatttcaagaattcggtgatcaaagtgcccatgatgaattcaaagaagtaccctgttgctcacttcatcgatcagaccctgaaggcgaaggtaggacagcttcaactgtcgcataacctgtcgctcgtgatccttgtcccgcagaatctgaagcacagactcgaagatatggaacaagcactgtcaccgtcggtgttcaaggcaatcatggaaaagctcgagatgagcaagtttcagccgactctgctcaccctccctcgtatcaaagtgaccacgagccaggatatgctgtcgatcatggaaaaactcgaattcttcgacttctcttacgatttgaacctttgcggcctcaccgaggacccggacctgcaggtgtcagccatgcagcaccagacggtgcttgaactgactgagacgggcgtggaagcagctgccgcctcggctatctcggtcgcacgcacccttctggtatttgaggttcagcaaccattcctcttcgtgctgtgggaccagcagcacaagttcccggtgttcatgggaagagtgtacgaccctcgagct

SEQ ID NO: 901 - DNA, 1500 bp, Artificial Sequence
  derived and/or modified sequence
atggcatcacgcctgactctgctgaccctcctcctcctgctcctggccggagatcgagcgtcatcgaacccgaacgccactagctcctcgtcccaggacccagaatcgcttcaggatcgcggcgagggcaaggtggccacgaccgtgatttcgaagatgctgttcgtggaacccatcttggaagtgtcctcgttgccgactactaactcaaccacgaacagcgccactaagattactgcgaacactaccgacgaacctaccactcagccaactacggaaccgacgactcaaccgactattcaaccaacccaaccgaccacgcagctcccgactgacagccctacccagccgaccactgggagcttctgtcctggaccggtgactctgtgctcggaccttgagtcccattccactgaggcggtgctcggcgacgctctggtcgatttctcgttgaagctctaccacgcattttcagctatgaagaaggtggaaactaatatggctttctcgccattcagcatcgcgtcgctgctgactcaggtcttgctcggagcgggtgaaaataccaagaccaatcttgagagcatcctgtcttacccaaaagacttcacctgcgtccatcaggcgctgaaaggatttaccaccaagggcgtgacttcagtctcacaaatctttcactctccagacttggcaattagagacaccttcgtgaacgcgtcaaggaccctgtacagctcctccccacgcgtgctgtcgaacaactcggacgccaaccttgagctgatcaacacctgggtcgctaaaaacactaacaacaagatctcgagactgctggactccttgccatcagacaccaggctggtgctcctcaatgccatctacctgtcggcgaagtggaaaacgactttcgatccaaaaaagacccggatggagccgttccatttcaagaatagcgtgattaaagtgccgatgatgaactcgaagaaatacccggtcgcccactttatcgatcagactctgaaggcgaaggttgggcagctgcaactgtcgcataacttgagcctggtgatcctggtgccccaaaacctgaagcaccgcctcgaggacatggagcaagcgctctccccatccgtgtttaaagcgatcatggaaaagctggaaatgagcaagtttcagccaaccctccttaccctgcctagaatcaaagtgaccactagccaggatatgctgtctatcatggagaagttggaattctttgatttctcctacgacctgaacctgtgcggactgactgaggatccggatctgcaagtctccgcgatgcaacatcagaccgtgctggaactgactgaaaccggtgttgaagccgcggctgcctccgccatctccgtggcccgaactctgctcgtgttcgaagtgcagcagccgttcttgttcgtgctgtgggatcagcagcacaaatttccggtgttcatgggtcgcgtctacgatccgcgggcc

SEQ ID NO: 902 - DNA, 1500 bp, Artificial Sequence
  derived and/or modified sequence
atggcatcgcgcttaacgcttctcaccctgctcctcctactgcttgcgggagatagagcaagttcaaacccaaacgccacgtcctcaagctcacaggacccagaatcgcttcaggatcggggagaaggtaaggtggcaacaaccgttatctctaagatgttgttcgtggaacctattctggaggtgtcttcactgcccaccaccaactcaaccactaacagtgctactaagatcacggcgaacacgaccgacgagcccactactcagccgacgactgagcctaccacccagcctaccatccagccaacccagccaaccacccagcttccaactgacagtcccactcagcctactaccggctctttctgtcccggtcctgtcaccctgtgctccgatctggagtcccactccacagaagcagtcctcggcgacgcactcgtcgatttttctctgaagctctaccatgctttcagtgcaatgaagaaggtggagacaaacatggcattctcacctttctccatcgcctctttgctgacccaggttctgctgggagcaggagagaacactaagactaacctcgaatctatcctttcctatcctaaggacttcacctgcgtccatcaggcgcttaagggattcacaaccaaaggggtgacctctgtgagccagatcttccattcaccggatttggcgattagagacaccttcgtgaatgcatcaagaacactgtattcttccagtccccgagtcctgagcaataatagtgatgcaaacctggaactgattaacacgtgggtggcgaagaataccaacaacaagatcagtaggttactcgactctctaccctctgatactaggttggtactgctcaatgcaatctacctcagtgctaagtggaaaactactttcgaccccaaaaagaccaggatggaaccattccactttaaaaactccgtgataaaggtgccaatgatgaattctaagaagtatccggtcgcacatttcattgatcaaacactcaaggcgaaggtgggtcaactacagctatcacacaatctaagcctggttatcctggtaccgcaaaacctgaaacacagactggaagacatggaacaagctctatcaccctccgtctttaaagccataatggagaaactcgagatgagcaagttccaacctaccctcctgacccttccccggataaaggtaacgactagtcaagatatgctttcaattatggaaaaactggaattctttgacttctcctacgatctgaatttatgtggcctgaccgaagatcctgatcttcaagtctcggcaatgcagcaccagactgtgcttgagctcactgagacaggcgtcgaggccgcagccgcgtccgctatttcagtcgccagaaccctccttgtgtttgaagttcagcagccgtttctctttgttctgtgggatcagcaacacaaattccccgttttcatgggtagggtatacgacccccgggcg

SEQ ID NO: 903 - DNA, 1500 bp, Artificial Sequence
  derived and/or modified sequence
atggcatccaggctcaccttgctgacactcctgttgctgctgcttgcaggagatcgggcatccagcaacccaaacgcaacgtctagctcttctcaggaccccgagtccctgcaggaccggggcgagggcaaggttgcaactacggttatttccaaaatgctgtttgtcgagcccatactcgaggtcagctctcttcctactaccaatagcacgacaaattctgctactaagattacagcaaataccaccgatgaaccaactacccagcctacaacagagcccactacacagcctacaatccagcccacgcagccaactacacagctgccaaccgattcccccacccaacctaccacgggaagcttctgcccagggccggttacactctgcagcgatctcgagagccatagtaccgaagccgtcctgggggacgccttagtcgatttctcgctgaaattataccacgcattctctgccatgaaaaaagtggaaacaaatatggcctttagtcccttctctattgcgtcactactaacacaggtgctcctgggcgctggggagaacactaaaacaaatctggaatccatcttgtcatatccgaaagacttcacctgcgttcaccaagctcttaagggatttaccactaaaggcgttaccagcgtgagtcagatcttccattctccagacttagccatacgagatacttttgtgaacgctagccggacactgtactcgagctcccctcgcgtgctctccaacaacagtgacgcgaaccttgaactgatcaatacgtgggtggcaaaaaacactaataataaaatatctaggctgctggattccctgcccagcgatacgaggcttgttctcctgaacgcaatctacctgtctgctaaatggaagaccacattcgacccaaagaaaaccagaatggaaccatttcatttcaaaaattcggttataaaagtgccaatgatgaactccaagaaataccctgtcgcccatttcattgaccagaccctgaaggctaaggttgggcagttacagttgagtcacaacctctcgttggtcatactcgtaccgcagaatctgaagcacagacttgaagatatggagcaggctctgtctcctagtgtgttcaaagcaatcatggagaaactggagatgagcaagttccagcccacgctcctgaccttaccgcgaatcaaggtcaccacttcccaggatatgctctctatcatggagaaactggagtttttcgacttttcttatgatcttaacctttgtggactcaccgaggatcccgatcttcaagtatctgccatgcagcaccagactgtgctggaactcacagagaccggcgtggaagcggcagcagcttccgctataagcgtggctcgaacacttctagtttttgaggtccaacaacctttccttttcgtgctgtgggaccagcagcacaaattccccgtattcatgggcagggtttacgacccaagagcc

SEQ ID NO: 904 - DNA, 1500 bp, Artificial Sequence
  derived and/or modified sequence
atggcgagtaggctcaccctgctcacgctgctgctcctcctgcttgccggggatagagcaagttccaacccaaacgctacttcctcctcatcccaggaccccgaaagtttgcaggaccggggtgagggcaaggtggcaactaccgttatcagtaaaatgttgtttgtggaacccatcctcgaggtgtcctctttgccaacgacaaacagcaccaccaattccgccacaaagattacagctaatacgacggatgagcctaccactcagcctacaaccgagcccacgacccagcctaccatccagccaacgcagcccaccacccagctccctacggactctcctacccagcctaccacagggtccttctgtcccggtcctgtgacactgtgttctgatctggagtctcattccaccgaggccgtgctcggcgacgccctggtggacttcagtcttaaattgtatcatgctttcagcgcaatgaaaaaggtggagactaacatggcctttagtcccttcagtatagccagccttctgactcaggtgttgctgggtgctggcgagaacaccaaaacgaatttggagtctatcttgagctaccccaaagatttcacttgtgtgcaccaagcactcaagggatttaccactaaaggagtcacttccgtgtcccaaatcttccattcccccgatttggcaatccgggacacgttcgtgaatgcctctagaacactgtactcctctagtccccgggtcctgtctaataactctgatgctaatctcgagctgatcaacacctgggtcgctaaaaacacgaacaataagatttcccggttgcttgactcccttccctctgatacgaggctggtgctgttgaatgccatctatctgtctgccaaatggaagacgacctttgacccgaaaaaaacgagaatggagccgttccattttaagaattccgtgattaaggtaccgatgatgaacagtaaaaaataccccgtagcccatttcatcgaccagaccctcaaagccaaagttggacagctgcagctgtcccacaacctgagtctggtgatcctggtgccacagaacctgaaacaccgcctggaagatatggaacaggcactcagcccttctgtgtttaaggctatcatggaaaagctcgaaatgtccaagttccagcccaccctcttgaccctcccacggatcaaggtcactacctctcaagacatgctgtctatcatggagaaattggaattttttgattttagctatgacttgaatctgtgtggtttgactgaggaccctgatctccaggtgagtgctatgcagcatcagacggtcctggaattgaccgagactggcgtcgaggccgccgccgcctccgcaataagcgtagccagaaccctgctggtgtttgaggtacaacagccctttcttttcgtgctgtgggatcagcaacacaaattccctgttttcatggggcgagtgtacgatccgcgcgcc

SEQ ID NO: 905 - DNA, 1500 bp, Artificial Sequence
  derived and/or modified sequence
atggcttctcggcttacattattgacactactattgctacttctcgcgggggacagagcatcctcgaacccaaacgctacatcaagtagtagtcaggatcccgaatcattacaggataggggagaagggaaggtcgctacaacagttatctctaaaatgctctttgtggagccaatcctggaagtttccagtctccctacaacgaatagtacaactaattccgctacaaagatcacagccaatactactgatgaacccactacacagcctacaactgaacctacaactcaacccacaatccagcctacacagcctactacacagttacctactgactcccccacacagcctacaactggatccttctgccccggaccagttacactctgctctgacctggaaagtcactccacagaagcagtcttaggggatgccctcgtggacttctcgcttaaactataccatgcattctcagccatgaaaaaggtagaaacaaatatggctttcagtccattctcaatcgcttccctgttaacacaggtcctcttaggagccggagaaaacactaagacaaacctcgaatctatcctttcttatcccaaagattttacttgcgtgcaccaggccctcaaaggatttactactaaaggggtcacgtctgtctctcagatttttcattctccagatctcgctattcgggatacattcgttaatgcctcccggacattatattctagttcaccccgcgtgctctcgaacaactcagatgccaatttagaacttataaatacttgggttgcaaaaaacactaataataaaatatcccggctacttgatagtctgccatctgatacaagactggtactcctaaatgccatctatctttccgccaaatggaaaactacttttgatcctaaaaaaactcgaatggaaccttttcacttcaaaaacagtgtcataaaagtgcctatgatgaactctaaaaaataccccgtggcccacttcattgatcagacactcaaagccaaagtcggacagctgcagctctcccacaatctctctctggtgatcctggtaccacagaacttaaaacatagactagaagacatggaacaggccctctcaccaagtgtgttcaaagccatcatggaaaaactcgaaatgtcaaaatttcagcccacattactcactcttccacggatcaaagtcactacttcccaggacatgttaagtataatggagaaacttgagttttttgacttctcatatgatcttaatttatgcgggttaactgaagatcctgacctgcaggtgtcagcgatgcagcatcagactgtgctagaactcactgaaacaggagttgaggccgctgccgcttctgcaatatcagtcgcccggactttattggttttcgaagtccagcagccttttctcttcgtgctctgggatcagcaacataaatttccagtgttcatggggcgcgtgtatgatccaagagct

SEQ ID NO: 906 - DNA, 1500 bp, Artificial Sequence
  derived and/or modified sequence
atggcatccagactgactttactgacactcctgcttctcctactggccggagatagagcctccagtaatccaaatgcaacttcgtcttcatcacaggatcccgaatcactgcaggatagaggggaaggaaaagtggcaacaactgtgataagtaaaatgctgttcgtggagcccatactcgaagtctcatcattacctacaactaattccacaacaaattctgcaacaaagatcactgccaacacaacagatgagcctacaacacagcctactacagaacctactacacagcccactattcagcctacacagccaactactcagttaccaacagactcgcccacacagcctacaactgggtccttttgccccgggcctgtaactttgtgttctgatctagaaagtcacagtacagaagctgtcctgggagatgcccttgtggacttctctttaaaactgtatcacgcattttcagccatgaaaaaagttgaaactaatatggccttttcgccttttagtatagcttccttactaacacaagtgttgttaggagctggggaaaatactaaaacaaatctggaatccatcctatcttatcccaaagactttacatgcgtccatcaggcactgaaagggttcacaacaaaaggagtgacttctgtgagtcagatatttcatagtcccgatctagccatcagagatacttttgtcaacgcctctaggacattatactcttcatccccgagagtcctgtccaataattctgatgctaacttagaacttatcaacacttgggtcgcaaaaaatacaaataacaaaatatcccggctacttgatagtttgcctagtgatactagactggtgcttctaaatgctatctatctgtccgctaaatggaaaactacatttgatcccaaaaaaacacggatggaacctttccacttcaaaaatagtgtcattaaagttcccatgatgaattccaaaaaataccctgtggctcattttatcgatcagacactgaaagctaaggtggggcagctccagctgtcccataatttatccctcgtgatcctggttccccagaacctcaaacatagacttgaagacatggaacaggcactgagtccatccgtcttcaaagcaataatggaaaaactagaaatgtccaaattccagccaactcttctaactctcccacgcatcaaagttactacatcccaggatatgctgtcaattatggaaaaattagagttctttgatttctcctacgatctgaatctgtgtggactgactgaggatcctgacctacaggtgtccgccatgcagcaccagacggtgttggagctcactgaaacaggagtagaagccgcagcagcctccgcaatctccgttgcacggacactcctagtgtttgaggtgcagcaaccatttctgtttgtattatgggatcagcagcataagttcccagttttcatggggcgggtctatgatcccagggct

SEQ ID NO: 907 - DNA, 1500 bp, Artificial Sequence
  derived and/or modified sequence
atggcctcccggctgaccttactcacccttttgctgctgctcctggctggggaccgggcttccagcaatcccaatgctacatcatcaagttcccaggacccggaaagcctacaggataggggagaagggaaagtggccacaaccgtgatcagtaaaatgctttttgtggagccgattctcgaggtgtctagcctgcctactacgaacagcaccactaatagtgccacaaagatcaccgcaaataccacggatgaacctactacccagcctaccaccgaacccactacccagccaacaattcaaccaactcagcctacaactcaacttccgaccgacagccctacacaaccaacgacgggttccttctgtcccggcccagtcacactgtgcagtgatttggaatctcattctacagaagctgttctgggggacgcactggtggatttctcccttaagctttaccacgccttctccgctatgaagaaggtagagaccaatatggcgtttagtccatttagtattgcttctctgctgactcaggtgctccttggcgcaggagagaacactaagacgaatctggagtcaatactgtcgtacccaaaagacttcacttgcgtgcaccaggccctgaaagggttcactaccaagggagtgacaagtgtttcacagattttccatagccccgacctagcaatacgcgatacattcgtgaatgctagcaggacgctatattcatcgtccccaagggttttgagtaacaattcagacgctaatctggaactgattaatacgtgggtcgcaaaaaatactaataacaaaatcagcagactgctcgattccttgccttctgacacccgcttggtcctcctgaatgctatatatctgtccgctaagtggaaaacaacattcgaccctaaaaagaccagaatggagccatttcactttaaaaactctgtgataaaggtaccgatgatgaactctaagaaataccctgtggcacacttcattgaccaaaccctgaaagcaaaggtgggacaactgcagctgagtcataaccttagtttggtgatcctggtgccccagaacctgaaacatagactggaggacatggaacaggccttgtcaccctcagtcttcaaagccattatggagaaactcgaaatgtctaaatttcaacccaccttgctcaccctgcctcggatcaaggtgaccactagccaggacatgctttctatcatggagaagctagaattcttcgacttcagctacgatcttaatttgtgtggtctaactgaggaccctgacctgcaggtctccgccatgcagcatcagaccgtacttgaattgaccgagaccggggtggaagcagcggcggctagtgctatctcggtagcccgtacgttgctcgtgttcgaggtgcagcaaccctttttgttcgttctctgggaccagcagcacaaattccccgtgtttatggggcgggtctatgatcccagagcc

SEQ ID NO: 908 - DNA, 1500 bp, Artificial Sequence
  derived and/or modified sequence
atggcctcccgactcacactcctcactctattgcttctgctgctggctggcgatagggcatcctccaatcctaatgcaacttcaagcagcagtcaggatcctgagagccttcaggacaggggggagggaaaggtggccactactgtgatttccaagatgttatttgtcgagccaatcctggaagtgtcctccctgcctaccactaactccaccactaacagtgccactaaaatcaccgcgaacacgactgatgaacctaccactcagccaacaacggaacccacgacgcagcctaccatccagccaacccaacccacaacacaactgccaacagattcacccacccagccaaccaccggcagtttctgccccggacccgttacactgtgttccgacttggaatctcattcgaccgaggcagtactcggcgacgcactggtggactttagtcttaaactgtaccatgccttctctgccatgaagaaggtggagactaacatggcttttagcccgttcagtatcgcatctttacttacccaggttctgttgggggcaggagaaaatacaaaaactaatcttgagtctatcctgtcatacccaaaagattttacctgcgtgcaccaggcccttaagggattcactaccaaaggcgtgacgtctgttagtcagatattccactcccctgatctcgctatacgagacacgttcgtgaacgcaagccggacactttattcctcaagtccacgagttctgagtaataattctgacgcaaacttagaactgattaacacctgggtggcgaagaacaccaacaacaaaatctcgcgcttgctcgattcactcccatctgacacaagactcgtcttgcttaatgcaatctacctgtcggccaagtggaaaaccacttttgatccaaagaaaaccaggatggagcccttccactttaaaaactcggtaattaaggtaccgatgatgaactccaaaaagtacccagtcgctcatttcattgaccagactttgaaggccaaagtggggcaattgcagctttcccataatctatcattggtcattcttgtgcctcagaacctaaagcacaggctggaagatatggaacaggcattgtcaccctctgtgttcaaggccattatggagaaactggaaatgagcaaatttcaaccaacactgctgacactgccaagaataaaggttacaacttcgcaggacatgttaagcatcatggagaaactggagtttttcgatttttcctacgacctcaatctatgcggcctgaccgaggacccagaccttcaggtatccgccatgcagcaccagactgtgctcgagctgaccgaaacaggggtggaggccgctgcagcatcagccatctccgtcgcacgcacactcctggtatttgaggtgcagcagcctttcctctttgttctttgggaccagcaacataaattcccagtgtttatgggtagggtgtatgatccacgggct

SEQ ID NO: 909 - DNA, 1500 bp, Artificial Sequence
  derived and/or modified sequence
atggcctcccggctgactctcctcacacttctgctgctgctcctggctggagacagagccagtagtaacccaaatgccacttcatctagcagccaggatcctgagagcctccaggatcggggagaagggaaggtggccacaaccgttatttccaagatgctctttgtagagccgatcctcgaagtgtcctcattgcccaccacaaattcaaccactaatagtgctactaaaattaccgcaaacacaaccgatgagcctacaacacagcccacgactgagcccactacccagcccaccatacagcctacccagccaacaactcagctgcccacagattctcctacacagccaaccacggggtccttttgtcctggaccagtaacactttgttccgatctggagtcccatagtacagaagcggttctgggtgatgctttggtcgacttcagccttaagctttaccatgctttttccgcgatgaaaaaagtagaaaccaatatggcgttctcccctttcagtatcgcctctctcctcacccaggtgctgctgggagccggtgagaacacgaaaacaaacctggagtcaatcctgtcataccctaaggatttcacttgtgtacaccaggcactcaagggttttaccacaaagggagtgacctccgttagtcagatcttccactctcctgatctcgcgatcagggacacttttgtcaatgcctctagaactttgtattcctcttccccccgagttctgtccaataactccgatgctaacttggagctgatcaatacatgggtagccaagaatactaacaacaagatcagcagattgcttgacagcctgccttctgacacccgattggtcttgcttaacgcaatttatctttctgccaagtggaagaccacttttgacccaaagaagactagaatggagccgttccattttaagaattccgtgattaaggtgcccatgatgaatagcaagaaatatccggttgctcactttatcgaccagaccttgaaggcaaaggtgggacagcttcagctctcccataacctgagcctggttatcttggtgccacaaaacctcaaacatagactcgaggacatggagcaagcactttccccatctgtctttaaagctattatggagaagctcgaaatgagtaagtttcagccaaccctgctgacacttccccggatcaaagttactactagccaggacatgctgagcataatggagaaattggagttctttgacttctcctatgacttgaatctgtgtgggctgacagaggaccctgacctgcaggtgagcgccatgcagcatcagaccgtgctggagctgacggagacgggcgtcgaagcggccgccgcgagtgccatctctgtggcaaggacccttctggtctttgaggtgcagcagccctttctttttgtgctctgggatcaacagcataagttccctgtattcatgggacgggtgtacgatccaagagcc

SEQ ID NO: 910 - DNA, 1500 bp, Artificial Sequence
  derived and/or modified sequence
atggcaagtcgtcttacgctgctgaccctgcttttattgcttctggcaggggatcgcgcatcgtcgaatcccaatgctaccagcagtagctcgcaagatcctgagtcactccaggaccggggcgagggcaaggttgcgaccaccgtgatcagtaagatgctgtttgtcgaaccgatcctggaggtgagttccctgcccacgactaatagtacgaccaacagcgcgactaagattaccgctaacacgacagacgagcccaccactcagccaaccaccgagccaacgacacagcccactatacagccaactcaaccgaccacacagctgccgacggattccccgacccagcccactacgggcagcttttgccctggacccgttactctctgcagcgatttggagtctcactctacagaggcagtgttgggtgatgccctggtggacttcagcctgaagctgtatcacgcattcagcgccatgaagaaggtggagacgaacatggccttcagcccgttcagcattgctagcttgctgacccaggtcctcctgggcgcgggagagaataccaagaccaaccttgagagtatattgtcgtacccgaaggattttacatgcgtgcaccaggctctgaagggcttcactacaaagggagtcaccagcgtttcacagatcttccactcgcccgacctggctatcagggatacctttgtcaatgccagtcggaccctatacagtagctctccaagggtactatcgaataacagtgacgccaacttggagttgatcaatacatgggtcgccaaaaacacaaataataaaatatcgcgacttctcgacagtttgcccagcgacaccagactagtccttctgaatgccatctacttgtccgccaagtggaagaccacattcgatcccaagaagacacgtatggaaccattccactttaagaactccgttattaaggtgccgatgatgaactccaagaagtaccctgtggcccacttcattgatcagactttgaaagccaaggtgggccaattgcaactgagccacaacctcagtctggttattctggtgccccaaaacctgaagcaccgcctggaggacatggagcaagccctgagtccctccgtgtttaaggctatcatggagaagctggagatgagcaaatttcagcccacccttctgacattgccgcggataaaggtgaccacaagccaagatatgctaagcattatggagaagctagaatttttcgatttcagttacgacctgaacctatgtggccttaccgaagatccggatctgcaggtctcggcaatgcagcaccagacagtgctcgagttgacggagaccggagttgaggctgctgccgcatcggctatctccgttgcccgtactctcctggtgttcgaggtgcagcagccgttcctgtttgtgctttgggaccagcagcataaatttccggtgttcatgggacgggtgtacgaccctagagca

SEQ ID NO: 911 - DNA, 1500 bp, Artificial Sequence
  derived and/or modified sequence
atggcttcgaggctcactttgctcacattacttctgctgctgcttgctggtgatagagcatcttccaaccctaatgcgacctcttcatccagtcaagatcctgagtctttacaagatagaggtgaaggaaaggttgcaactactgtaatcagcaaaatgttgtttgtggaacctatcttggaagtgtcatccttaccaaccactaactctaccacaaattctgctactaaaataactgctaacacaacagacgagccgacaacgcagcctactactgaaccaactactcaaccgaccatacagccaacccagccaactacacagctccccactgattctcctactcaacccactactggtagcttttgccctgggccagtgacattgtgtagcgacttggaatcccattccacagaggcggtgttgggagatgccttggtggatttttcattgaagctttatcatgcattcagtgccatgaaaaaagtcgagactaacatggcatttagcccattttccatcgcttcactgttgacacaagtgttgcttggcgctggagagaatacgaagaccaatcttgagtcaatcttgtcgtatcctaaagattttacttgcgttcatcaggcattgaagggattcactacaaaaggagtcacatctgttagtcagatatttcattcgccagatttagcgatcagagatactttcgtaaacgcgtcacgaaccttatactcatctagcccgagggtattatcaaataatagtgatgcgaatctcgaactcatcaacacctgggttgctaaaaacactaacaacaaaatctccagactcttagattccctaccatccgacactaggttggtgctccttaacgctatttacttgtcagctaaatggaagacaacttttgatccaaaaaagactagaatggaaccattccatttcaagaacagtgttatcaaggtgcccatgatgaactccaagaagtatccagttgcccatttcatcgatcaaactttgaaagcaaaggtcgggcagttacaactgtctcacaatttatcactcgtgatcctggtgccccaaaaccttaaacacagattggaggatatggaacaagccttaagtccttctgtgtttaaagctattatggaaaagcttgagatgtctaagtttcagccaacgcttcttacacttcctcggatcaaggtaacaactagccaagatatgttgtctattatggagaagcttgagttctttgattttagttacgatttgaatctttgcggattgactgaggaccctgatctccaagtttctgcaatgcaacatcagaccgtcctagaattaaccgagactggtgttgaggccgccgcagcttcagccattagtgttgcacgtactttgttggtcttcgaagtgcaacagccttttctgttcgttctttgggatcaacaacacaagtttcccgtttttatgggtagagtgtatgatcctagggct

SEQ ID NO: 912 - DNA, 1500 bp, Artificial Sequence
  derived and/or modified sequence
atggccagccgcttgaccctcctgacgctgcttctgctcctgctggccggagacagagcatcctcaaaccccaacgcgacttcatcctcctcccaagaccccgagtccctgcaggaccggggggaaggtaaagtggcaactactgttatctcaaagatgctcttcgtggaacctatcctcgaagtgtcatctctgccgactactaacagcaccacgaactccgcaactaaaatcaccgccaacaccaccgacgagcccaccacgcagcccaccaccgaaccaaccacgcaacctactatccaaccaactcagcccactacccagctgcctactgactcccccactcagccaactactggctccttctgccccggtcctgtgaccctgtgctcagacctggaatcccattccacggaggccgtgctgggcgatgccctggtcgactttagcctcaaactctaccacgccttctcagccatgaaaaaagttgaaaccaacatggcgttcagccctttctctatcgcctcgctcctgactcaggtgctgttgggagcaggagagaacaccaagacgaacctcgagtccatcttgtcgtacccgaaggacttcacctgcgtgcaccaagctctcaagggattcaccaccaagggagtgactagcgtgtcgcagattttccactccccggacctcgctattcgcgatactttcgtgaacgcctcgagaaccctgtactcaagctcgccgcgggtcctgtcgaacaactccgatgccaatctggagctgattaacacttgggtggccaagaatacgaacaataagatcagccgcctcctcgatagcctgccttcggacacgaggctcgtgcttctgaacgccatctacctgtccgcgaagtggaaaacgaccttcgacccgaaaaagaccaggatggagccgttccactttaagaactcggtgattaaggtgccgatgatgaatagcaagaaatatcctgtggcacacttcatcgatcagaccctcaaggctaaagtgggacagctccaactctctcacaacctgtcgctggtcatcctggtgccacaaaatctgaagcaccggctcgaggacatggagcaggcgctttcaccgtcagtgttcaaagcaatcatggagaaacttgaaatgtccaaatttcagccgacgctcctgaccctcccgcgcatcaaagtgactacttcgcaagacatgctgtccatcatggaaaagctggagttttttgacttctcgtacgatctgaacctttgcggactcactgaggacccagatctgcaggtgagcgcaatgcagcatcaaactgtcctggaactgactgagactggagtcgaagccgcggccgcctcggcaatcagcgtggccagaactctgctcgtgttcgaagttcaacagccgttcctgttcgtcctgtgggatcagcagcataagttccccgttttcatgggacgggtgtacgatccaagagcg

SEQ ID NO: 913 - DNA, 1500 bp, Artificial Sequence
  derived and/or modified sequence
atggcatcacgattgaccctgctcaccttgttgctgctgctcctcgcaggtgacagagcctccagcaacccgaatgctacttcctcgtcgtcccaagatccggagtcccttcaggatcggggcgaagggaaggtggctaccacggtcatctccaagatgctcttcgtggagccgatcctcgaggtgtccagccttcccactactaattcaactactaattcggcgaccaagatcaccgccaacactacggatgagcctactactcaaccaactaccgaaccgactactcagccaacgatccagccaacccagccgacgactcagctgccgaccgatagcccaacccaaccgactacgggatctttttgccccggaccagtgactctctgttcagacctcgagtcgcattcgactgaagccgtgctcggggatgctctggtggacttcagccttaagctctaccacgcattttctgcaatgaagaaggtcgaaaccaacatggcattctcgccgttctccatcgctagcttgctgactcaagtgctgctgggcgccggtgaaaacaccaagactaacctggagtcaatcctctcctatcccaaggacttcacctgcgtccaccaagctctgaagggattcactactaagggcgtgacttccgtgtcccagatcttccactcgccggaccttgctattcgcgacaccttcgtgaacgcctccagaacgctgtactcctcaagccctcgtgtgctcagcaataactccgacgccaacctcgagttgattaacacctgggtggccaagaacactaataacaagatcagccggctgctggattcgctgcctagcgacacccggctggtgctcctcaacgcgatctacctttcggccaagtggaaaaccaccttcgatcccaaaaagacgaggatggaaccttttcacttcaagaatagcgtgatcaaagtcccgatgatgaattccaagaaatatccagttgcccacttcatcgaccaaactctgaaagccaaggtgggccaactgcaactgagtcacaatctgtccctcgtgatcctggtgccacaaaacctcaaacatagactggaagatatggaacaagcgctttccccatccgtctttaaggccatcatggaaaagctggagatgagcaagttccagccgaccctgcttaccctgccgagaatcaaggtcactactagccaagacatgctgagcatcatggagaaactcgaattcttcgatttctcgtacgacttgaacctctgcgggctcacggaagatccggacctccaggtcagcgctatgcagcatcagactgtcctggagttgactgaaaccggagtcgaggcagcagccgcatccgcgatcagcgtcgctcggactctcttggttttcgaggtccagcaaccatttctcttcgttttgtgggaccagcaacacaagtttccggtgttcatgggacgggtctacgatccacgcgcc

SEQ ID NO: 914 - DNA, 1500 bp, Artificial Sequence
  derived and/or modified sequence
atggccagccgcctgaccctgttgaccctgctcctcctgcttctggcgggggatagagcgtcctccaacccgaacgcaacctcgtcgtcctcgcaggatccagaatccctgcaggaccggggagagggtaaagttgcgaccaccgtgatctcgaagatgctgttcgtggaaccgatcctcgaagtctcgtcactcccgactaccaacagcactaccaactcggcgactaagatcaccgctaacactactgacgagcccactacccagccgactactgaaccgaccacccagcccacgatccaaccaacccagccaactactcagctccctactgacagtccgactcagcctaccactgggtcgttctgcccaggacctgtgaccctgtgttcggaccttgaatcacattcaactgaagctgtgctgggagacgcactcgtggacttttccctcaaactgtaccatgccttttcagcaatgaaaaaagtggaaaccaacatggcgttctcacctttttcaattgcgtcgcttcttacccaggtgctcctgggcgccggcgaaaacaccaagactaacctcgaatccatcctctcctaccccaaggacttcacctgtgtgcatcaagctcttaagggatttactaccaagggagtgacctccgtgtcacagattttccacagcccagatctggcaatcagagatactttcgtgaatgcctcaagaactctctactcatcatcgcctcgcgtcttgtcgaacaattccgacgccaatctggaactcatcaacacctgggtggccaagaacaccaataacaagatatcacgcctgctggattccctgccaagcgatacgcggctcgtgctcctgaacgctatctacctgagcgccaagtggaaaacgactttcgaccctaagaaaactcggatggaaccgttccacttcaaaaactctgttatcaaagtcccaatgatgaattcgaaaaagtaccctgtggcccatttcattgaccagactcttaaggccaaagtgggacagctgcaactctcgcacaacctgtccctcgtcattctggtccctcaaaacctgaagcatcggttggaggatatggagcaagcgctgtcgccgtcggtgttcaaggccattatggaaaaactggagatgagcaagttccagcccactttgctgactctcccacgcatcaaggtgactacctcgcaagatatgctcagcattatggagaaattggaattcttcgacttttcatatgatctcaacctgtgcgggctgactgaagatccggacctgcaagtctccgctatgcaacatcagactgtgctggagctcacggaaaccggagtcgaagctgcagccgcatcggcgatctccgtggcgcggactctgcttgtgttcgaggtgcaacaaccgttcctgtttgtgctgtgggaccaacagcacaagttccctgtgttcatgggccgggtgtatgacccgagagca

SEQ ID NO: 915 - DNA, 1500 bp, Artificial Sequence
  derived and/or modified sequence
atggcttctcggctcaccctcctgacactgctgctgctactgctggcaggcgaccgggcatcctctaatccaaacgcaacaagctccagttcccaggatcctgaatccttgcaagatcgaggggaggggaaagtcgctacaacagttatatccaaaatgctgtttgttgaacccatcttagaagtgtcctctcttcccactaccaacagtaccacaaactccgccacaaaaataaccgcaaatactactgacgaaccaaccacacagcctacaacagaaccaaccacccagccaaccatacaacctactcaaccaaccacccagctgcctaccgactcacctacacagcccacaaccggatctttctgccctggccccgtgacactctgcagcgatctcgaatctcactccaccgaggccgtgctaggcgatgctctggtcgattttagcctgaaactgtaccacgccttttctgccatgaagaaggtggaaaccaatatggcttttagtcccttctccattgcctctctcctgacacaggtcttactcggggccggtgagaatacaaagaccaacctggaaagcatactctcttacccaaaggactttacctgtgtgcaccaggcactgaaaggctttactacaaagggcgttactagtgttagccaaatctttcattctcctgatcttgcaatccgcgataccttcgttaacgccagtaggaccctctatagctcatctccccgtgttttgagcaataatagcgacgctaacttagagctcattaacacttgggtcgccaagaataccaacaacaaaatcagtcgcctgctggacagtctcccttctgacaccaggctggtgctcctcaacgcaatttacctctctgccaagtggaagaccactttcgaccccaagaagactcggatggaacctttccacttcaagaactctgtgattaaagttccaatgatgaatagcaagaaataccctgttgcccacttcattgaccagactctgaaagccaaagtgggccaactccagttatcccataatctcagcctggttatcctggtgccgcagaatctgaaacatcgtttagaagatatggagcaggcccttagtccttctgtcttcaaggccatcatggagaaactggagatgtctaagttccagccgacattgctgaccctgcctcggattaaggtgaccactagccaggacatgttatccatcatggaaaaactcgagttcttcgatttcagctacgacctgaacttatgcgggctgactgaggacccagacctgcaggtctcagcaatgcagcatcagacagtcctggagctgaccgaaaccggcgttgaagccgctgctgcctccgccatctcagttgctagaacactattagtcttcgaggtgcagcagccattcttatttgttctgtgggaccagcaacacaagtttccagtattcatgggcagggtgtatgaccctcgagcc

SEQ ID NO: 916 - DNA, 1500 bp, Artificial Sequence
  derived and/or modified sequence
atggcatccagacttactctgcttactctccttcttcttctcctggcgggcgaccgggcatcatccaaccctaacgcgaccagctccagctcgcaggaccccgaatctctccaggaccgtggagagggaaaagtggccaccactgtaattagcaaaatgttgttcgtggaaccgatcctggaagtgtcctccctccccactactaattctaccactaatagcgcgaccaagattactgcaaacactaccgatgagcccaccactcaaccaaccaccgaacccactacccagcctaccatacagccaacccagcctactacccaactgcctacggattcaccaacccaacccaccactgggtcgttttgtcctggccctgtgactctgtgctccgatcttgaaagccatagcaccgaagcagtccttggagacgcacttgtggactttagccttaaactgtaccatgcattttcagcaatgaagaaggtcgaaaccaacatggcatttagcccatttagcatcgcaagcctgttgacgcaagtgctcctgggagcaggtgaaaacactaaaaccaacctggagtcaattttgtcctacccaaaagattttacctgcgtccatcaggcgcttaaaggctttactaccaaaggtgttacctcggtgtcccaaatctttcacagcccagacctggccattagggacactttcgtcaatgcatcgagaactctgtactcatcctcgcctagagtgctttcgaacaactcggatgcgaatctggagctcattaacacttgggtggccaagaatactaacaacaaaatctcacgcctgctcgattctctgccctcggacacgagactggtgcttctgaacgctatctacttgtcggctaagtggaaaactaccttcgatcctaaaaagacgcgcatggaaccttttcacttcaaaaactccgtgattaaggtccctatgatgaactccaaaaagtaccctgtggcgcatttcattgatcagacccttaaggcaaaggtgggacaactgcagctttcccataatctctctctggtcattctcgtgcctcaaaaccttaaacacagacttgaagatatggaacaggcgctctccccttcggttttcaaggccattatggaaaagctggagatgtcgaagtttcaacccactcttctgactctccctagaatcaaggtgactacctcccaagacatgctgagcatcatggagaagctggaattctttgatttcagctacgatctcaacctgtgtggacttaccgaggatccagatctgcaggtgtcagccatgcaacatcagaccgttctggaactgaccgaaactggcgtggaagctgctgcagcctccgctatctcagtggcccgtactcttctcgtgttcgaagtgcaacaaccatttcttttcgtcctgtgggaccaacaacataagtttcctgtgtttatgggaagagtctacgacccacgcgca

SEQ ID NO: 917 - DNA, 1500 bp, Artificial Sequence
  derived and/or modified sequence
atggcatcacgcctcactcttttgacactgctgctgctgcttctggctggcgatagggcctcttccaatccaaacgccaccagcagtagttcacaagatcctgagtcactgcaggacaggggcgagggaaaggtcgcaactacagtaatctccaaaatgctgttcgttgagccgatacttgaggtctcaagtctgccaaccactaattctacaacaaacagcgccactaagatcaccgcgaacacaaccgacgaacctacaacacagcctacaaccgagcctacaacccagccaaccattcaacccacccaacccacgacacagcttccgacggactctccaacccagcctactactggctccttctgcccaggaccagtcactctttgtagcgacctggaatcccacagcaccgaggctgtgttgggcgatgcactcgtggacttctcccttaagttgtatcatgcctttagcgcaatgaaaaaggtcgagactaacatggctttctctccctttagcatcgcatccctgttgacccaggtgctcttgggcgccggtgaaaataccaaaaccaacctggagagtattctcagctatccaaaggacttcacatgcgtgcatcaagccctcaagggtttcacaaccaaaggagtcaccagcgtttcacagatcttccattcccccgaccttgcgatccgcgatacattcgttaatgcttctcgcacactgtactcaagctcaccccgcgtgctttccaataattctgacgctaatctggagctcattaacacctgggtcgcaaagaacaccaataacaagattagcagactgctcgactctctgccttccgacactcgcttggtattgctgaacgctatctacctgagcgctaagtggaagactaccttcgacccaaagaagacccgcatggagccctttcattttaagaattctgtgatcaaggtccccatgatgaattctaagaagtacccagtggcccattttatcgatcagactttgaaagcaaaagtgggacagctccagctcagccacaatctctccctcgtcattttggtcccacaaaatctgaaacatcgcctcgaggatatggagcaggcactctctcctagtgtttttaaggcaattatggaaaaattggaaatgtccaagtttcagccaactctcctgactctgccaagaattaaagtcacaacgtcccaggatatgctgagcatcatggaaaaactggagttttttgatttctcatatgacctgaacctttgtggcctcacggaagacccggaccttcaagtgtccgcaatgcagcaccagacagtgctcgagttgacagaaacgggagtggaggccgctgctgcctcagctatctcagttgccaggactttgctcgtgtttgaggtccagcaacctttcctgttcgtcctgtgggaccaacagcataaattccctgtgttcatgggccgcgtttacgatccacgcgcc

SEQ ID NO: 918 - DNA, 1500 bp, Artificial Sequence
  derived and/or modified sequence
atggccagcaggcttactctgcttaccctgctgctgcttctgctggccggggaccgggccagctcaaatcccaacgctaccagttcatcaagccaggacccggaatcactgcaagatagaggagaagggaaagtcgccactacagtgatctcaaagatgttatttgttgagcccattctggaagtgagctcgctgcccactacaaactctacaaccaatagtgccactaaaattaccgccaatacgacagacgaaccaacgacccaacctaccacggagcccacgacacagcctacaattcagcccacccaacccaccactcaactgcctacggatagcccaacccaacccacaaccggttctttctgcccaggtcccgttacgctctgctccgacctggagtcacactcaaccgaggcagtgttaggtgatgccctcgttgatttttccctgaagctgtaccacgctttcagcgcgatgaagaaggtcgagactaacatggcgtttagccctttttctatcgccagtttattgactcaggtgcttctgggagcaggcgagaataccaagacaaacctggagagcatcctcagctaccctaaggacttcacttgcgtgcaccaggctctgaaaggcttcacaacaaagggagtgacttctgttagccagatcttccattccccggacttggcaatcagagacacatttgtcaatgcgagccggaccctgtactccagctctcccagagtcctctccaacaactctgatgctaatctggagctgatcaacacctgggtcgcgaagaatactaacaataaaatctcccgattgttggactcattaccatcggacacgcgcctggtcctgttgaatgccatttacctgagcgccaaatggaagacaacttttgatcccaagaaaacccggatggagccgtttcatttcaagaactccgtgataaaggtgcctatgatgaactctaaaaaataccctgtcgctcacttcatcgaccagacactgaaagccaaagtgggtcaattgcaactgagccataacctgtctctagtcatcctggtgcctcaaaacctcaagcacaggttagaagatatggaacaagctctgtcacctagcgttttcaaagctatcatggagaagcttgagatgagtaaattccagccaaccctcctgactttgcctaggatcaaggtaaccacaagtcaagacatgctgtctataatggagaagcttgagtttttcgacttctcttacgacctgaacctctgtgggcttacagaggatcctgacctgcaagttagcgcaatgcagcaccagaccgtgctcgagctgacagagactggcgtggaggcagccgccgcgtctgctatctcagtggccaggacactgctggttttcgaagttcagcagcctttcctgtttgttctgtgggaccagcaacacaagtttccagttttcatggggagagtgtatgatccccgtgcc

SEQ ID NO: 919 - DNA, 1500 bp, Artificial Sequence
  derived and/or modified sequence
atggccagcaggctgaccctgctgactctgctgctgctccttttggcaggagatagagccagcagcaaccctaacgctaccagctcttccagccaggatccagaatctctgcaagatcggggagagggcaaggtcgcgaccactgtgatatccaagatgctgtttgttgagcctattcttgaagtctcctccctgccaaccaccaacagcaccactaatagcgcaactaagataaccgcaaacactaccgatgaacctacgacccaacctactaccgaaccaaccactcagccaaccattcagccaacccagccgactactcaacttcctactgattcccccactcaacctactactgggtctttttgtccgggtcctgtcaccctgtgttcggacctggagtcgcatagcaccgaagcagtgcttggagacgcactcgtggatttcagccttaagctgtaccatgctttttcggctatgaagaaagtggaaaccaacatggcattctccccattctccatcgcctcgcttcttacgcaggtgctgcttggagccggcgaaaacactaaaaccaacctcgaatccattctgtcatatccgaaggactttacctgcgttcatcaagcactcaagggatttactacgaaaggagtgacctccgtgtcacagattttccattcaccggatttggctattcgtgatactttcgtgaatgcaagccggaccctttactccagctcacccagggtgctgagcaacaattcggatgcaaatctggaactgattaacacctgggtggcaaagaacaccaataacaagatctcgcgccttctggactcccttccttcagacacccggctggtccttcttaacgcaatctacttgtcagctaaatggaaaactacttttgatccaaagaaaactcggatggagccattccactttaagaatagcgtcattaaagtgcccatgatgaactcgaagaaataccctgtcgcacactttatagaccaaactctgaaggccaaggtgggtcagctgcaactcagccacaacctttcgctcgtcatcctggtgccccagaatctcaagcatagactggaggatatggaacaagcactttcgccttcagtgttcaaagcaattatggagaagctcgaaatgagcaagtttcaacctacgttgctgacccttccaaggatcaaggttactacctcgcaagacatgctttcgataatggaaaagctggaattctttgacttttcatatgacttgaatctctgtggcctgacggaagatcctgatctgcaagtctccgcaatgcagcatcagaccgtccttgaactgaccgaaactggagtggaagcggccgcggcgtccgccatttcggtggcccgaactctgcttgtgtttgaagtgcaacaaccgtttctctttgtcctctgggatcaacaacataagtttccggtgttcatgggcagagtctatgatcctagagca

SEQ ID NO: 920 - DNA, 1500 bp, Artificial Sequence
  derived and/or modified sequence
atggcctctagactaacgttattaacacttttgttgcttctgctggccggggatagggctagttctaaccctaacgccacgtcaagctcctcccaggacccagagagtcttcaggatcgtggtgagggcaaggttgcaactacagttatcagtaaaatgctctttgtagagcccatattagaagtgtcttctctgcctaccaccaactccaccacaaactccgccactaagatcaccgccaatactaccgacgagcctacaacacagccaactacagagccaaccacccagcctacaatccagccgacgcagcccacaactcagttgccaacagattcaccgacacagcctacaacgggtagcttttgcccaggacctgttactctgtgttcagacttggagtctcattctacggaggccgtacttggggatgcattggtggattttagcctcaaactgtaccacgcttttagtgccatgaagaaagtcgaaaccaacatggccttttctccattctctatcgcgtctctgctgacccaagtactgctgggcgcgggagagaataccaagacaaacctggaaagcattctttcctaccctaaagacttcacatgcgttcaccaggcactcaagggttttactacaaagggagtgaccagtgtaagccagatctttcattcgccagacctcgctatcagggataccttcgtgaatgcaagtcgcaccttgtactcatccagccccagagtcctgtctaacaattccgatgcaaatctagagctgatcaacacatgggtcgccaagaacaccaataacaagatcagtagacttttggattccctgccttctgacacccgacttgttctattaaatgcgatatacctgagcgccaagtggaaaacaacctttgaccccaagaagacgcgcatggagccttttcattttaagaattccgtaataaaagtgccaatgatgaactctaagaaatatccagtcgcacattttatcgatcagactctgaaggccaaggtcggccagctgcagctttcacacaatctctccttggttattctcgtaccgcagaatttgaagcatcgcctcgaagatatggaacaggccctgtcaccttccgtgtttaaggctatcatggagaaactggagatgagtaagttccagcctacattgctgacccttcccagaataaaagtgaccacctcccaggatatgctcagcattatggagaagctggagtttttcgacttctcatatgatctgaacttgtgcgggttaacagaggacccagacctccaagtgagcgctatgcaacaccagactgtcctcgagttgaccgagacgggcgtggaggctgccgctgcttcagctatctctgtggcgaggactctcctggtgtttgaagtacagcaaccgtttctcttcgtgctgtgggaccagcagcataaatttccggtatttatggggcgtgtctatgaccccagagca

SEQ ID NO: 921 - DNA, 1500 bp, Artificial Sequence
  derived and/or modified sequence
atggcaagtcgtttaacgctgctgacgttgttattattgctattagcaggagacagggcatctagcaatcctaacgccacttcgtcctcttcacaggatccggaatctctgcaggatcgcggtgagggaaaggtggcaacaacagttatctcaaagatgctctttgtggagccaatcttggaggtgagctctctgcccacaacaaattcaacaacaaatagcgctaccaagattacagcgaacactacagatgagccaacaacacaaccgacaactgaacctacgacgcagcctacgattcaacctacacagccaaccacacaattaccgaccgactcaccaacacagccgacaaccggaagcttttgtccgggacccgtcacactgtgcagcgatctggaatctcattcaacagaagcggttctgggagacgcactcgttgatttttccctgaaactctatcatgctttttcggctatgaaaaaggttgaaacaaatatggcattttccccattttctatcgcgagcttacttacacaagttcttttgggagctggcgaaaacacaaaaacgaatttagagtcaattcttagctatccgaaggactttacatgcgtacatcaagctttaaaggggttcacaacaaagggggttacatctgttagccaaatttttcatagcccggacttagctataagagataccttcgttaacgcaagccgcacattgtattcttcaagtccgcgtgttctgtctaataacagcgatgcaaatttagagttgataaatacctgggtcgcgaaaaacaccaacaataaaatcagcaggttactggactcgctcccgagcgacacacgactagtattgttgaatgctatttatctgtcggcgaagtggaagaccacgttcgacccgaaaaaaacccgcatggagccttttcattttaaaaactctgtcatcaaagttccgatgatgaacagcaaaaaatatcctgtggctcatttcatcgatcagacgctgaaagctaaagtggggcaactgcagttgagccataatctttctttggtgattctggtgcctcaaaatttaaaacacaggttagaggatatggaacaggctttatcgccatcagttttcaaagcaattatggagaaactggaaatgtccaaattccaacctacattgcttacactgccaaggatcaaggtaacaacaagtcaagatatgttatcaattatggaaaagctagagttttttgatttctcatacgatcttaatctgtgtggattgactgaagatccggatctgcaggttagcgcaatgcagcatcaaaccgtattggaattaacagagacaggagttgaagcagccgctgcctcagctatttctgttgcgcggactcttttggtgtttgaggttcaacagccatttctttttgtgctgtgggaccaacaacataaattcccggtctttatgggtcgggtttacgatcctcgcgcg

SEQ ID NO: 922 - DNA, 1500 bp, Artificial Sequence
  derived and/or modified sequence
atggcttcccggctcaccctgttgaccctcttgctgctgctgctggccggggacagggcatcgtccaacccaaatgccacctcgagttcgagccaggacccggaatcattgcaggatcggggcgagggcaaggtggcaaccaccgtcatctctaaaatgctgtttgtggagccgattttggaagtctcatcgctcccgactaccaattccactactaactcagcgacgaagattaccgctaataccactgacgagccaaccactcagccgacgactgaacccacgacccaaccgaccatccagccgactcaaccgaccactcaactgccgactgactcaccgacgcaaccaactacggggtcattttgcccaggaccggtcaccctgtgctcggacctcgaatcgcattccaccgaggccgtgctcggagatgcgctggtcgattttagccttaagctgtaccacgccttctcggccatgaaaaaggtcgagactaacatggccttctcacccttctccatcgcttccctgctgacccaggtgctgctcggagcaggcgagaacaccaaaactaacctggagtccatcctgtcatacccgaaggatttcacttgcgtgcaccaggcgctgaagggcttcactaccaagggagtgacctccgtgtctcagatcttccacagcccagatctggcaatccgtgacacttttgttaacgccagcagaacgctgtattccagcagcccacgcgtgttgtccaacaattccgatgccaatctggagctgataaacacctgggtggccaagaacaccaataacaaaatctcaaggctgctcgactccttgccatcagacactagactggtgttgctcaatgccatctacctcagcgcaaagtggaaaaccactttcgacccgaagaaaacgcgcatggaacctttccacttcaaaaacagcgtgatcaaggtgccgatgatgaattcgaagaagtaccctgtcgcccacttcattgaccagaccctgaaagctaaggtcggacaactgcaactgtcccacaatctgtcactcgtgattttggtcccacaaaatctgaagcaccgcctggaggacatggaacaggccctctccccgtcagtgttcaaggctatcatggagaagctggaaatgagcaagttccagcctacgctgctcactctcccgcgcatcaaagtgactacctcacaagacatgctcagcattatggaaaagctggagttctttgacttctcgtatgatttgaacctgtgcgggctgacggaagatcctgatctgcaggtgagcgccatgcagcatcagaccgtgcttgagctgactgaaactggggtggaggctgcagcggcctcggctatctctgtggccaggacgctgctggtgttcgaagtgcagcagccgttcctgttcgtgctctgggatcagcagcacaaatttccggtattcatgggtcgggtctacgatcccagggcc

SEQ ID NO: 923 - DNA, 1500 bp, Artificial Sequence
  derived and/or modified sequence
atggcatcgcgccttaccctccttacccttcttctgctccttctggcgggtgatagagcatcctcgaacccgaatgcaacctcgtcatcgtcgcaggatccagaatcactgcaggaccgcggagagggaaaggttgccaccactgtcatttccaagatgctctttgtggaaccaatcctggaagtgtcctctctgcctactaccaactcaacgaccaactcagccaccaaaatcactgcgaatactactgatgaaccaaccactcaaccaaccaccgaacctactactcagcccactatacaacccacccagcctacgactcaactcccaaccgactctcctacccagccaaccaccggcagcttttgtcccgggccagtcacgctttgttcggacttggaatcgcattccactgaagcagtgctgggcgatgcactggtcgacttttcgctgaaactttaccatgctttctcggcaatgaaaaaggttgaaaccaacatggcattttctccattttccattgcaagtttgctcacccaagtgctgttgggcgccggtgaaaatacgaaaactaacctggagagcatcctttcgtatcctaaggatttcacctgtgtgcaccaagcgctcaaaggttttaccactaagggtgtaaccagcgtgtcccaaatctttcatagcccagatttggccatacgggatacttttgtgaatgcgagcaggactctttacagctcctccccaagggtgctgagtaataactccgacgccaatctggagttgattaacacttgggtggcgaagaatactaacaataagatctcgaggcttctcgattctctgccctcggacactcgcctggtccttctgaacgcaatttaccttagcgcaaaatggaaaactacctttgatcctaagaaaacccgcatggagccttttcacttcaagaactcggtgatcaaggtgcccatgatgaacagcaagaagtaccctgtggcgcactttattgatcagacccttaaagccaaagtgggacagctgcagttgtcacacaatcttagccttgtgatccttgtgccacagaatctgaaacatcgtctggaggatatggagcaggcgcttagcccttcggtgttcaaggcaattatggaaaaactcgaaatgtccaagttccagccgaccctcctgactctccctcgaattaaggtcaccaccagccaagatatgctgtcaataatggaaaagctggaattctttgatttttcatacgatctgaacctttgtggactcactgaagatccagaccttcaggtgtcagcgatgcaacatcaaacggtgcttgaacttaccgagactggagtggaggcagccgcagcttctgccatctctgtggcacgtacgctgctggtctttgaggtgcagcaaccctttctttttgttctctgggatcaacaacataagttccccgtctttatgggacgtgtctacgaccctagggcg

SEQ ID NO: 924 - DNA, 1500 bp, Artificial Sequence
  derived and/or modified sequence
atggcctctaggctgacgttgctgaccctgctgcttttactgttagctggcgatcgcgcctccagcaaccctaacgcaacctcaagttctagccaggatcccgagagtctacaggaccgcggtgaaggaaaggtcgcaacaacagttatatctaagatgctgtttgtggagcccatccttgaggtctcaagcctgcctactactaacagcactactaactccgccaccaaaattaccgctaacaccactgacgaaccaacaacgcagcctaccaccgaaccaaccacccagcccacaatacaaccaacgcagcctacaacccagctgcccactgactcacctacacagcccactactggctcattctgcccggggccggttacattgtgctccgacctggagtcacactctaccgaagccgtactaggggatgccttggtcgatttctccctcaagctataccatgcctttagtgctatgaagaaggtggaaaccaacatggcttttagtccgttttcaatcgctagcctactgacccaggtcctcctcggtgcaggcgaaaataccaagactaatctagagtcaattttgtcatacccaaaggattttacttgcgtacaccaggctttgaaaggtttcactactaaaggagtcacttccgttagtcagatcttccattccccagatctagctattcgcgatacctttgtcaatgcctcccggacactctattcatctagcccccgggtgctttcgaataactctgatgcaaatctggagcttattaatacttgggtggctaagaacaccaacaacaaaatcagtaggctgttagattccctccctagcgacacgagactggttcttctcaacgctatctatctgtccgctaagtggaaaaccacctttgatcccaagaagacaaggatggaaccttttcacttcaagaattccgtgataaaggtgcctatgatgaatagtaaaaagtatcccgtcgctcacttcatcgaccaaactcttaaggcgaaagtgggtcagctgcagctgtcccacaatctgtccctggtgatcttagtgccacagaacctgaagcatagattggaggacatggagcaggccctgtccccttctgtgttcaaggctatcatggagaagcttgaaatgtcgaaattccagccgacgctgctgactctgccacgtattaaagtcactacctctcaggatatgctctccatcatggaaaagcttgaattctttgactttagttatgaccttaacctctgtggtctcaccgaggacccagacctgcaggtgtccgcgatgcagcaccagacagtgcttgaactgacagaaacaggggtggaggcagcggcggcctccgccatctccgtggctagaacactgcttgttttcgaggtgcaacagccatttctgtttgtcctgtgggaccagcaacacaagtttccagtctttatgggccgggtgtatgacccacgggct

SEQ ID NO: 925 - DNA, 1500 bp, Artificial Sequence
  derived and/or modified sequence
atggcttcacgactaacacttttgacattactattacttcttttggcaggagacagagcatcatcaaatccaaatgctacatcttcttcatcacaagatcctgaaagtcttcaagatagaggagaaggtaaggtagcaactactgttatttcaaagatgttatttgttgaaccaattttagaagtttcctctttaccaacaactaatagtactactaattcagctactaagattacggcaaatacaacagatgaaccaacaactcaaccaacaacagaaccaacaacacaaccaactattcaacctactcagccaactacacaattaccaactgatagtccaacacaaccaacaactggttcattctgtcctggaccagtcactttatgttcagatttagaatctcattcaactgaagcagttttaggagacgcacttgttgatttttcacttaaattataccatgcctttagtgcaatgaagaaagttgagacaaatatggctttttcacctttttctattgcatctttgcttactcaagttttattgggtgcaggagaaaatacgaaaactaatcttgaatcaattttatcttacccaaaagattttacttgcgtacatcaagcattaaagggttttactacaaagggagttacatcagtttctcaaatttttcatagtccagatttagctattagagacacatttgttaatgcatctagaactttatattcttcatctccaagagttttatcaaataattcagatgctaatttggaattaattaatacatgggtagctaaaaatacaaataataaaatttcaagacttttagattctttaccaagtgatacccgtttagtcttattaaatgcaatttatttatctgctaaatggaaaactacttttgacccaaaaaaaactcgtatggaaccatttcattttaaaaattcagtaataaaagtcccaatgatgaatagtaaaaaatatccagtagcacattttattgatcaaactttaaaagctaaagtgggtcaacttcaattatctcataatttatcactagttattttagttccacaaaacttaaaacatcgacttgaagatatggaacaagcactttcaccatcagtttttaaagctattatggaaaaacttgagatgagtaaatttcaaccaacacttttaacacttccaagaattaaggttacaacatcacaagatatgttatcaataatggaaaaattagaattttttgatttttcatatgacttaaatctttgtggacttacagaagatccagacttacaagtatccgctatgcaacatcaaaccgttttagaattaactgaaacaggagttgaagctgcagcagcaagtgcaattagtgtagctagaacacttttggtttttgaagtgcaacaaccttttcttttcgttctttgggatcaacaacataaattccctgtctttatgggtagagtttatgatccaagagct

SEQ ID NO: 926 - DNA, 1500 bp, Artificial Sequence
  derived and/or modified sequence
atggcctccagacttaccctgctcactcttcttctgctgcttctcgccggtgatagagcatcgagcaaccctaatgcgacctccagctcatcacaggacccggaatcgcttcaagacaggggagaaggcaaagtcgcgaccactgtgatttcaaaaatgctttttgtggagccaattctggaggtttcatcgctgccaaccactaacagcactactaatagcgcaactaagattaccgccaataccaccgatgaacctaccactcaacccaccaccgagccaactactcagccgacgatccagcctactcagcctaccacccagctgcctaccgacagcccaacccaaccgaccaccggttcattttgtccaggcccagtgaccctgtgttccgatctggagagccattccaccgaagcagtgctgggggacgcactcgtcgacttcagcctgaagctgtatcatgcattctccgcgatgaagaaggtggagactaacatggcattttcgcccttttccattgcatcactccttacccaagtcctcttgggagccggagagaataccaagactaacttggaatctattctctcgtacccgaaggactttacttgtgtgcaccaagcactgaagggatttaccaccaaaggtgtcacctcggtcagccagatatttcattcgcccgaccttgcaatccgcgatacctttgtgaatgcgtccaggaccctgtactcctcctcgcctagggtgctctcgaataacagcgacgcaaatcttgagcttatcaatacttgggtcgcaaagaacaccaacaacaagataagtagacttcttgattcgctgccctccgacactcgtctggtgctcctgaatgcaatttacctgtcggcaaaatggaaaacgacctttgatccaaagaaaaccaggatggagccatttcacttcaaaaactcggtgataaaggtgcccatgatgaattccaaaaagtacccagtggcgcatttcatcgaccaaactttgaaggcaaaggtcggtcaactccagctgtcccacaatttgtctcttgtgatcctggtgcctcaaaacctgaaacatcggcttgaagatatggaacaagccctctcgccatcggtgtttaaagctattatggagaagctggaaatgtccaagttccaaccgacgcttttgactctgccgagaataaaggtgacgacctcccaagacatgctgtccattatggagaaattggagttcttcgatttcagctacgatctgaatctgtgtggactgactgaggaccctgatctgcaagtatccgccatgcaacaccaaactgtccttgaacttaccgaaaccggagtcgaagctgcagccgcaagcgctatttccgtcgcccgtaccttgcttgtctttgaagtgcagcaaccttttctttttgtgctttgggatcaacaacacaagtttcctgtgtttatgggtagggtgtacgatcctagagca

SEQ ID NO: 927 - DNA, 1500 bp, Artificial Sequence
  derived and/or modified sequence
atggccagccgcctgactctgctcactctgcttctcctgttgctcgcaggcgaccgcgcctcgtccaatcctaatgccacgtcgtcgtcgagccaagatccggagtccctgcaagatagaggagaggggaaagtggccactaccgtcatttcaaaaatgctgttcgtggagcccatcctggaagtgagctcgctcccaacgaccaactccactactaactcggccaccaagattaccgccaacacgactgacgagcctaccactcagccaaccaccgagccgactacccaaccgaccatccagccaacccaacccactacccagctgccgaccgattccccgacccaaccgactactggctcgttttgccccggccccgtgaccctgtgctccgacctggaatcccattccaccgaagccgtgctcggggatgcacttgtggacttcagcctcaagctgtaccacgcattcagcgccatgaagaaggtggaaactaacatggcattctcaccgttttccatcgcatccttgctgacccaggttctgctgggagccggtgagaataccaaaaccaatttggagtcgatccttagctacccgaaggacttcacttgtgtccaccaggccctcaagggctttactaccaagggcgtcacctcggtgtcacaaatctttcattcaccagacttggccatccgggacaccttcgtgaacgcatctcggaccctgtactcctcatcgccgagagtcctttcaaataactcggacgccaacctggaactgatcaacacttgggtggcaaagaataccaacaacaagatctcacggctgcttgatagcctcccctcagatacgagactggtgctgctcaatgccatctaccttagcgcgaaatggaaaactaccttcgacccaaagaaaacccgcatggaacccttccacttcaagaactccgtgataaaggtgccgatgatgaattcgaagaaataccccgtggctcatttcatcgaccagacccttaaagccaaggtgggacagttgcaactttcccataacctgtcgctggtgatcctggtcccgcagaatctgaagcaccgcctggaggacatggaacaagccctgagccctagcgtgttcaaggcaataatggagaagctcgaaatgtctaagttccagccgacgctgttgactttgccgagaatcaaggtgaccacctcgcaagatatgctgtccatcatggaaaagctcgagttctttgacttctcatacgacctcaatctgtgcggactgaccgaggacccggaccttcaagtctccgcaatgcaacaccaaaccgtgctggaactgactgaaaccggagtcgaagcggcggctgcgtcggcgatctccgtggctagaactctgcttgtgtttgaagtccagcaaccatttctgttcgtgctgtgggaccagcaacacaagttcccggtgttcatgggccgggtctatgacccgagggcc

SEQ ID NO: 928 - DNA, 1500 bp, Artificial Sequence
  derived and/or modified sequence
atggcatcacgcctaacgcttttgactttgctgctgctgctgctggccggtgatagagccagctctaacccaaacgctaccagttcaagctctcaggaccctgaaagcctccaagacaggggagagggcaaggtagccacgaccgttatcagtaagatgcttttcgtcgagcctattctggaagtgagctccttgccgacgacgaattctactaccaattcggctacaaaaattacagcaaatactaccgacgagcccaccacacagcctactactgagcctaccactcagccaacaatccagcctactcaacctaccactcagctccctactgacagtccgacccagcccacaactggctccttctgtcccggccctgtcacactctgctctgaccttgaatctcactcgaccgaggccgtgttgggtgatgcgctagtggatttttctctgaagctctatcacgcgttttcagccatgaagaaagtggaaaccaacatggctttcagtccattcagtatagcctcgctgctgacccaagtcctgctgggtgctggagaaaataccaaaaccaatttggaatcgattttgagctatcccaaggactttacatgtgttcaccaggcattaaagggatttacaaccaagggtgttacttctgtgtctcagatctttcactctccagatttagcgataagggatacatttgtcaacgctagccgaaccctgtattctagctcgcctagagtgctgtcaaacaattcagacgcaaatctggagctgataaatacctgggtcgccaaaaatactaataataagatctcccgactactggactcgctgcctagtgacacccgcctggtgctgttgaacgctatttacttgagcgcgaagtggaagacgacgttcgacccaaagaagactagaatggagcctttccacttcaaaaattctgtgatcaaagtgccaatgatgaacagtaagaagtatcctgtggcccactttattgatcagacattgaaagccaaagtggggcagctacagctgtcgcataatctctccctggttattctggttcctcagaatttgaagcatagactcgaggacatggagcaggctctaagtcctagcgtgtttaaggcaataatggagaaacttgaaatgtcaaaattccaaccaacgctcctcacactacctcgaatcaaagtgactacctcacaggacatgctgtctatcatggaaaagctcgagtttttcgatttctcatacgatctaaacctgtgcggactgaccgaggacccagatctgcaggtaagtgccatgcagcatcagactgtgctggagctcaccgagactggcgtcgaagcagccgcagcatcagctatctcggtggccagaactcttcttgtgttcgaggtgcagcaacccttcttgtttgtgctgtgggatcagcagcataagtttccggtcttcatggggcgagtatacgacccccgggca

SEQ ID NO: 929 - DNA, 1500 bp, Artificial Sequence
  derived and/or modified sequence
atggcatcacggctgacgcttttgactcttcttcttctgctgctcgccggcgatagggcaagcagcaacccaaatgcaacctcaagctccagccaggatcccgaatcgcttcaggacagaggagagggtaaagtggcgaccacggtgatatcaaagatgttgtttgtggagccgatcctggaagtgtcgtcgctgcctactaccaattcaaccaccaattccgctactaagatcaccgctaacacgaccgacgaacctaccacccaacccaccaccgaaccaaccactcaacctaccattcagcctacccagccaactacccaacttcctacggatagccctacccaaccaacgacgggatcgttctgtccgggacctgtgacgctttgctccgatctcgaatcccattcaactgaggcagtgttgggcgatgcccttgtggatttctcacttaagctctaccatgcattctccgccatgaagaaggtggaaactaatatggcctttagccccttctcaattgctagcctcctcactcaggtccttctgggggcgggtgagaacactaagaccaatcttgaatcgattctctcatatcctaaggactttacgtgtgtgcatcaggcacttaagggatttacgaccaagggtgtgacgagcgtgtcgcagatttttcactcccccgatctggccattcgcgacacctttgtcaacgcctcgcgtactttgtacagctcaagccctcgcgtgctttcgaacaactcagatgccaacctggaattgatcaatacttgggtcgctaagaacactaacaacaagatctcgcgcctgcttgattcgctgccatccgatacccgtttggtcctgctgaacgcgatttaccttagcgcgaagtggaaaacgactttcgatccaaaaaagaccagaatggaaccgttccatttcaagaactcggtgataaaagtgccaatgatgaactcaaagaaatacccggtggcacactttattgaccaaaccctcaaagccaaggtcgggcagttgcagctctcgcataacctgtcccttgtgatcctggtccctcagaacctgaaacaccgactcgaagatatggagcaagcacttagtccatctgtattcaaggccatcatggaaaaacttgagatgtccaaattccaacccacgttgctgactcttccacgaattaaggtcaccacttcgcaagacatgctttcaataatggagaagctggagttttttgatttttcatacgatctgaatctctgtggactcaccgaagatcccgaccttcaagtgtctgcaatgcagcaccaaactgtcctggaactgaccgagactggtgtggaagcagccgcagcatcagccatttccgttgcacggactctgttggtatttgaagtgcaacaaccgtttctgttcgtcctgtgggaccaacaacataagtttccggtctttatgggaagggtgtacgaccctcgggca

SEQ ID NO: 930 - DNA, 1500 bp, Artificial Sequence
  derived and/or modified sequence
atggcaagccgcctaactcttctgacactcttgcttctgctgctcgcgggggaccgagctagctctaaccctaacgctactagttcttcatcccaggaccccgaatctctacaagacaggggcgaagggaaagtagccacgaccgtgatttccaaaatgctttttgtggaacccattctagaagtctcttccctgcccacgactaattcaaccaccaacagcgcaactaagatcacagcaaacacgaccgatgaacccacaactcaacccactacagaaccaacaacacagcctactatccagcccacacagcccactacccagctgcccaccgatagtccgacacaaccaacaacagggtcattttgtcccggccccgtgaccctgtgttcagaccttgaatcacacagcaccgaagcagttctcggtgacgccctggtggatttctcactgaagctctaccatgcttttagtgcaatgaaaaaagtcgagacaaatatggcttttagcccattcagtattgcatcattgctcactcaggtcctcctgggggccggagagaacacaaagactaacttagaatccatcctctcctatcctaaagactttacctgcgtgcaccaggctctgaaggggtttaccacaaagggagtcacatctgtgtcccaaatcttccactccccggatctagctatcagggatacatttgtgaacgcgtctcggacactctacagctcttctcctagggtgctgtcgaataacagcgatgccaatctggagctcataaacacatgggtggccaaaaacacaaacaacaaaatctctaggctgctggactcactcccaagcgacacaaggctggtgctcttgaatgcaatatatctcagtgccaagtggaaaaccacttttgaccctaaaaagaccagaatggaaccatttcattttaagaactccgtgatcaaggtgcctatgatgaattcaaaaaagtaccctgtggctcactttatagatcagacactgaaggcaaaggttggtcagctccagctctcccataatttgtctttagtgattttagttccacagaatcttaagcaccgtttggaagatatggagcaggccctctcaccatcggtgtttaaagcgatcatggaaaaattggagatgtctaagttccaacctacactgttgacgcttccccgtattaaggtcacgactagtcaggacatgttatccattatggaaaagctggaatttttcgacttttcatacgatctaaatctgtgtggacttacagaggacccagacctccaagttagtgcaatgcaacaccagaccgtcctggagctgacagaaacaggcgtagaggctgctgctgccagcgctatctctgtcgcccggacactactagtcttcgaggttcagcagcctttcctattcgtcctttgggaccagcagcataagttccctgtgttcatggggcgagtttatgacccccgggca

SEQ ID NO: 931 - DNA, 1500 bp, Artificial Sequence
  derived and/or modified sequence
atggcctcgaggttgacactcttgactcttctgttgctgttgctcgccggagatcgtgcttcgagtaatccaaatgccacaagttctagctcccaggaccccgagagcttacaggatcgcggtgagggaaaggtggccacaactgtaatctccaaaatgttgtttgttgaacccatcctggaggtgtcaagtttacctacgaccaattccaccactaattccgccaccaagattactgctaacactactgatgagccaacaacccaacccactacagaacctacaacccagccaacaatccaacccacccagcccacgacacagctcccaaccgattcgccgacccagccaacaacaggctcattctgccccggccctgttactctgtgctcagacctagagtcccattctaccgaggccgttctgggtgatgcgttagtggatttttccctgaaactctatcatgccttttccgccatgaaaaaagtggaaacaaacatggcatttagccccttcagcattgcttccctgctcacacaggtgctgttgggagccggtgagaacacaaaaacaaacctggagtccattcttagctatcctaaggacttcacctgcgtgcatcaagccctgaaggggtttacaaccaagggcgtgacatcagtaagccagatcttccacagccctgacctcgccataagagatactttcgtaaatgcctctcgcacgctgtactcttcctcccctcgcgtgctttctaacaactccgatgcaaatttggagctcatcaacacctgggtagctaagaataccaacaacaagatttctaggctgctggattccctgcctagcgacaccagactggtgctgctgaacgcgatctaccttagtgcaaagtggaaaactaccttcgatcctaaaaagacgagaatggagccctttcactttaagaattccgttatcaaggttccaatgatgaacagcaagaaatacccggtggcacacttcatcgaccagacactgaaagccaaggtgggccagctgcagctgagtcataacctgtctctggtgatcctcgtgcctcagaatctcaagcaccggttagaagatatggagcaggcgctgtcaccttccgttttcaaggccattatggaaaaactggagatgagtaaattccaacccactctgctcacactgccccgcatcaaggttaccacaagtcaggacatgttatccatcatggagaaactcgagttctttgacttcagttacgacctgaacctgtgcggcctgacagaagatccagatctgcaagtgtcagccatgcagcatcagaccgtgcttgagctcacagaaactggagtagaagcagccgccgcctctgctatttccgtggcacgtactctcttggtttttgaagtgcagcagccttttctgttcgtgctgtgggatcagcagcacaagtttccagtgttcatgggccgtgtgtatgacccccgcgcc

SEQ ID NO: 932 - DNA, 1500 bp, Artificial Sequence
  derived and/or modified sequence
atggcttccaggctcactctgctgaccctcttgttgctgctgttagctggtgaccgggcctctagcaatcccaacgctacaagctcgtcgtctcaggatcccgagagtctgcaagataggggagagggaaaggtcgccacgactgttatatctaagatgctgttcgtggagccgatactggaagtctctagcctgccaaccacgaatagcactactaatagcgccactaagattaccgccaatacaaccgatgaacccacaacacagccaaccacagagcctacaacccaaccaactattcagccaacacagcccactacccagctgccgacagattcaccgacgcagcctacgactggatcattctgtccagggcctgtaactttgtgctcagatctggagtcccatagtactgaggccgtactgggagatgcactagtggatttcagcctgaagctctatcacgcttttagcgcgatgaaaaaagtagagaccaacatggcattctctcccttttctattgcaagtctcctgactcaggttctgctcggcgcgggggagaacactaagactaatctagagtctatcctctcttaccccaaggactttacttgtgtacaccaggctttaaaaggcttcacgactaagggggtcacctccgtgtcccagatctttcacagccccgacctggccattagagacacgtttgtaaacgcgtccagaactttgtactccagtagcccccgggtccttagcaacaactccgacgctaatctcgagctcattaatacctgggtcgccaagaataccaataacaagatttctaggcttctcgacagcctccccagcgatacaaggctggtgttactcaatgccatctatctgagcgctaagtggaaaacgaccttcgaccccaaaaaaacacgaatggaaccgttccattttaagaactccgtaataaaggtcccaatgatgaacagcaaaaagtatccagtggcccactttattgaccagacactcaaggcaaaagttggacagctgcagctttcacataatctgagcctggtgatcctcgtcccccagaacctcaagcaccggcttgaggacatggaacaggcgctgagtccaagtgtgtttaaggccattatggaaaaactggaaatgagtaaatttcagccgaccctgctgacactgcctaggataaaagttaccacctcacaagacatgctttctataatggaaaagctggagtttttcgactttagttacgacctgaacctttgtggcctgaccgaagatcccgacctgcaggtgtctgccatgcagcatcaaaccgtactggagctgaccgagacaggggtcgaagccgccgcagcaagcgccatcagcgtcgcacgaactctgctcgtgttcgaggtgcagcagcctttcctgttcgtgctatgggaccaacaacataagttccccgtgtttatgggacgggtctacgatcctagggcc

SEQ ID NO: 933 - DNA, 1500 bp, Artificial Sequence
  derived and/or modified sequence
atggctagtagattgacactgctgacacttctcctgttgctgctagccggtgaccgagcgtctagtaaccctaacgccacgagtagttccagccaggacccagaaagtcttcaagataggggcgaaggaaaagttgcgactacagtgatctcaaagatgctgttcgtggagccaatactggaagttagttctcttcccactaccaactctacaaccaacagcgctaccaagatcacagccaacactacagacgagccaaccacacagcccactacagagccaaccacccagcctacgatccagcctacacagcctacaacacagttgcccactgattccccaactcaacccaccacgggttcgttctgtccgggccccgtcaccttgtgctctgacctggagtctcatagcacagaggccgtgctaggcgatgccttagtagatttctcccttaaactataccatgccttctcagctatgaaaaaggtagaaacaaacatggcctttagtccgtttagtattgccagcctcctgacacaagtgctccttggagccggcgaaaacacaaagactaatctcgaatccattctgtcctacccgaaggatttcacttgcgtacaccaggccctgaagggtttcaccactaagggggtgacgtcggtctctcagatcttccacagccccgatctggcaatccgcgatacatttgtgaatgcctctcgcacactttattcttcctctccccgcgttctgtcaaacaacagcgacgctaatcttgaactgatcaatacttgggtcgctaaaaatactaataataagatctctaggctgttagattccttgccctccgatacacgcctggtgctactgaacgcaatttatctgtccgccaagtggaagactacctttgaccccaaaaaaacgcggatggagccattccattttaagaactccgtgataaaagtgcctatgatgaactcaaagaaataccctgtggcacacttcatcgaccagacactcaaggccaaggtggggcaactgcagctgtcccataacctgtccctggtaatactagttcctcagaatctgaagcaccggttagaggacatggagcaagccctgtcaccttccgtctttaaggctattatggaaaagctcgagatgagtaagtttcagcccacccttctgactctgccacgaattaaggttactacgtctcaagatatgctgtctatcatggaaaagcttgagtttttcgacttcagctatgatttgaatctgtgtgggctcaccgaggaccccgatttgcaggttagcgcaatgcaacaccaaaccgtgctggagctgaccgaaacaggagtggaggccgcggcagctagtgccatctctgtcgctcgcacactgctggtattcgaggtccagcaaccatttctattcgttctgtgggatcagcagcataaattcccggtctttatgggcagagtttatgaccctcgggcc

SEQ ID NO: 934 - DNA, 1500 bp, Artificial Sequence
  derived and/or modified sequence
atggcctccagacttactttactcactcttctcttgttgctgctggctggggatagggcttcttcgaatccaaacgcgaccagttcttcatcacaggacccggagtccctgcaggaccgaggtgaaggaaaggtggctaccactgtcatctccaaaatgctatttgttgaaccaatcttagaggtctcctccttgccaacgacaaacagcaccaccaatagtgctaccaagattaccgccaatacaacggacgagccgaccacacagcctaccactgaacctactactcagcctaccatccaaccaacacaacccaccacccagctgcccaccgattctcccacacagcctactactggaagcttctgtcctggccccgtgaccctctgtagtgacctcgaatcgcattcaactgaggccgtactgggcgacgcactggtggattttagcctgaaattgtatcacgcttttagcgccatgaagaaggtcgagaccaacatggcattctctcccttctctatcgcatccctgctgacccaggtcctattgggagccggtgaaaacaccaaaaccaatctggagtccatcctgtcctaccccaaggattttacctgcgtacatcaggcacttaaagggttcactacgaaaggggtgacctctgttagtcagatcttccattctcctgaccttgccatccgagacacctttgtgaacgccagccggacactctacagctcctctccacgggtgctgagcaacaattcggatgcgaacctggagttgatcaacacatgggttgccaagaacactaacaacaagatttccagactcttagacagtctgccttccgatacacggttggtcctgctaaacgccatatatctttccgccaagtggaaaacaacctttgatccaaagaaaaccagaatggaaccgttccactttaagaatagcgtcataaaagtccctatgatgaactctaagaaatatcctgtggcccacttcatcgatcaaactctgaaggccaaagtagggcagctgcagctttcgcacaacctcagcctggtgattctggtaccccagaacctgaaacaccgactggaggacatggaacaggctttaagtccctcagtcttcaaagcaatcatggaaaaattggaaatgagtaagttccaacctactttgttgacgctccctaggatcaaggtcaccacaagtcaggatatgctgagcatcatggaaaagcttgagttcttcgacttttcctacgacctgaatctctgcggcttgactgaggacccggacttgcaagtgagcgccatgcaacatcaaactgtgctggaattaacagagacaggagtagaagccgccgctgcatcagccattagcgtcgcccggaccctgctggtgttcgaagtgcaacagccgtttttgttcgtcctgtgggatcagcaacacaagtttcccgtgtttatgggcagagtctatgacccaagagcg

SEQ ID NO: 935 - DNA, 1500 bp, Artificial Sequence
  derived and/or modified sequence
atggcgtcgcgactaacccttttaacattgctgctgcttctgctggctggagatcgggccagttctaacccaaacgctacctcaagttcttcacaagatcctgaaagcctgcaagaccggggcgagggaaaggttgcgaccactgtgatcagcaagatgttgtttgtggagccaattctggaggtgtccagcctgccaacaacaaattccaccacaaatagtgctacaaagattaccgccaatacaacagatgaaccaacgacacaacctactactgagcctaccacacagccaacaattcaaccgacgcagccaactactcagctaccaactgattcaccaacacagcctacaactgggtccttctgcccgggccccgtaacactctgctcggacctggagtcacattctacggaagcagtcctaggcgacgccctggtcgattttagcctgaaactctatcatgcattttcagctatgaaaaaagtggaaactaacatggccttctccccattctccatagcttctctattgacccaggtactcctgggcgccggtgaaaatacaaaaaccaacttggaatccatcttgtcctaccccaaggacttcacctgcgtgcaccaggcacttaagggcttcacgaccaagggggtgacatctgtgtcccaaatttttcactcaccggatctggcaatccgcgacaccttcgttaacgccagccggactttgtatagctccagccctagggttttgtcaaacaactctgatgccaacctggagcttattaatacatgggtggcaaaaaacacaaataataaaatcagcaggttactggatagccttcctagcgacacacggttagtactgttaaatgccatttatctgtccgctaaatggaagaccacgttcgatcccaagaagacccggatggaaccattccacttcaagaattcagtgattaaggtgcccatgatgaattctaaaaagtatcccgtcgctcacttcatcgatcagacgttaaaggcgaaagtaggccagctgcagctgtcccacaacttatccctcgtcatcctcgtgccgcaaaatcttaaacatcgcctggaagatatggagcaggccctttctccatctgtgtttaaggcaatcatggagaagctagaaatgagtaagttccagcccacccttcttactttaccacgcattaaggtgaccacctcccaggacatgctgtctatcatggagaagcttgagttttttgacttctcctacgatctgaatctttgcggtttgacagaagaccccgacctccaggtgtccgcaatgcagcaccagactgttctggaactgaccgagaccggcgtcgaggcggccgcggccagcgcaatctcggtcgcccggacgttgctggttttcgaagtgcagcagccctttctgtttgtgctatgggatcagcagcacaagttcccggtgtttatggggagggtctacgatccaagagcg

SEQ ID NO: 936 - DNA, 1500 bp, Artificial Sequence
  derived and/or modified sequence
atggcttctaggttgacgctacttacactgctcctgttgctgctggcaggagaccgggcaagtagcaacccaaatgccactagctctagctcacaggatcctgaatctctccaggataggggcgaaggaaaagtggcaacaaccgtgatctctaaaatgttgttcgtggaaccaatcttggaggtctcgtctctaccaactacaaactccactactaactccgctacgaaaattaccgccaatactaccgatgaacccacgactcaaccgaccaccgagccaacaacccagccaacaatccagcccacccagcccactacacagcttcccaccgatagtcccacgcagccaaccaccggctccttttgcccaggccccgtgaccttgtgcagcgatttagagagtcacagcacagaagccgtgctgggcgacgcccttgtcgacttctcgctgaaactgtatcacgcgttttcggctatgaaaaaggttgagactaatatggcatttagtcccttcagtattgcatcactcctgacccaggtgctgttaggagcaggagagaatacgaagaccaatctggagagcatactgtcgtaccccaaggacttcacctgtgttcatcaggctctgaaagggtttactacgaaaggcgtgacatctgttagtcagatctttcatagcccagacctggccatcagagacacatttgtgaacgccagccggactctctatagtagctcaccccgagtgctgagcaacaacagtgatgcaaacctggaactcattaacacgtgggtcgctaagaacaccaataataagatcagtcgcctgctcgacagcctcccttccgatacaaggcttgtgctgctgaatgcaatctacttgtctgctaagtggaaaacaacttttgatccaaagaagacacgtatggagccatttcactttaaaaactcagtgataaaggttccaatgatgaacagcaaaaagtaccccgtggcccattttattgaccaaacacttaaagctaaagtgggacagctgcaattgagccataacctcagcctggtgattcttgtgccacagaatctgaaacacagactggaagacatggagcaagctttaagtccatctgtgtttaaggccattatggagaaactggaaatgtccaaattccaacctaccctcctgacactgccgagaattaaggtcaccacttcccaggatatgctgtctatcatggagaagttggagtttttcgacttcagctacgatcttaacttgtgcggtctgacggaagacccagacttacaggtgtctgctatgcagcaccaaaccgtgctcgagctgaccgagaccggtgtggaagctgcagctgcttcagcgatttccgtcgcacgtactttgctagtttttgaagttcaacagcctttcctctttgtcctgtgggatcaacagcacaaatttccagtgttcatgggcagggtctatgacccgagggcc

SEQ ID NO: 937 - DNA, 1500 bp, Artificial Sequence
  derived and/or modified sequence
atggcaagccgacttacgctactgacactgttgctgctactccttgccggggaccgtgcctcctctaatccaaacgccacatcctcatctagtcaggaccctgagtccctgcaggatcgaggagaggggaaggtcgctactactgtgatcagcaagatgctcttcgtggagcctatcctggaggtctcctcccttcccactaccaattccacaaccaatagcgcgactaagattacggccaataccactgacgagccgaccacccagcctacgaccgagccaactacccagcccacaattcagccaactcagccaactacccaactgcccaccgattcccccacgcagcccacaaccggctctttttgtcccgggcctgtgactctgtgttccgatttggagagccactcaaccgaggccgtcctcggcgatgcactggtcgatttctccctgaagttgtaccacgcattttcggctatgaagaaagtggagacaaacatggcctttagcccattcagcatcgcctcactgctgacccaggtcctgctgggcgctggtgagaacacaaagactaatctcgagagtatcctcagctatccaaaggacttcacctgtgtgcaccaggccctcaaaggatttacaaccaagggagtgacatccgtgagccagatctttcactcccctgacctggcaattcgtgatacattcgtaaacgcctcgaggacactctattcctcctctccccgagttctgagcaataactctgatgcgaatctcgagcttataaacacttgggtggccaagaatacaaataacaagatctcccggttgctggactctctgccttctgatacacgcctggtgttgctgaacgcgatctacctatcggctaagtggaaaacaacatttgacccaaagaaaaccaggatggagccgtttcatttcaagaacagtgttatcaaggtcccaatgatgaatagcaagaaatatcccgtggcgcattttatcgatcagaccctgaaggccaaagtcggacagttacaactatcgcataatctcagccttgtgattttagtgccccagaatcttaaacaccgcctggaggacatggagcaagccctgtctcctagcgtatttaaagccatcatggagaagctggagatgagcaaattccagcccactctgctgaccctaccaagaatcaaggtgacgacaagtcaggatatgttgagcatcatggaaaagcttgagttctttgactttagctatgacctgaacctctgtggcttaaccgaggatccagatctccaagtgagcgccatgcagcatcagaccgtcctggaattgaccgaaaccggtgtagaggccgcagctgcatccgccatttcagtggcccggacactcctcgtattcgaagtacagcagccatttttatttgtcctgtgggaccagcagcacaaattcccggtattcatgggccgcgtatacgatccacgggcc

SEQ ID NO: 938 - DNA, 1500 bp, Artificial Sequence
  derived and/or modified sequence
atggcttcccggctgacattgctgactctgctgctcctgctgctggccggagaccgggcgagttctaacccaaacgccacttcatcctccagccaggatcccgaaagtctgcaggatcggggagagggaaaggtagctaccacagtgattagcaaaatgttgttcgttgagccaatcctggaggtgtcctccctccctaccacaaactctactaccaattccgccacaaagattaccgcaaatacaactgacgagcctactacacagccaaccaccgagcccactacccaacctacaatccagcccacccagccgactacccagctgccaaccgacagccctactcagcccacaacggggagcttttgtccaggtcctgtaacactgtgctctgacctggagagtcacagcacagaagccgtgctgggcgatgccctcgtggacttttccctcaagctgtaccatgccttctctgccatgaaaaaggtcgaaacaaatatggctttttcccccttttccatcgcttcattgttgacacaggtgctcctgggagctggagagaacaccaaaacaaatctggagagtatcctgtcctatccgaaagactttacgtgtgtgcaccaggcactcaaggggttcacaaccaagggagtgactagcgtctcacagatctttcactccccggatctggcgataagggatacttttgtcaatgccagcagaaccctgtactcttcatctcctcgggtgctctccaacaatagcgacgccaatctcgagttgatcaacacctgggttgccaaaaacaccaataataaaatctccagactcctggattctctccctagcgacaccaggttggttctcctcaatgccatctatctgtccgcaaaatggaagacaacctttgaccccaaaaagacgcggatggagccctttcacttcaaaaattctgtaataaaggtgcctatgatgaactcaaagaagtatcctgtggcacactttatagaccagaccctgaaggctaaggtgggtcagctgcagttgagtcacaatctctctctcgtgatacttgtgccacaaaatctgaaacatcgcctggaggacatggagcaggctctctcaccatcagtgttcaaggcaatcatggagaagctggaaatgtcaaaattccagcctacccttctgaccttgccgcggatcaaggtgaccacatcccaggacatgctttctatcatggaaaagcttgaatttttcgatttttcctatgatctgaacctgtgtggactcacggaggacccagatctgcaggtgagcgccatgcagcatcagactgtgctggagctgactgaaacgggggtggaagccgccgctgcgagcgctatatcagtggccaggacacttctcgtgttcgaagttcagcaaccgttcctgttcgtcctgtgggatcagcagcataaattcccagtctttatgggaagggtgtacgaccctcgagct

SEQ ID NO: 939 - DNA, 1500 bp, Artificial Sequence
  derived and/or modified sequence
atggctagccgtcttacacttctcacacttctgcttcttctacttgcaggcgaccgagcctcatcgaatcctaacgccacatctagctctagccaggatcctgagtctcttcaggatcgaggggaaggaaaggttgctacaaccgtcattagcaagatgttgtttgtggaaccgatattagaggtgagctcacttccaacaacaaattcgacaaccaattccgcaactaaaattacagcaaataccacagatgagcctacgacccagccgacaaccgaacctacaacgcagccaactatccagccaacgcagcccacgacacagcttccaacagatagcccgacacaaccgaccaccggatccttttgtccgggccctgtcacattatgcagcgacctggaatcacactccaccgaggcggttctgggtgacgcattagtcgatttctcattgaaactttaccacgctttttcagcaatgaaaaaagtcgagacgaatatggctttttcccctttctccattgcctctcttctcacgcaggttttacttggcgctggcgagaatacgaagactaacctggaatctatcctttcatatccgaaggacttcacatgtgttcatcaggcattaaagggcttcacgacgaagggagttacttccgtcagtcagatctttcattcacctgatctcgcaatcagagatacatttgtaaatgcttcgcgcactctgtattcttcttctccgcgtgtgttaagtaataattcagatgcaaatctggaacttattaacacttgggttgcgaaaaacactaacaataaaattagtcgactcctagatagccttccgtcagatacaagattggtactgcttaatgctatttatctttcagcgaagtggaagaccacgtttgatcctaaaaaaacccgtatggaaccgtttcattttaagaacagtgtgatcaaggtgccgatgatgaattctaagaaataccctgtggcccattttattgaccaaacactgaaggcaaaagtcggtcagttgcagctctctcataacctttccttggtgattcttgtaccgcaaaatcttaagcatcgattggaagatatggagcaagcattgtctccctctgtatttaaagctataatggaaaaattggagatgtcaaaattccaacctacacttctgacactccctcgcattaaagttacaacatctcaggatatgttaagcatcatggaaaaactggagttcttcgatttttcgtatgacctgaatctttgtggcctcacagaagatccggatctccaagtctccgcaatgcagcaccagacggtcttggagcttacagaaaccggcgtggaagcagccgcagctagcgctattagcgtggctcggacattgctcgtctttgaagtacagcaaccatttcttttcgtcttgtgggatcagcaacacaaatttccggtctttatgggccgagtttatgatcctagagcg

SEQ ID NO: 940 - DNA, 1500 bp, Artificial Sequence
  derived and/or modified sequence
atggcctcccgactcaccctgctgacgttgctgctcttgctgctggcgggggatcgcgcgagttctaacccaaacgccacctcgtcctcgtcacaggatccggaatctctacaagaccgcggggaaggtaaggtggcgactaccgtgatctcaaagatgttattcgtggaacccattctcgaggtttcctcacttcctacaaccaatagcacaacaaactccgctactaaaataaccgctaataccaccgatgagcccacgactcagcccacgaccgaaccaacaacacagccgactattcagcccacccagcccaccacccaactaccaaccgattcaccaacacagcctacaactggtagtttttgcccaggccccgttaccttgtgttctgatcttgagtcccactccactgaagccgtgttaggagatgccctggtcgatttctctctcaaactgtatcacgcattctccgccatgaaaaaggtggaaaccaacatggcgtttagccccttctcaatcgcgtctctgctcacccaggtgctgctgggcgccggggaaaacaccaaaacgaacttggagtccatcctttcttacccgaaggacttcacgtgtgtacatcaagccctaaaggggtttacgacaaagggggttacaagtgtctcccagatttttcacagtcccgacctggccataagagatactttcgtaaatgcctccaggacactgtatagtagctcacctagagtcctttcaaacaacagcgacgcaaacttggaactcatcaacacctgggtggccaagaacacaaacaacaagatttctcgcttgcttgattcactgccctcggacactagactagtgctcttgaatgcaatctacttatccgccaagtggaagacaacattcgaccctaaaaaaacgagaatggagccattccattttaaaaatagcgtgattaaggtacctatgatgaactctaaaaagtatcccgttgcacatttcatcgaccaaaccctcaaggccaaagtgggccagctccagctttctcacaatctgtcactcgtaatcttggtgccgcagaatctgaagcaccggctggaggacatggaacaggcactgtctccaagcgtgttcaaagccatcatggagaaactcgagatgtccaagttccagccgaccctgctcaccttaccccgcataaaggtcacgaccagtcaggacatgctgtcgattatggagaagttagagttcttcgacttttcttacgacttaaatctctgcgggcttactgaggatcccgacttgcaggtctctgccatgcagcaccagaccgtgctcgagctcactgagacaggtgttgaagcagcagctgccagtgctatctctgttgctcgaaccctcctcgtgttcgaagtgcagcagccgtttctgttcgtcctgtgggatcagcagcataagttcccagtcttcatgggtagggtgtacgacccccgggcg

SEQ ID NO: 941 - DNA, 1500 bp, Artificial Sequence
  derived and/or modified sequence
atggctagccgtcttactctgcttactctgctgcttttattgctggcgggagatagggcctcatcaaatcccaatgcaacgtcctcttcatcccaggacccagagagtctacaggaccgcggcgagggcaaggttgctactacggtgatctctaagatgctgttcgtggaaccaatcctcgaggtctcgagcttgcccaccactaatagcactacaaattctgccacgaagataactgctaacactacagacgaacctacaacacagccaactactgaaccaactacccagccaactattcagccgactcagccgacgactcagctacccaccgacagcccgactcagcccaccactggaagcttctgtcccggacctgtgacactgtgttccgacttggagagccattcaaccgaagccgtcctgggggatgcgctggtcgatttctctctgaaattgtatcatgcatttagtgctatgaagaaagtcgagaccaatatggcctttagcccgttcagcattgccagtctgttaacccaggtactgctcggggccggtgaaaatactaaaaccaatctggaatcaattctgagctaccccaaggatttcacctgtgttcaccaagccctaaagggatttaccactaaaggagtaacttcagtaagtcagatcttccattctccagatttagccatcagggacacattcgtcaacgcctcgcgtaccctgtatagttcatcgcctagagttctctctaataatagtgatgcaaatttggagctgatcaatacctgggtggcaaagaatacaaataataagatatctagattgcttgattctctcccttctgacacgcggctggttctgcttaatgctatctatctctctgccaagtggaagaccacttttgacccaaaaaagactaggatggaaccatttcacttcaagaactctgtaatcaaagtgcctatgatgaactccaagaaatatcctgtcgctcacttcattgaccaaaccctgaaagccaaggtgggccagctacaattgtcccacaatctgagtctagtaatcctcgtcccacagaatctcaaacatagactggaggacatggaacaggccctgtccccctctgtgttcaaggccatcatggaaaagctggagatgtccaagttccagccaacactcttgactctcccgaggattaaagtgacaacatcgcaggacatgctgtctattatggaaaaacttgaattcttcgacttttcctatgacctcaacctttgcgggctgaccgaagatcctgacctgcaggtgtccgctatgcagcaccagaccgtgttggagctgacagagactggggtcgaggcggcagcagccagtgcaatcagtgttgccaggaccctattggtgtttgaggtccaacaacccttcctttttgtcctgtgggatcagcagcataagtttccagttttcatgggaagggtgtacgatccacgcgcc

SEQ ID NO: 942 - DNA, 1500 bp, Artificial Sequence
  derived and/or modified sequence
atggcctcaaggctaacactcctcacactgcttctattgctcctagccggggatagggctagttctaatcccaacgctacatcctcttcaagtcaggatcctgagtctttacaggatagaggggaaggaaaagtcgccactactgtgatatccaagatgctctttgtggagcctatcctcgaagtgtcatctctgcccactacaaattcaacaactaactccgcaacaaaaataacagcgaatacaactgatgaacctacaactcagcccacaacagaacctactacacagcctactatccagcccacacagccaactacacagttgcccactgactctcctacacaacccacaacagggtctttttgtcctggacccgtcacactgtgctccgacctggaatcacattctactgaagctgtcctcggagatgcactcgtggacttttcactaaaactgtatcacgcgttttcggccatgaaaaaagtagagacaaatatggctttctcccccttttccatagcctctctcctcacacaggtgctcctaggagcaggggagaatactaaaactaatctagaatctatcttgtcctatcctaaagattttacgtgtgttcaccaggccctgaaagggttcacaactaaaggggtaacatcagtttcccagatctttcattcccctgatcttgccatcagggatactttcgtgaacgcttcaagaactctgtacagttcttctcccagggtgttgtcaaacaactctgatgccaaccttgaattaattaacacatgggtcgccaaaaatacaaacaataaaatatctagactcctagattctttaccatcggatactcgcctagtgctactcaatgccatctatctgtcagccaagtggaaaacaacttttgatcctaaaaagacgcggatggagcccttccacttcaagaactccgtaatcaaagtgcctatgatgaatagtaaaaaatatccagtggcccattttattgatcagacactgaaggccaaagtggggcagcttcagctttctcacaacttatctttagtgatccttgtgccccagaaccttaaacatcggctggaggatatggaacaggctctctcccccagtgtctttaaagctattatggaaaagcttgaaatgtcgaaatttcagcctactctactgacactgcctaggattaaagtcacaacatcacaggatatgctctcaataatggagaaactcgagttttttgatttctcttatgatctcaacctctgtgggttaactgaagatcctgacttacaggttagtgcgatgcagcaccagactgtcctcgaattaactgaaactggggtagaagctgccgcagcttccgccatctccgtggctcggacactgcttgtatttgaagtccagcagccttttctattcgttttatgggatcagcagcataaattccccgtgtttatggggagggtgtacgatccacgggca

SEQ ID NO: 943 - DNA, 1500 bp, Artificial Sequence
  derived and/or modified sequence
atggcaagcagactgactctcctcacattgttactgttgttgctcgcgggcgatagggcctccagcaaccccaacgcgacaagtagttcctcgcaggacccagagtctcttcaggatagaggcgaaggaaaagtggctaccaccgtgatcagcaaaatgctctttgtagagcctatcctggaggtctcgtctctgcctaccaccaactcgaccacaaattcagccacaaaaatcaccgccaacaccaccgatgaaccaaccacccaacctactacagaaccaaccacacagccaacaatccagcccacacaacctacaactcaactgcctaccgatagcccaacgcaaccgaccacaggcagtttctgtcccggccccgtgaccctgtgcagtgatctggagagccacagtaccgaagctgtcctcggagacgccctcgttgacttttcactgaagctgtaccacgcatttagcgctatgaaaaaagtcgaaacaaatatggccttttctccttttagtattgcatcactgttgactcaggtccttcttggagcaggggaaaacaccaaaacaaacctggagtcaatactcagctacccaaaggattttacctgcgtccaccaagctctcaaagggttcaccacaaagggggtcacttccgtctctcagatcttccactctccagatctggctattcgggatacatttgtgaacgcttcacggactctgtatagcagctcccccagggtcctgagtaacaattccgacgcaaacctggaactgattaatacttgggtggcaaagaacactaacaacaagatctctagacttcttgactctctcccaagcgacacccgtctggtgctgctcaatgccatctatctgagtgctaaatggaaaaccaccttcgatccgaaaaaaacccgtatggagccttttcattttaaaaacagtgtgataaaagtccctatgatgaacagtaaaaagtatccagtggctcatttcatcgaccagaccctcaaagccaaagtggggcagctgcaactgtcccataatctcagcctcgtcatcttggtcccccagaacctcaaacatcgcttggaagatatggaacaagcgcttagcccatctgtatttaaggctatcatggaaaagctcgaaatgagtaagttccaacccacattactcacacttccacgcatcaaagtgaccacatcacaagatatgctgtccatcatggagaaactagagttctttgattttagctatgaccttaatctgtgcggccttacagaggaccccgatctgcaagtgtcggctatgcagcatcagactgtgctggagctgactgagacaggcgtggaagcagctgcagcgtcagctatcagcgtggctcgaacccttctggtgtttgaggttcaacagccttttctgtttgtgctgtgggaccagcaacacaagtttccagtgttcatgggcagggtttatgaccccagggcc

SEQ ID NO: 944 - DNA, 1500 bp, Artificial Sequence
  derived and/or modified sequence
atggcatcccgactcacactgctgacactgctgctgcttctgctggcaggagatcgggccagctccaaccctaatgcaactagttctagttcacaggatccagagtctctgcaggaccgaggcgagggcaaagtggccacaactgtcatctcaaagatgctgttcgtagagccaatcttggaagtgagctctctgccaacaacaaacagtaccacaaattcagcaactaaaatcacagccaacactacagacgagccaaccacgcagccaaccactgagcctaccacccagcctactatccagcccacacagcctaccacacaactgcccaccgacagtcccacacagccaaccacaggcagcttctgccctggccccgtgacactgtgtagtgacctggagagccattctactgaggctgtcctcggggacgccctcgtcgattttagccttaaactttaccacgccttttccgcaatgaagaaagtggagaccaatatggccttcagccccttctctatcgccagcttgttgactcaggtcctgctgggtgctggtgagaatacaaagactaatctggaatccattttgtcataccctaaagactttacctgcgtccaccaggccctcaaggggttcaccactaaaggcgtgaccagtgtcagccaaatttttcacagcccagacctggctatccgggacacgtttgttaacgcctcacgcaccctttacagttcttctcccagagttctgagtaacaattctgacgcaaatctggagctgattaacacatgggtggcgaagaatacaaacaataagatctctaggttgttggattccctgccaagtgacacgcggctcgtgctgctcaacgccatatatttgagtgcgaagtggaagaccacattcgacccgaagaagacaaggatggagcccttccattttaaaaacagcgttattaaggtgccaatgatgaacagcaaaaagtatccagtggcccatttcatcgatcagaccctgaaggctaaagtgggtcagctccagctcagccataatttgtctcttgtgatcttggtcccacagaacttgaagcaccggctcgaggacatggaacaagctctcagtcctagtgtgttcaaggcaataatggaaaagctggaaatgagtaagttccagccgacactcctgacattgcctcggattaaagtaaccaccagccaggacatgctgtctattatggagaaactggagttcttcgacttttcttacgacctgaacctgtgcggcctgaccgaggaccctgatctgcaggtttccgctatgcaacaccaaaccgtgctcgaactgaccgaaaccggcgtggaggccgcggccgcatctgccatctctgttgccaggacactgctggtgttcgaggttcagcaacccttcttgtttgtgctttgggatcagcagcacaaatttcccgtgttcatggggcgggtatacgacccaagggct

SEQ ID NO: 945 - DNA, 1500 bp, Artificial Sequence
  derived and/or modified sequence
atggcttctcgcttaaccctacttacgttgcttctgttgttactagctggagaccgagccagttctaatccgaacgctacctcctcctcctctcaggacccggaatctctgcaggacaggggtgaaggaaaagtggccaccactgtcatatctaaaatgttgttcgtcgagcctattttggaagtctccagccttcccactacgaatagtacaactaactctgcgaccaaaatcacggctaatactactgatgaacccacgacccagcccaccacagagcctactacccagcccacaatccagccaacccaaccaacaacccaacttcctacagacagtccaacccagccaaccacaggctctttttgtccagggcccgtcacactgtgctctgacctcgagagccactccacagaggcggtactcggagacgccttggtcgacttctccctgaagctgtaccatgccttttcagccatgaagaaggtggaaactaatatggcattcagtcctttctcaattgcatcactgctgacacaggtgctcctcggggccggtgaaaacacaaagaccaatcttgaatcaatcctgtcctatcctaaggactttacttgcgttcaccaggctttgaaaggctttactactaagggcgtgacgtcagtgtcccagatctttcacagcccagatctggctattagggatacttttgtcaacgcatcacggactttatactcttcatctcccagggttttgtcaaataacagtgatgccaatctggagcttatcaacacttgggtggccaaaaacacgaacaataaaatctctagattactcgattcactgccctcggacacaagattagtgttgctgaacgcaatctacctgtccgccaaatggaaaactacattcgatcctaaaaagactcgcatggagccctttcactttaaaaattcagtgataaaagtcccaatgatgaactcaaaaaagtacccagtggcacactttattgaccaaacccttaaagccaaagtcggccagctgcagctatcccataatttgtcactcgtcattttagtgcctcagaatctcaagcatcggcttgaagatatggagcaggcccttagtccctccgtgtttaaagccatcatggaaaagttggaaatgagcaagttccagcccactctcctgactctgccacggatcaaggtgacaaccagtcaggatatgttgagtatcatggaaaaactggagttcttcgacttcagctatgacctcaacctttgtgggcttaccgaggaccctgaccttcaagtgagtgccatgcagcaccagactgtcctcgaactgactgaaacaggtgtcgaagccgcggcagcttctgccatctccgtcgctcgaacacttctggttttcgaggtccagcagccttttctgtttgtgttgtgggatcaacagcacaaattccccgttttcatgggacgtgtatatgaccctagggct

SEQ ID NO: 946 - DNA, 1500 bp, Artificial Sequence
  derived and/or modified sequence
atggctagtaggctgactcttttgactctgcttcttcttctcttggcaggtgatagggctagttctaatccaaatgctactagctcaagcagccaagatcccgagtcattacaggataggggagagggaaaggttgcaactactgttattagtaagatgctgtttgtggagccaattctggaggtgtcttcgctaccaacaacgaactctacaactaacagtgctactaaaatcaccgcaaatactacggacgagccgactacacaacctactacagagcccacaacccagccaaccatacagccaactcagcctactactcaactgccgacagattctcctactcaacctaccactggctctttctgccctgggccggttactctgtgttccgatctcgagtcgcattcaactgaggctgttcttggggatgccttggtagatttttcacttaaactttatcatgcatttagtgcaatgaaaaaggtggaaactaacatggctttctctcccttctccattgcatcactccttactcaggtgcttcttggcgctggtgaaaacacaaagaccaacttggagtctatcctctcgtaccctaaagattttacatgcgttcatcaagcacttaagggattcacaacaaagggggttacgtccgtttcccaaatatttcactctccagaccttgctataagggacacttttgtcaacgcaagccgaacactatactcttcctcgcctagagtcttgagtaacaacagtgatgctaatttggagttaattaacacttgggtcgcaaagaacacgaataacaaaatttcaaggttactcgactcactcccctctgatacccgtctagttttacttaatgcaatttacctttcggctaaatggaaaaccacctttgatcctaagaagactagaatggaacctttccactttaaaaattcagtcatcaaagtgcctatgatgaactcgaaaaagtaccctgtggcacactttattgatcagacacttaaggccaaggttggccaattacaactcagccacaacttgtcattggttatactcgtgcctcagaatctcaagcacaggcttgaagatatggaacaagcactttcaccttcagtgttcaaggcaataatggagaaattggagatgagtaagttccagcccacattgctaacactaccgcgcattaaggttactacatcgcaagacatgttgagtattatggaaaaattagaattcttcgatttttcatacgatttgaacctttgcggattgactgaagatcctgacctgcaagttagtgccatgcaacatcaaactgtgcttgaattgaccgaaactggtgttgaagcggctgctgcgtctgctataagcgtcgcacgaacacttctagtattcgaagttcaacaaccttttctcttcgttttgtgggatcaacaacataagttccctgtttttatgggaagagtttatgacccccgagcg

SEQ ID NO: 947 - DNA, 1500 bp, Artificial Sequence
  derived and/or modified sequence
atggcttcccgcctgactctgctgacactactcctattactactggcgggtgacagggcaagctccaatccaaacgccacctctagttctagtcaggaccctgagtcacttcaggatcgaggggagggtaaggtggctaccacagttatctctaaaatgctgtttgtggaacctatactggaggtatcctccctacccactacaaactccactaccaattccgccactaagataactgccaacactaccgacgaaccgacaacacagcctactactgagcccactacccagccaacaattcagcctacacagcctaccactcaactccctacagacagtcccacacaacccacgactgggtcattctgtcccgggccagtcaccctctgttcagatctggagtcacatagtactgaagccgtgctcggggacgccctggtggatttcagcctgaagctctatcacgcattctctgccatgaagaaagttgaaaccaacatggccttctcgccattctccatcgcttcgctgctcactcaggtactgcttggtgctggagagaatactaaaactaatttagaaagtattctgagctatcctaaggacttcacctgtgtgcaccaggccctgaagggattcaccaccaagggggtcaccagcgtgagtcagatatttcacagccccgatttagccatcagagatacattcgttaacgcatctcgtaccctctattctagctctcctcgcgttctgtccaataattccgatgctaatcttgagctgataaacacctgggttgccaagaataccaataataagatctcgaggctcctagactccctgccctcggacacccggctggtccttcttaacgccatttatctctctgcgaaatggaaaacaactttcgaccccaaaaagacacgaatggagccctttcattttaagaattcggtgatcaaagtgccaatgatgaatagcaaaaagtatcccgttgctcacttcatagaccagaccctgaaggcaaaggttggacagctgcaacttagccataatctgagtctggtgatccttgttccccagaatctgaaacaccgcttagaagatatggaacaggctcttagtccatctgtattcaaggcgatcatggaaaaactggagatgtctaaatttcagcccaccttgctgaccttaccgaggatcaaagtgactacttctcaggatatgctgtccataatggaaaagctggagtttttcgacttctcatatgatctgaatttgtgcgggctgacagaagaccctgatctgcaggttagtgctatgcagcatcagaccgtattggagcttaccgaaacaggagtcgaggccgctgccgcgtccgctatttctgttgcaaggacactgttggtctttgaagtccagcagccttttctgtttgtcctctgggaccagcagcacaagtttccagtattcatggggcgcgtgtatgatccccgcgct

SEQ ID NO: 948 - DNA, 1500 bp, Artificial Sequence
  derived and/or modified sequence
atggctagccgactgaccctcctgaccctgctcctgttgttattagccggagatagagccagttccaatccaaatgctacaagcagttctagtcaagatcctgagtccctccaggatagaggggagggaaaagtcgctaccacagtcatcagcaagatgctgtttgtcgaaccgattctcgaagtgtccagcctgcccactacaaatagcactacgaattccgccactaagatcacagccaatactaccgacgaacctacaacccaaccaacgacggaaccaactacacagcccaccatacagccaactcagcctacaacgcagctgcctactgactcaccaacgcagcccactactggctctttctgcccggggccagtcactctctgtagcgaccttgaaagtcacagcaccgaggctgtgctcggagatgcacttgttgacttctccctgaagttataccatgctttctccgctatgaagaaagtagagactaatatggccttttcgcccttctctatcgcttcactgctgactcaagtgctcttaggggctggtgaaaacaccaagacgaatctggagtctattctctcgtaccctaaggactttacctgtgtgcatcaagctctgaaggggttcactaccaagggagtgaccagtgtgtcccaaatttttcattcgccagacttggctatcagggatacctttgttaatgctagccgcactctatatagtagctctcctagggtgctctctaataactccgacgcgaacctggagttaatcaacacatgggttgctaaaaacactaacaataagatatctagattactcgattctttgccatcagataccaggcttgtgttgctcaacgcgatctatctgagtgctaagtggaagaccacatttgaccctaagaaaaccaggatggaaccttttcatttcaaaaacagcgtgatcaaagtgccaatgatgaactctaagaaatatcccgtagcgcacttcattgatcaaacccttaaagctaaagtggggcagctccagctgtctcacaacctgtcgctagtcatcttggtcccacaaaaccttaagcacagactagaggatatggaacaagccctttctccttcagtgtttaaagcgatcatggaaaaattagaaatgagtaagttccagccaacgttactgacactgccccggattaaagtgacaacatcacaggacatgttgtcaattatggagaagctggagttcttcgatttctcatatgacctcaatctctgcggtctgacagaggaccccgacttacaagtttccgccatgcagcatcagactgtgctggagttgaccgaaactggagtggaggccgcagccgctagtgcgatctcagtcgcaaggacgctgctggttttcgaggtgcaacagcccttcttgtttgttttgtgggaccaacaacacaagttccccgtttttatgggcagagtgtatgatccacgggcc

SEQ ID NO: 949 - DNA, 1500 bp, Artificial Sequence
  derived and/or modified sequence
atggcctctcggctgacactgctcaccttacttctgttgctgctggcaggggatcgagcctccagcaatcctaacgccaccagttctagctctcaagatcccgaaagcctacaggatagaggcgaagggaaagtagcaacgactgtaatttcaaagatgttgtttgttgaacctatcctggaggtgtcatccctgccgaccaccaacagtactaccaatagcgctaccaagattacggcgaatacaaccgacgagcccactacccaaccaactaccgaaccaaccacacagccaaccatacagcctacacaaccgaccacacagctgcctacagacagccccacccagcctacgactggcagtttttgccctgggcccgtgactctgtgtagcgatctggaatcacattctacagaggcagttttgggcgacgcactggtggacttcagcctgaaattataccacgcattttcagctatgaaaaaggttgagaccaatatggctttttcaccattctccatagcttcactgcttacccaggtgttactgggggcaggcgaaaacaccaagacaaatctggagtctatcttgagctatccaaaagattttacctgtgtgcaccaggcactcaaggggtttactacaaagggcgttactagcgtctcacagattttccactcaccagatcttgccatacgggacaccttcgtgaacgctagccgcaccctttattcctctagtccaagagtgttgtccaacaattcagatgccaacttggaattaataaacacgtgggtagcgaagaacacaaacaacaaaatctcgaggctgctcgattcacttccgtctgacactcgtctcgtgttgcttaacgctatttatttgagcgccaagtggaaaacgacctttgatcccaaaaaaacgcggatggaaccatttcacttcaaaaactccgttataaaggttcccatgatgaactcgaagaagtacccagtggcccatttcatcgatcagaccctcaaagccaaagtgggccagctccagctgagccacaacctcagtctcgtcatcctggtgccccagaaccttaaacacagactcgaggatatggaacaggctttatcaccatccgtcttcaaagccatcatggagaaactggaaatgtcaaaatttcagcccactctcctgacccttcctcgcatcaaggtgacaaccagtcaggacatgcttagcataatggaaaagctggaattttttgactttagttacgatttgaatttgtgcgggctgacagaagaccctgatctacaggtctctgcgatgcagcatcagaccgtcctcgagctgactgagaccggtgtggaagctgctgccgcctccgctatctccgttgcgcgcactctcctcgtgttcgaggtgcagcagcccttcctctttgtcctgtgggaccagcagcacaagttcccagtctttatgggacgcgtgtatgatccccgggct

SEQ ID NO: 950 - DNA, 1500 bp, Artificial Sequence
  derived and/or modified sequence
atggccagccggcttaccctcctgaccctgctgctcctcctgctggccggtgaccgggccagcagtaaccctaatgccaccagttcgagctcgcaggatccggagtctcttcaagaccgtggagagggaaaagtcgcgaccactgtgatttccaagatgctgttcgtggaacccattctcgaggtttcatccttgcctacaaccaattcaacaaccaatagcgcaaccaagatcactgcaaatactacagacgaaccaacaacacagcccactacagagcctaccacacagcccacaatccagccaacgcagcctaccacacagcttccaaccgactctcccacacaacctacgaccgggagcttttgcccgggacccgtcactctatgcagtgatctggaatcccactcaactgaagccgtacttggagatgcccttgtggatttctcactaaagctctatcacgccttttccgccatgaagaaggtggagacaaatatggctttttcccccttttcaattgcttctctgctcacgcaggtgctcctcggcgccggagagaacactaagaccaatcttgaatctattctttcatatccgaaagacttcacatgcgtccaccaagccttaaaggggtttacaaccaaaggggtgacttcagtgtcacagatttttcacagtccggacctcgcgatcagggacaccttcgtaaatgcgtctcgcaccctgtactcttcatccccaagggtgctgtccaataacagcgacgccaatttagaactaatcaacacttgggtagcgaagaacaccaacaacaagatctcccgtttgctggattccttgcccagcgatacccgactggttctccttaatgctatatacctttccgccaagtggaagacaaccttcgatcccaaaaagacaaggatggaacctttccactttaagaactctgtgatcaaggtaccgatgatgaactctaagaagtatcccgtggcccattttatcgaccagacattgaaggccaaggtcggccagctccaactatcacacaatctctcgctggtgatactcgttccccagaatctgaaacaccgcctggaagatatggagcaggccctgagcccttctgtgttcaaggctattatggagaaactggaaatgagcaaatttcaacccaccttgttgacccttcctcggatcaaggtgactacctctcaggacatgctgtcaattatggagaagctggagttttttgacttctcctatgacctgaacctgtgcggccttaccgaggacccagacctgcaggtgagcgccatgcaacaccagacagttcttgaactgaccgaaactggtgtggaggctgccgccgccagcgcaatttctgtggccaggacactgctggtttttgaggtacagcagccgtttctgttcgttctgtgggaccagcagcataagtttccagtgtttatggggagggtttatgacccccgcgcc

SEQ ID NO: 951 - DNA, 1500 bp, Artificial Sequence
  derived and/or modified sequence
atggcctcacgcctgactctgttgactctgttgcttctgctgttggccggtgatagagccagttccaaccctaacgcaacctcttcatcttctcaggacccagaatcactccaggatcgcggtgagggtaaagtggctactaccgtcatttctaagatgcttttcgttgagcctattcttgaagtgtcctctctgcctaccactaatagcacaaccaactctgccaccaagattacagccaatactacagacgagcccaccacacagccaactactgaacctaccacccagcctactatccagcctacccaacctactactcagctgcccactgattcccctacacagcctacaaccggatccttttgtcccggtcctgttactctgtgctcagaccttgagtcccacagcaccgaagcagtccttggcgacgctttggtggatttctcacttaagctctatcacgccttctccgccatgaagaaggtcgaaacaaacatggcattttccccattctccatcgccagcctgctgactcaggtgctccttggagcaggagaaaataccaagaccaacctggaatctatactgtcctaccccaaggacttcacctgcgtgcatcaggccctcaagggttttacaaccaaaggcgtcacatccgtgtcacagattttccatagtcccgatctggctattcgcgatactttcgtcaacgctagcagaacactttattcttctagccccagagtgttgagtaacaacagcgatgccaacctggaactcataaacacctgggtggccaagaataccaacaacaagatcagcagactgctggatagtctcccctcagacacaaggctggtactgctgaacgcaatttacttgtccgccaaatggaagactacatttgacccaaagaagacaagaatggaaccattccacttcaagaattccgtcatcaaggtgcccatgatgaacagcaagaagtaccccgtagcacatttcatcgatcaaaccctgaaagctaaggtgggacagctgcagctgtcccacaatctctcattggtgattctggtacctcagaatctgaagcaccgtctggaggatatggaacaagcccttagtccctcagtgttcaaggccatcatggagaagctggagatgtcaaagtttcagcccaccttgctcaccctccccaggatcaaggtcaccacctcacaagacatgctgtccattatggagaagttggagttctttgacttttcctacgatcttaacctgtgtggccttaccgaggaccctgatcttcaggtcagtgccatgcaacaccagaccgtgctggaactgactgagactggcgtcgaggcagctgctgcctctgctatttcagtggctagaacccttcttgtgtttgaggttcagcagcccttcctgttcgttctgtgggaccagcaacataagtttccagttttcatgggtagggtgtatgatccaagggcc

SEQ ID NO: 952 - DNA, 1500 bp, Artificial Sequence
  derived and/or modified sequence
atggcatcccggctgacgctgctaaccctgctcttattgttgctggccggtgatagggccagctctaaccctaacgcgacctccagcagctcccaggatccggaatcactgcaagatcggggagaaggaaaggtggcaaccactgtgatctctaagatgctatttgtcgaacctatcctggaggtttctagcctcccaactaccaactccaccaccaactccgctacaaagatcactgccaacaccaccgacgaacctaccacacagccaacaacagagccgaccacacagcctaccatccagcctactcagcccactacccagttgcccaccgactcacccactcagccgactactggcagcttctgtccgggccccgtcacgctttgcagtgacctcgagtcacactctaccgaggccgtgcttggtgacgcattggtcgacttctccctgaaactgtaccacgctttctccgctatgaagaaagtggaaactaacatggctttttctcccttctctatcgcttctttgctgacgcaggtgctcctcggcgcgggagaaaatacaaagaccaacctggagtcgattcttagttacccaaaggacttcacctgcgtccaccaggccttgaagggatttaccaccaaaggggtgacttctgttagtcagattttccactctcccgacttggcaataagagacacatttgtaaacgcttcacgcaccctttattcatcatcccctagggtcttgtctaacaattctgacgcaaatttggaattgattaacacctgggtggctaagaataccaataacaagatatctcgcttgctggatagcctaccatccgacacccgtttggtacttttgaatgccatctatctatccgctaaatggaagacaacttttgacccgaaaaaaacccggatggagccctttcacttcaagaattccgttattaaagttcctatgatgaattctaagaagtaccccgtcgctcatttcatcgaccagaccctgaaggctaaggtgggacagttacagctcagtcacaacctcagcctcgtgatcttggttccccagaacctaaagcaccggctcgaggacatggaacaggctctgtccccgagcgttttcaaggctatcatggagaaactcgagatgtccaagtttcagcctactcttctcactttacctcgtatcaaagtaaccacgagccaggatatgctgagcatcatggaaaagttggagttctttgatttcagctacgacttaaatctttgcgggttgactgaagatcctgacctgcaggtgtcggccatgcagcaccagaccgtcttggagcttactgagaccggagtggaagcagctgccgcatcagccatcagtgtggcgaggaccctactggtgttcgaagtgcagcagccgtttctgtttgtactgtgggatcagcaacataaatttccagtgttcatgggcagagtgtatgacccccgggcc

SEQ ID NO: 953 - DNA, 1500 bp, Artificial Sequence
  derived and/or modified sequence
atggcctctagactgacattgctaaccctgctcctcttactgctggctggagaccgcgccagttccaatccaaacgcaacaagcagttcctcccaggatcccgaatctctgcaagatagaggtgaggggaaggttgccacaactgttatctccaaaatgctgttcgtggaaccaatcctcgaagtgagctctctaccaactacaaacagcaccaccaactctgctaccaaaataactgcaaacacaaccgacgagcctacaacccagcccacaacagaaccaacaacacaacctactatacagccaacccaacctaccacccagcttcccactgattcacccactcaaccaacaactggatccttttgtccaggccctgttaccctttgttccgatctggagtcccactccaccgaagctgtcttgggcgatgccctggtggactttagtctgaaactttaccatgcatttagtgccatgaagaaggtggagacaaatatggctttctccccatttagcatcgcttctttactgacccaagttctcctgggggcaggggaaaataccaagaccaacctagagtctattttgtcttatccgaaggactttacctgtgtacatcaggctctgaaaggctttacaaccaagggcgttacctccgtttcccagatcttccactctcccgacttggctattcgggacacatttgtcaatgcctccagaacactatattcttctagcccccgtgtgctgtccaataacagtgatgcaaacctggaacttattaacacctgggttgccaagaataccaacaataagataagtaggctcctggactcccttccaagcgacacacggctagtcctactgaacgctatttacctgtccgcaaaatggaagaccacatttgatccaaagaagaccaggatggagcctttccattttaaaaactctgtgatcaaggtgcccatgatgaactctaagaagtatcccgtggctcactttattgatcagaccctgaaggctaaagtgggtcagctacagctgtctcataacctgagtctggtcattctagtcccacagaatctaaagcatcggttggaggacatggagcaagctctgtcaccatccgtgttcaaagccattatggaaaaattagagatgtccaagtttcagccaactctgctcactctgcctagaataaaggtcacaacaagccaggacatgctgagcatcatggaaaagctggagttctttgatttctcctatgatctgaacttatgcggtctgaccgaggatccagaccttcaagtttccgccatgcaacaccagacagttctagaactgactgagacaggtgtagaggccgctgcagcctcagccataagcgtggcccgcactctcctagtgtttgaagtgcaacagcctttcctctttgtgctttgggaccaacagcataagtttcccgtgttcatgggcagggtctacgatccaagggct

SEQ ID NO: 954 - DNA, 1500 bp, Artificial Sequence
  derived and/or modified sequence
atggcatctcgtctgactttgcttacgttgctgctcttacttctcgcaggagatcgtgcttcatcgaatcccaatgcaacgtctagcagctctcaggatccggaaagtctgcaagaccgtggtgagggaaaggttgcaaccactgttatttcgaagatgctgtttgttgaaccaatcttggaagtttcgtccttaccaactacaaactccactactaattcagctaccaaaataactgccaatacaacagacgaaccaacaacgcaacctacgacagaaccgactactcaaccaactattcaaccaacgcaaccaacgactcaattaccaaccgattccccaacgcaacctacaacgggatcattttgtccaggcccagttacgctgtgttccgacttggaatctcattcgacagaggccgttttgggtgatgcattagttgatttctccctaaaactatatcacgccttctcagcgatgaaaaaggttgaaaccaacatggcattcagtcctttctcaatagctagtctgttgactcaggtccttttaggagcaggtgagaacactaaaactaatcttgaatcaatcctgtcatacccaaaggattttacctgcgtgcaccaggcgctgaaaggatttactacaaagggagttacgtcagtctcacaaatttttcatagcccagatcttgccatacgggatacttttgtgaatgcatctcgtaccttgtacagttcttccccaagggttttgagtaataattcagacgctaatcttgaattaattaatacatgggtggctaaaaacacaaacaacaagatctcgcgattgctggactcattgccatccgataccagactggtccttctgaatgcaatatatctctcggcaaagtggaaaactaccttcgatccaaaaaaaacacgaatggaaccattccactttaaaaacagcgtcataaaagttccgatgatgaattcgaagaagtatccagtagcacacttcattgatcaaacactgaaagcaaaagtaggtcaattgcaactcagccataatttgtctctggtgattctggtcccacaaaatctgaaacacagattggaagatatggaacaggccttgtcaccgtccgtattcaaggccatcatggagaagctggaaatgtccaaatttcaaccgactctcctgacattgccacgtataaaggttacgactagccaagatatgctatcgataatggaaaagttagaattctttgattttagttacgatctaaacctgtgcggacttactgaagacccggatctgcaggtgtccgccatgcagcatcaaaccgttttagaattgactgaaacaggggtcgaggccgcagctgcatcagcgatttcagtcgcccgcactctcctagtatttgaggtgcagcagccattcctttttgttctgtgggatcaacagcacaaattcccggtgttcatgggccgtgtgtatgatccacgtgct

SEQ ID NO: 955 - DNA, 1500 bp, Artificial Sequence
  derived and/or modified sequence
atggcttcaagattaactttattaactcttttattattacttttagcaggtgatagagcatcaagtaatccaaatgcaactagttcatcatcacaagatccagaatctttacaggatcgaggagaaggaaaggttgccacaaccgtaattagtaagatgttatttgtagagccaatcttagaagtatcttcactcccaacaactaattcaacaactaattcagctacaaaaattactgcaaatactacagatgaaccaacaacacaaccaactactgaaccaacaactcaaccaactatacaaccaactcaaccaacaacacaattacctactgatagtccaacacaaccaacgactggttcattttgtccaggtcctgtcactttatgtagtgatttagaatcacattcaacagaggctgttttaggagatgcattagttgatttttcattaaaattatatcacgcattcagtgctatgaagaaagtagaaactaatatggctttctctccattttcaattgcatcattattaactcaagtacttttaggagcaggtgaaaatactaagactaatttagaaagtattctttcatatccaaaggattttacatgtgtacatcaggctttaaaaggtttcacaacaaaaggagtaacatcagtcagtcagatttttcattctcctgatttagctattagagatacatttgttaatgcaagtagaactctttattcttcttcaccaagagttctttcaaataattcagatgctaatttggaattgattaatacttgggttgctaaaaatactaacaataagatttcaagattacttgattcattaccatctgatactcgtcttgtcttgttaaacgctatatatttaagtgcaaaatggaaaactacatttgacccaaaaaaaacaagaatggaaccttttcattttaaaaattcagtaattaaagttcctatgatgaactcaaaaaaatatccagttgcacattttattgaccaaacacttaaggccaaggttggacaattacaattatcacataatttatcacttgttattttagttccacaaaatttaaaacatagacttgaagatatggagcaagctctttcaccttctgtttttaaggctataatggaaaaattggaaatgagtaaattccaaccaacacttttaacattacctaggataaaggtaacaacttcacaagatatgttatcaattatggaaaaacttgaattctttgacttttcatatgatttgaacctttgcggattaactgaggacccagatttacaggtgtctgcaatgcaacaccaaacagttcttgaattaacagaaactggagttgaagcagccgcagcatctgcaatttcagttgcaagaactttacttgtttttgaagtacaacaaccatttttatttgtattatgggaccaacaacataagttcccagtatttatgggtagagtctatgatccaagagct

SEQ ID NO: 956 - DNA, 1500 bp, Artificial Sequence
  derived and/or modified sequence
atggcgtcccgtctgaccctgctgacccttctcctcctgctgctcgcgggcgaccgtgcttcctctaaccctaacgcgaccagctcctcctctcaggatccagagtccctgcaagaccgcggtgagggaaaggtagcgactacggttatctctaagatgctattcgtggagccgatcctggaggtttcttcgttgcccactaccaactccacgacgaactctgcgacaaaaataacggccaatactacggacgagcccacaacccagcccacaactgagcccaccacgcagcccacaatccagccgacccaacccacaacgcagctccccacggactcccctactcaacccactacaggatccttctgcccgggcccggttaccctctgttccgacttggaatcccactccaccgaggctgtcctcggcgacgccttggtggatttttccctcaagctctatcatgctttcagcgctatgaagaaggtcgaaactaacatggcattctcgccgttctctatcgcgagtctcctgacccaggtcttgctgggtgccggtgagaacactaagaccaacctcgagagcatcctctcttaccccaaggactttacatgtgtccaccaggcactgaaaggcttcactaccaagggtgttacctccgtgtcgcaaattttccactccccggacctcgcaatccgggatacttttgtaaacgccagtcggacgctgtactcctcctccccccgtgtcctcagcaataactctgacgccaatctcgagctcattaacacctgggtcgctaagaacaccaacaataagatttcccgcttgctcgactccctgccctccgatactcgcttggtcctcctgaacgcaatctacctgtccgcgaagtggaagacaaccttcgatcccaaaaaaacccgtatggaaccctttcacttcaagaattccgtaatcaaggtccctatgatgaacagcaagaagtatcccgtagcccactttatcgaccagacgctcaaagcgaaggtgggccagctgcaattgtcgcataacttgtcgctcgtcatcttggtcccccaaaatctcaagcaccgtctcgaagacatggaacaggccctctcccccagtgtgtttaaggcgatcatggagaagctggagatgagcaagtttcagccgacattgcttacccttccacgcattaaggtgacaacttcccaagacatgctgtcaatcatggagaaactcgagttctttgacttcagttacgacttgaatctgtgcggtctgactgaggatcccgacctgcaggtcagtgcaatgcagcaccaaacggttctggaactcaccgagacgggagtggaagccgcagccgcgtccgccatctcagtcgcccgtactctgctcgtcttcgaagttcagcaacctttcctgtttgttctctgggaccaacagcacaagtttccggtcttcatggggcgtgtgtacgatccgcgagcc

SEQ ID NO: 957 - DNA, 1500 bp, Artificial Sequence
  derived and/or modified sequence
atggctagtcggctgacactattgacccttttactgttgctgttggccggcgacagggcgtctagtaatcctaatgcaaccagttcatcaagccaagaccctgagtccctgcaggacaggggagagggcaaagtggctacgactgtgattagcaagatgctgtttgtggagcccatcctagaagtcagctccctcccgaccaccaattctacaactaactctgctacgaagatcaccgcaaacaccaccgatgaaccaaccacccaaccgacaacagagccaacaacacaaccaacaattcagccaacccagcccacaacacagctccctacagacagccccactcagccaaccaccgggtccttttgcccaggcccagtgacactttgctctgacctggaatctcactcaaccgaggccgtactcggtgatgcacttgtcgacttttctctcaagctgtaccacgctttttcggctatgaagaaagttgaaaccaatatggcatttagccctttcagcatagcttctctgctgacgcaggtactgcttggtgccggagagaatactaaaaccaatctcgaatctatcctctcatatcctaaggactttacctgtgtccatcaagccttgaaaggatttactactaaaggggtgaccagcgtgtctcaaatctttcactccccggacctggccatcagagatacatttgtcaatgcctcccggaccctgtactcatcaagccctcgagtactgagcaataacagcgacgccaacctggagctgataaatacctgggtcgctaagaacaccaataataagatatcccgactgctggactcattgccatccgacaccaggcttgtattgctcaatgccatctatctgtccgccaagtggaaaaccacctttgaccccaagaaaacccgcatggagcccttccacttcaaaaatagtgtaattaaggtgcccatgatgaattctaagaagtatccagtggctcacttcatagatcagactttgaaagccaaagttggtcagttgcagctaagtcacaatctctccctcgttatcctggtgcctcaaaacctgaaacacaggttggaagacatggagcaagcgctgtctccgtctgtgttcaaagccatcatggaaaagctcgaaatgagcaaatttcagccgacccttttgaccctgcccaggattaaggtaaccaccagtcaggatatgctgtctattatggagaaactggagtttttcgatttcagttatgatctgaacctgtgcgggctcacagaggaccccgaccttcaggtgagcgccatgcagcaccagacggtcctcgaactgactgagaccggggtggaagcggccgcggcatcagccatatccgttgctcgaacactcctggtgtttgaagtccaacaaccctttttgttcgtgctatgggatcaacagcacaagttcccagtcttcatgggccgtgtctacgatccccgagct

SEQ ID NO: 958 - DNA, 1500 bp, Artificial Sequence
  derived and/or modified sequence
atggccagcaggctgactttgctgactctgctgctcctattgcttgccggcgatcgtgcaagttcaaatcccaatgctacctcatcttcctcccaggaccctgagtcgttgcaggacagaggggaaggcaaggtcgccacaaccgttatttcaaagatgctcttcgtggagcccatcttggaagtgtcctcattgccaaccacaaacagtaccaccaattcagctactaagatcactgcaaataccaccgatgagccgacaacacagccaaccaccgaacccaccacacaacctactattcagcctacccaacccaccacgcagctgcccacagatagtccaactcagcctaccactgggtccttctgcccaggccctgtcacactctgctccgatctggaatcccactctaccgaggccgtgctgggagatgctctggttgacttctccttgaagctctatcacgctttttcagccatgaagaaggtggaaaccaacatggctttctctcctttcagcatcgctagtctgctgacacaggtgctattgggagcaggagagaataccaagacaaacctggaaagcatcttgtcttatccaaaagatttcacgtgcgtccatcaggccctgaaaggttttacaactaagggtgtgacatcagtaagccaaatcttccactcccctgatctggccatccgcgataccttcgtcaatgcctcacgcactctatattctagctctccaagggttctgtccaataattctgacgccaacctggagctgattaacacctgggtggccaaaaatactaataataagatctcccgccttctggatagtctgccctcagatacaaggctggtgctccttaacgctatttatctgagcgctaagtggaagacaactttcgaccctaagaagacccggatggagccatttcatttcaagaatagcgtgatcaaggtgcccatgatgaactcaaaaaaatatccagtcgctcacttcatcgatcagacgctgaaggctaaagttggacagctgcagttatctcacaaccttagcttagttatcctggtaccacagaacttgaaacatcgtctcgaagacatggaacaggccctctctccgtccgtgtttaaagccattatggagaaactggagatgtctaagttccaaccaaccctattaaccttgcctcggatcaaggtcacgacctcgcaggacatgctgtcaattatggagaagctggaatttttcgatttttcatatgacctgaacctgtgcggactaacagaggatccggatctgcaagtgagcgccatgcagcaccagactgtattggaactcacagagaccggcgtggaagccgcagctgcatcagcgatcagcgtcgcccgaacgctactcgtgtttgaggtccagcagcccttcctgtttgtcctgtgggaccaacagcataaatttcctgtgttcatgggtcgggtgtatgacccccgcgct

SEQ ID NO: 959 - DNA, 1500 bp, Artificial Sequence
  derived and/or modified sequence
atggccagccgcctgaccttgctgacattgctcttactcctgctggccggagaccgagcaagctcgaacccaaatgccacttcttcttcctcccaagacccagagagtttacaggatagaggggaaggcaaggttgcaacaacagtgataagtaaaatgctgttcgtagagcctatccttgaagtatcaagcctgcccactacgaattctaccaccaatagtgccaccaagattactgccaacaccaccgatgaacctacaactcaacctaccacggagccaaccacccaacctacaatacagccaacccagcccacgacgcagcttccgacagatagtccaacccagccaaccaccggttccttttgtcccgggcctgtgacattgtgtagcgacctagagagccactctacggaagctgtgctgggagatgccctagtcgatttctccctgaaactgtaccacgcatttagtgccatgaagaaggtagagactaacatggccttttctccatttagtatcgcttccctcttgacgcaagtcctgctcggagccggcgaaaacactaaaacaaacctggaaagcatcttgagttatcccaaggatttcacatgtgtacaccaggcactcaagggcttcactaccaaaggagtgacttccgtgtctcaaattttccattcaccagatctagctatcagggacactttcgtcaatgcctcccgaactctgtactcctctagtcctagggtgctctcaaataactcagatgctaacctcgaacttattaacacttgggtggctaaaaatactaacaataaaatctctcgactgctggattctttgcccagcgacaccaggctagtgctgctgaacgctatctacctgagcgcaaagtggaagactactttcgacccgaagaaaacgaggatggagccattccacttcaagaatagcgtcattaaagtacccatgatgaactctaagaagtaccccgtggcccacttcattgatcagaccttgaaggccaaagtgggtcagctgcagctatctcacaacctctcgctggttatcctagtgccccagaatctcaagcaccgactcgaagacatggaacaagctctgagtccctccgtgtttaaggccatcatggagaagctggagatgagtaagtttcagcccacgctgcttaccctgcctcgcatcaaggtcaccacttctcaggacatgctgtctatcatggaaaagttggaattctttgacttcagctacgatctaaacctctgcggactcacggaagacccagacctccaggtgtcagccatgcagcaccagaccgttctggaactgactgaaactggagtcgaagcggctgccgcctccgccattagcgtagcaagaacactcctggtttttgaagtgcagcaaccctttctgttcgtgctgtgggatcaacaacacaagtttcctgtgtttatgggtagggtgtacgacccaagggcc

SEQ ID NO: 960 - DNA, 1500 bp, Artificial Sequence
  derived and/or modified sequence
atggcgtcccgtctgactcttctcaccttgcttctgctgctgctggcaggtgaccgggcgagtagcaacccgaacgccacgagtagtagttctcaggatccggaaagcctccaggaccgcggcgagggtaaagtcgccactaccgttatttccaagatgctgtttgtggagccgatcctggaagtgtctagtctcccaactaccaatagcaccacgaacagcgccacgaagatcacggccaataccactgacgaaccgacgacacagcctaccacggaaccgactacccaaccgactatccagcccacgcaacctactactcaactgccgaccgatagccctacgcagcccaccacgggtagcttctgtccagggcctgttactttgtgttccgacctggaaagccacagtacagaagcggtgctaggtgatgcgttagtggattttagcctgaagttgtaccacgcattcagcgccatgaaaaaagtggaaaccaacatggcattctcccctttcagcatagctagcttgctcactcaggtgctgctgggagcgggagaaaacactaagacgaatctggagagcatcttgtcttatcctaaggattttacctgcgtccatcaggccctcaagggttttacaaccaagggtgtcaccagcgttagccagatcttccattccccagatcttgcgattcgcgacacgtttgttaacgcctcacgcactctctattcctcctctcctcgcgtgctgagcaataattctgacgcaaatctggagctgattaatacctgggttgctaagaacaccaacaataagatttctaggctgctggactccttgccgtccgacacgcgcctcgtactgctgaacgcgatctatctgagcgctaagtggaagacaaccttcgacccgaaaaaaacgcgcatggaaccattccacttcaaaaacagcgtgattaaggtgcctatgatgaattccaagaaatacccagtggcgcactttattgaccagactctgaaggcaaaagtgggccaactgcaactctcgcacaatctgagtctggtcatcctggtgccacagaatctgaagcaccgcttggaggatatggagcaggctctgagtccgagcgtattcaaggccatcatggagaagttggaaatgagcaagttccaacctactctgttgaccctgccaagaatcaaagtcacgacttcccaagacatgcttagcatcatggaaaagcttgagttttttgacttcagctacgatctgaacctctgtggtctgacagaggatcccgatcttcaagtttccgccatgcaacatcagacggtcctcgagctcacggagacgggtgttgaggcggcagcggcctcagcgatcagcgtggcacgtactctgctcgtctttgaggtccaacagccatttctgttcgttttgtgggatcagcagcacaagttcccggtttttatgggtcgggtgtacgatcctcgggcg

SEQ ID NO: 961 - DNA, 1500 bp, Artificial Sequence
  derived and/or modified sequence
atggcatcgcgcctgaccctgctcactctgctccttctgctcctggcaggagacagagcgtcctcgaatccaaacgcgaccagctcttcctcccaagacccggaatcgctgcaagatcgcggagagggaaaggtggctacgactgtgatctccaagatgctgttcgtggagcctatcctggaagtgtcgagcctccctaccactaactcgaccaccaactccgctaccaagattacggccaacaccactgacgagcctacgactcaaccaaccactgaaccaactacccagccgacgatccagcccacccaacccaccacccagctgccgaccgacagcccgactcagccgactactggatccttctgcccgggcccagtgaccctctgctccgatttggaatcacactcaaccgaagccgtattgggcgatgcactcgtggatttttccctgaaactgtaccacgccttcagtgcgatgaagaaagtggagactaacatggctttcagcccattctcgatcgcctccctcctgacccaggtgttgctgggtgctggggagaatactaagactaacctggaaagcatcctctcgtacccgaaggacttcacctgtgtgcaccaggccctgaagggctttactactaaaggagtgacctcagtctcacagatttttcattcacctgacctggccatccgggacacctttgtcaatgcgtcaagaactctgtacagcagctctccgagagtcctctcgaacaactcggacgctaatcttgaactgatcaacacttgggtggcgaagaacaccaataataaaatttcccgactcctggattcactcccgagcgataccaggctcgtgctcctgaacgcaatctatctgtcagcgaagtggaaaactaccttcgacccgaagaaaacgcgcatggagcctttccattttaagaattcggtcatcaaggtgccgatgatgaactcgaagaagtacccggtggcgcattttatcgaccaaacgcttaaggccaaagtgggacaactgcagctttcccacaacttgtcactcgtcatcttggtgccgcagaacctgaagcatcggctcgaagatatggagcaggccctgtctccctcggtgttcaaggcaattatggaaaaacttgagatgtccaaattccaacccacgctccttaccctgccacgcatcaaggtcactacttcccaggatatgctgtccatcatggagaagctggaattcttcgatttctcgtacgacctgaatttgtgcggactgaccgaggacccagacctccaggtgagcgccatgcagcaccagactgttctcgagcttaccgaaaccggtgtcgaagccgccgcagctagcgccatctcggtcgccaggactctgttggtgttcgaagtgcaacaaccgttcctgttcgttctgtgggatcagcagcacaagttcccagtctttatggggcgggtctacgaccctcgggcg

SEQ ID NO: 962 - DNA, 1500 bp, Artificial Sequence
  derived and/or modified sequence
atggcgtcgcgtttaacgttattaacgttattactattattattagcgggtgatcgtgcgtcgtcgaatccgaatgcgacgtcgtcgtcgtcgcaagatccggaatcgctacaagatcgaggtgaaggtaaagtagcgacgacggtaatatcgaaaatgctatttgttgaaccgatactagaagtttcgtcgctaccgacgacgaattcgacgacgaattcggcgacgaaaataacggcgaatacgacggatgaaccgacgacgcaaccgacgacggaaccgacgacgcaaccgacgatacaaccgacgcaaccgacgacgcaactaccgacggattcgccgacgcaaccgacgacgggttcgttttgtccgggtccggtaacgctatgttcggatttagaatcgcattcgacggaagcggtactaggtgatgcgttagttgatttttcgctaaaactatatcatgcgttttcggcgatgaaaaaagttgaaacgaatatggcgttttcgccgttttcgatagcgtcgctattaacgcaagttctattaggtgcgggtgaaaatacgaaaacgaatttagaatcgatattatcgtatccgaaagattttacgtgtgtacatcaagcgctaaaaggttttacgacgaaaggtgttacgtcggtatcgcaaatatttcattcgccggatctagcgatacgagatacgtttgtaaatgcgtcgcgaacgttatattcgtcgtcgccgcgtgttctatcgaataattcggatgcgaatttagaactaataaatacgtgggttgcgaaaaatacgaataataaaatatcgcgtttattagattcgctaccgtcggatacgcgtctagttctattaaatgcgatatatttatcggcgaaatggaaaacgacgtttgatccgaaaaaaacgcgtatggaaccgtttcattttaaaaattcggtaataaaagttccgatgatgaattcgaaaaaatatccggtagcgcattttatagatcaaacgctaaaagcgaaagtaggtcaattacaattatcgcataatttatcgttagttatactagtaccgcaaaatttaaaacatcgtttagaagatatggaacaagcgttatcgccgtcggtttttaaagcgataatggaaaaattagaaatgtcgaaatttcaaccgacgctactaacgctaccgcgaataaaagtaacgacgtcgcaagatatgttatcgataatggaaaaattagaattttttgatttttcgtatgatttaaatttatgtggtctaacggaagatccggatttacaagtatcggcgatgcaacatcaaacggtattagaattaacggaaacgggtgttgaagcggcggcggcgtcggcgatatcggttgcgcgtacgctattagtttttgaagtacaacaaccgtttttatttgtactatgggatcaacaacataaatttccggtttttatgggtcgagtatatgatccgcgagcg

SEQ ID NO: 963 - DNA, 1500 bp, Artificial Sequence
  derived and/or modified sequence
atggcttccagattaacactgctcactctgctattgctgctcttggcaggcgatagagccagctccaatccaaatgcaacttcctctagttctcaggacccagagtctcttcaggatcggggggagggcaaagtggctactacagtgataagcaaaatgttgttcgtggagccaatcttggaagtgagttccttgcccactactaatagcacaacaaactctgctacaaagatcaccgcaaacaccactgacgagcctaccacacaacctaccaccgagcctactacacagcctaccatacagcccacccaacccaccacccagctccctacggattcgccaacccagcctaccacaggaagcttttgtcccggccctgtcacactctgttctgacttggagagtcatagtacggaagcagtgcttggcgatgctctcgtagatttttcacttaagctttatcacgccttctccgccatgaagaaagtcgaaaccaatatggctttcagtcccttttccattgcttctctgctgacgcaagttttgctgggggctggagaaaatactaaaactaatctggagagtattctcagctaccccaaagatttcacatgtgttcatcaggccttgaaaggatttaccacaaagggggttacaagtgtcagtcaaatatttcattcccccgacctcgcaataagggacacatttgtcaatgcaagccgcacactgtactcctcatcaccacgtgtgctctctaacaatagcgatgctaacctcgagctgataaatacatgggtggccaaaaatacaaacaacaagatttccaggctcctagattctttgccaagtgacacgcggctggttctcctgaacgccatttacttgagcgcgaaatggaaaacgacattcgatccaaagaagacgcgaatggagccttttcactttaaaaatagcgtgattaaagtgcctatgatgaactctaagaagtacccagtcgctcatttcattgaccaaacccttaaggccaaagttgggcagctgcagcttagccacaacttatccctggtgatcctagtgcctcagaacctgaagcaccggctggaagacatggaacaggccctgtccccttccgtttttaaggcaatcatggaaaaactagagatgagtaagtttcaacccaccctgctaacacttcctcggatcaaagtgactaccagtcaggacatgctgagtatcatggaaaaattagagtttttcgatttctcatacgatctgaatctctgtgggttgaccgaggatccagatctccaggtgtccgccatgcagcaccagactgttctcgagctgaccgaaacgggagtggaggccgcagccgcctctgcgatctccgttgctcgcactctactggttttcgaggtgcagcagcccttcctcttcgtgctctgggaccagcagcacaagtttcctgtgttcatgggccgcgtgtacgaccccagagcc

SEQ ID NO: 964 - DNA, 1500 bp, Artificial Sequence
  derived and/or modified sequence
atggccagccgattgactcttttgacgttactgctgctgctcttagcaggcgaccgggcgagcagcaatccgaatgccacaagttcatccagccaggatccagaaagcttgcaagacaggggggagggtaaagttgctactacagtgatctctaaaatgctgttcgtagaacccatccttgaggttagttctctgccgaccaccaattccaccacaaatagcgccaccaagataaccgccaatacaacagacgaacctaccacccagcccacaacggagcccaccactcaacctaccattcaacccacccagccaaccacacaactgcccactgactcccccacccagcctaccaccgggagcttttgcccaggccccgtgacactttgttctgatctggaatcccacagtacagaggcggttctgggggacgccctggtcgacttctctctgaaactctaccacgcctttagtgcaatgaaaaaggtagagacgaacatggcattttctccgtttagcatcgctagcttgctgacccaggtgctgctcggagcgggcgagaacacaaagacaaatctcgagagtatcttgtcctatccaaaagactttacatgcgtgcaccaggcactgaagggattcactacaaaaggcgtgacatctgtatctcaaatttttcacagcccagatctggcaatccgggatacatttgtgaatgcttcacggacactatatagtagctctccccgggtgctttccaacaattcagacgctaatcttgagctcatcaatacttgggtggccaaaaacaccaacaacaaaatcagtcgcctcttggacagtctgccatccgatacccggctggtactgctcaatgccatctacctctcagcgaaatggaagacaaccttcgacccgaagaagaccagaatggagcctttccacttcaaaaactctgtgattaaggtccccatgatgaattcaaaaaagtatccagtggcacactttatagaccagacccttaaagccaaggttgggcaactgcagctgtctcataacctctccctggtgattttggtgccgcagaacctgaagcaccggctggaagatatggagcaggctctgtctccttccgtgtttaaagctattatggagaaactggagatgagcaagtttcagcctactctactgacactcccgagaatcaaagtgaccacaagtcaggacatgttgtcaatcatggaaaaactggaattcttcgactttagctatgacctgaacctgtgcggccttaccgaagaccctgaccttcaggttagcgccatgcagcatcaaactgtcctggaactgactgagactggagttgaggcagcagctgcctctgctattagtgtggcaagaacactccttgtgttcgaggtccaacagcctttcctgttcgtgctttgggaccaacagcataagttcccggttttcatgggaagggtgtatgatccacgggcc

SEQ ID NO: 965 - DNA, 1500 bp, Artificial Sequence
  derived and/or modified sequence
atggcaagtcgcttgacactgttaacactgttgcttctcctactggccggcgaccgcgcctcgtcgaatccaaacgccacgagctcttcttcccaggaccccgagtctctgcaagaccggggagaggggaaggtcgccaccaccgtgatcagcaaaatgctcttcgtggagccaattttggaggtgtccagcctgccgaccaccaactcaactacgaattccgctacgaagatcacagccaacaccaccgacgaacccaccacccagcccacgacagagccgactacccagccaacaatccagcccacacagccgacgactcagttaccgacagattcccccacgcagcctaccaccggcagtttttgcccaggacctgtgacgctgtgctctgacctggaaagccatagcacagaagctgtgctgggagatgccctcgtggatttctctttgaagctgtatcatgccttttccgccatgaaaaaagttgagaccaacatggctttctccccttttagtatcgcgagcctgctgactcaggtgctgctgggagcgggagagaataccaagacaaatctggaatccatcctatcctatccgaaagacttcacatgtgtccatcaagctctgaaaggctttacgactaagggagtcacgtccgtcagtcagatttttcacagccccgacctcgccattcgcgatacctttgtcaacgcttcgcgcacattatactcatccagtccccgggtactgagtaataactctgacgccaatcttgaactcataaatacttgggtggccaagaataccaacaacaaaatcagccgtcttttggactccctgccgtcggatactagactcgtgctcctgaacgccatttacctgagtgctaaatggaagacgacctttgaccccaagaagacacgcatggaaccattccacttcaagaactctgtgataaaggtgcccatgatgaactccaagaagtatccggttgctcactttatcgatcaaaccctgaaggcgaaagtgggacaattgcagctgagtcacaacctgtcgcttgtgattctggtgccccagaatctgaagcatcgcctggaggacatggaacaagccttgtccccctccgtgtttaaggccattatggagaagctggaaatgagtaaatttcagccgactcttcttactttacccaggattaaagtcaccacctcacaggatatgctgtccattatggaaaagctggaattttttgacttcagttacgaccttaacctttgcggcttgaccgaggatccggatctgcaagtaagcgccatgcagcaccaaacggtgctggagctgacggagactggagtggaagcagctgccgccagtgctattagcgttgcgagaacactgctggtgtttgaggtgcagcagccgtttctgttcgtgctgtgggatcagcagcacaagtttcccgtttttatgggacgtgtctatgatccaagggcc

SEQ ID NO: 966 - DNA, 1500 bp, Artificial Sequence
  derived and/or modified sequence
atggctagccgtctgactctcctcacattactcctattactcctggctggagaccgggcatctagcaaccccaacgctacgagtagctcgtcccaggatccagaatcactacaggaccgaggagagggcaaggtggccactaccgtgattagcaaaatgctcttcgtggagcccatcttggaggtgtcgtccctacctactacaaattcgaccacaaattctgcgactaagatcacggccaataccacggatgagccgacgacacaacccacgactgaacctaccacgcaacctaccattcagcccacacagcccacgacccagcttcctaccgacagccctactcagcccaccactgggtccttctgtccaggtccagtcaccttgtgttccgatctggaaagtcactccacagaggcagtcctgggggatgcactcgtggacttttcactgaaactgtatcacgccttttcagcgatgaagaaagttgaaactaatatggcgttttcacccttttcaatcgcttccctgctcacccaagtgcttttgggcgcgggggaaaacacaaagaccaacctcgaaagcattctgtcttatcccaaggattttacttgtgtccaccaggccttaaagggatttacgactaagggagttacctccgtatcccagatcttccattcaccagacctggcaatccgcgataccttcgtgaacgcgtcccgcacactgtactcatccagcccacgcgtcctgagcaataatagcgatgcgaatctggagctgattaatacctgggtggcaaaaaataccaataacaaaatttccagacttctagattcactgccaagtgatacacgcctggtgcttcttaacgctatttatttaagcgcaaaatggaaaactacatttgacccgaaaaaaactagaatggaacctttccacttcaagaacagcgtgatcaaagtccctatgatgaactccaaaaaataccccgtggcacacttcatagaccagacgctgaaggcgaaggtcgggcaactccaactcagccacaatctctctttagtcatcctcgtgccacagaatctgaagcacagattggaggatatggagcaggcgttgtctccgtctgtgtttaaggcaataatggaaaagctggagatgagtaagtttcagccgacactactaaccctcccgaggatcaaagttacgacaagtcaggatatgctgagcatcatggaaaagctcgaattcttcgatttttcctacgacctaaacttatgcgggttgacggaagatcctgacctacaagtctcagcaatgcagcatcagacggttcttgagctgactgaaactggagtcgaggccgcagccgcatcagcaatctctgtggcgcgcacccttctggtctttgaagtccagcaacctttcttgtttgtgctctgggatcaacaacacaaattcccagtcttcatgggccgggtctacgatccaagagcc

SEQ ID NO: 967 - DNA, 1500 bp, Artificial Sequence
  derived and/or modified sequence
atggcttccaggctcacattacttaccctcctactcttgctgctagcgggcgaccgagcctcgtccaatcctaatgccacttcttccagcagccaggatcccgaaagcctccaagatcggggggaaggaaaggtggcaaccacagtgattagcaaaatgctttttgtcgagcctattctagaggtgagctccctgcccaccacaaattcgactaccaacagcgctaccaagatcactgccaatactacagatgaacctactacccagccgactactgagcccaccactcagccaaccatccagcctacacaaccgaccacacaactgccgacggattcaccgacacaaccgacaacgggttccttttgccctggccccgtgaccctgtgctctgacctggaaagtcattctacagaagccgtactgggagacgctctggtcgacttctctctgaagctgtatcatgcattctccgccatgaaaaaggtggagactaacatggctttttccccattttccatcgcctctttgctgactcaagtcctgctgggagccggtgagaacacgaaaactaatctggagtctatcctaagctaccccaaagacttcacgtgcgtccatcaggctctgaaaggattcacaacgaagggcgtgacttctgtgtcacagatatttcattctccagacctggcgatccgggatacctttgtaaatgcgtcccgaacactctactcctcgtcaccccgggtgctttctaacaacagcgatgcgaacctagagctgataaatacgtgggtcgctaagaatacaaataataaaatctcccggctgttagattcacttccatccgatacgcgacttgtcctgttgaacgccatctatctttccgcaaagtggaaaacaaccttcgaccccaagaaaacccgcatggaaccatttcatttcaaaaacagtgttatcaaagtgcccatgatgaattctaaaaaatatccggtggctcatttcatcgatcagacactcaaggccaaagttggtcaattacaactgtcacacaacctgagtctggtgattcttgtgccgcagaacctgaaacaccgcctggaagatatggaacaggccctgtcgcctagtgtctttaaagctattatggaaaaactggaaatgtccaaatttcagcctactctcctgacactcccgcgaataaaggtaaccacaagccaggacatgctgagcataatggaaaaactagaattctttgacttctcctatgatctcaacctctgtggcctgacagaagatcctgaccttcaggtttccgccatgcagcaccagacggttctcgagctgacagaaacaggggtcgaagccgccgcagcatctgccatcagcgtggcaagaacgttgctggtttttgaggtgcagcagcctttcctgtttgtactgtgggatcagcagcacaaatttccggtctttatggggcgggtgtatgatccacgcgct

SEQ ID NO: 968 - DNA, 1500 bp, Artificial Sequence
  derived and/or modified sequence
atggcgtcccggttaaccttgctaactctgctgctgctgcttcttgcaggagatagggccagctctaatccaaatgcgactagctcgtccagccaggacccagaatcgttgcaggaccgaggggaggggaaggtggcaaccaccgtcataagcaagatgctctttgtggaacctattctggaggtatcttcacttcctacaactaacagtactactaactccgcaactaagatcaccgcaaacacaaccgacgaaccgactacccagcccactaccgagcctacgactcagcctacaatccagcccactcagccaaccacccagcttcccaccgactccccaactcaacctacaaccggctctttttgcccgggccctgtgactctgtgttcagatctggagagccactccacagaggctgttctcggtgatgctcttgtggacttcagccttaagctttaccacgcattcagcgccatgaagaaggttgagacaaacatggcctttagtcccttcagcatcgccagcctgttgactcaggttttactgggggccggtgagaatactaagacgaacttagagtccatcctgtcatatccaaaagactttacttgtgtgcaccaggccctgaagggttttactactaaaggggtgacatccgtaagccagatctttcacagccctgacttggccatcagagacacgtttgtgaacgcttcacggaccctgtacagctcaagcccacgtgtgcttagcaacaatagtgatgcaaatctggagctgattaacacctgggtggctaagaacactaacaataaaatctcacgacttctggactccctgcctagcgacaccaggcttgtcctgctgaacgccatctatttatccgcgaaatggaagactacatttgatccaaagaaaacacggatggagcctttccattttaagaattctgtcatcaaggttcctatgatgaactcaaagaagtatccggtcgcgcacttcattgatcagactctgaaggcgaaggtcggccagctgcaattgtcacacaacttatctcttgtgattctcgttccccaaaatcttaagcatagactggaagatatggaacaggccttgtcaccttcagtgttcaaggccatcatggagaagttagaaatgtccaaattccagcctacactcctgaccctcccaagaatcaaagtgacaacatcacaggatatgttatcgattatggagaaactggagtttttcgacttcagttatgatctgaatttgtgcggcctaaccgaggatcccgacttacaggttagtgccatgcaacaccagacagtcctagagctgacggagacaggggtggaggccgccgcggcgtccgccatatcagtcgctcggaccctgctggtgttcgaagtgcagcagcctttcctgtttgtcctgtgggaccagcagcacaagtttcccgttttcatgggacgggtgtacgacccgcgtgcc

SEQ ID NO: 969 - DNA, 1500 bp, Artificial Sequence
  derived and/or modified sequence
atggcctcgaggctgaccttgttaacactcctgctgcttctattggcaggggatagagcaagttccaaccccaatgccactagttcctcttcgcaggatcccgagtcactgcaggaccgtggagagggcaaagttgcaacaacagtcatctctaagatgttgtttgtggagccaatactggaggtgtcatcgttgcctaccaccaattctaccacaaattccgctactaagatcacagcgaataccaccgacgaacctactacccaacccacaacagagcctacaacccagccgaccatacagccaacacagcccaccactcagctgcccaccgattcgcctactcaaccaactacaggaagtttttgtcccgggccagtaaccctctgttcagatttggagagccactcaaccgaagccgtgctcggcgatgccctggtggacttctcccttaagctctaccatgccttcagcgccatgaagaaggtggagactaatatggcattcagcccgttctccattgcttctctcttgacccaggttctgttgggagccggcgagaatactaagacaaacttggagtctatactatcataccctaaggactttacatgtgtgcatcaggctctgaaagggttcactactaaaggggtaacctctgtgagccagatctttcatagtcctgatttagccatcagggacaccttcgtaaatgcgtcacgcacattgtacagctcctctccgcgcgtgctgagtaataatagtgacgccaacctggagctgattaatacttgggtggccaagaacacaaacaataagatctctcggcttctggattccctgccttccgatacgcggctggttttgctgaatgccatttatctttcagctaagtggaagactactttcgatcccaaaaaaacacgtatggaacccttccattttaagaactctgtaattaaagtgccaatgatgaattcgaagaaatatccagtcgcgcatttcatcgaccagacgctgaaggccaaggtgggacagcttcagctttcacacaacctctcgttggtgatcctggttccacagaaccttaaacataggctggaggacatggaacaggccctgagcccatccgtgtttaaggcgattatggagaagttggaaatgtccaagtttcagcctacgttgctgacacttccacgcattaaggtaaccaccagccaggatatgctgagcattatggaaaagcttgaatttttcgattttagctatgatctgaatctgtgtgggctgacagaagaccctgatttgcaagtttcggcgatgcagcatcagacggtactggagctcacggagactggggtggaagctgctgcagctagtgctatctctgtggcacgtactctcctggtgtttgaagtgcagcaacccttcctgtttgtgctgtgggatcagcagcataaattccctgtgtttatgggccgcgtttatgatccacgcgcc

SEQ ID NO: 970 - DNA, 1500 bp, Artificial Sequence
  derived and/or modified sequence
atggcaagcagactgactttactaacactgctcctccttttactggcaggagatcgtgcaagttccaaccctaatgcgacatccagctcgtctcaggacccagagtccctccaggacaggggggaaggaaaggttgcgaccacagtgatcagcaagatgcttttcgtcgaaccaatcttggaggtgtcttcacttccgaccactaactctaccactaatagcgctaccaaaattaccgccaacactacggacgaacctacaacacagccaaccacagaacccaccacccagccaacaatccagccaacgcagcccacgactcagctgcccacagacagccccacgcaacccacaaccgggtctttctgcccagggccagtgactttatgcagcgacctcgagtcccattctacggaggctgtgctcggggatgcactagtcgacttcagcctgaagctgtatcatgccttttccgcgatgaaaaaggtggaaacaaacatggccttttcgccgtttagtattgcctcgctattgactcaagtgctcttgggggcgggtgaaaacaccaagaccaatcttgagtccattctgtcgtatccaaaggacttcacctgtgtgcatcaggccttaaaaggttttacgacaaaaggtgtgacgagcgtgagtcagattttccattcgcctgacttggccattagggacacctttgtgaatgcgtcccgcactctgtatagttcctccccccgagtactgtctaataatagtgacgcaaatctggagctcatcaatacatgggtggctaagaacactaataataagataagtcggctgctagattcccttccctccgataccagactcgtgctcctcaatgcaatctacttgagtgctaaatggaaaactacattcgacccaaagaagacacggatggagccatttcacttcaaaaacagcgtgatcaaagttccgatgatgaatagtaagaagtacccagtggcacacttcatcgatcagaccctgaaggcgaaggtcggacaactgcagctttctcacaaccttagcctcgttatcttggtgcctcagaacctcaagcacaggctggaggatatggagcaagccttgagtccgagcgtgtttaaggcgataatggagaaactggagatgtctaagtttcagccaacactgttgaccctgccaagaatcaaagtcaccacttcacaggatatgctgtcgatcatggagaaattagaattttttgacttctcatatgacctgaatctctgtggactcacagaggaccctgacctacaagtgagtgctatgcagcaccagacagtcctcgagcttacagagacgggggttgaggcagcagctgctagcgccatctccgtagcacgtactctcctggtgtttgaggtgcaacaaccattcctgttcgttttgtgggatcagcagcataaattccccgtattcatgggacgtgtgtacgaccctagagcc

SEQ ID NO: 971 - DNA, 1500 bp, Artificial Sequence
  derived and/or modified sequence
atggcctcccgcctgacgctgttgaccttgctcctactgctacttgccggcgatagagcttcatctaatcccaatgcgacttcatcttcttctcaggaccctgagtctctgcaggacaggggcgagggtaaagtcgctacgacagtaatctccaagatgttgtttgtcgaaccaatcctggaggtgtcatctcttccaacaaccaatagcaccactaatagcgccaccaaaattacagctaacacaactgatgaacctacaacccagccgacgactgaacctacaacgcagcctacaatccagcccacgcagccgacgacccagctaccaacagactccccaacgcagcctacaacaggctccttctgtcctggtcccgtgacgctgtgcagcgacttggagtctcatagcacagaggcagtcctaggggacgcattggtggatttttcattgaagctgtatcacgcattcagcgccatgaagaaagttgagacaaatatggcgttctctcccttcagcattgcatcactgctgacacaggtcctgcttggtgcgggtgaaaatactaagacaaacctggagagcatcctaagctatcccaaagatttcacatgcgtgcaccaggctctgaagggatttacgaccaaaggcgtgacatctgtttcccagatttttcactcacctgacctggccatcagagatacgtttgttaacgcatcacgcacactctactcctctagtccacgggtgctgagcaacaactccgatgccaatctggaacttattaatacctgggtcgcgaagaacactaataacaagatatcacgattgctagattcactacctagtgacacccggctggtgctcttaaatgccatttatctgtcagcaaagtggaagacgacatttgaccccaagaaaacaaggatggagccttttcacttcaaaaattcagtcatcaaggttccaatgatgaactctaaaaaatacccagtcgcccacttcatcgaccagactctcaaagccaaggtggggcaactccaactttcccacaatctatcactggttatcctggtaccacagaatctgaagcaccggctggaggacatggaacaagctctttcacccagtgtgtttaaagctattatggaaaagctggagatgtccaagttccagcctaccctcctgacactcccacgtattaaggtaactacttcccaggatatgctgtccattatggaaaaacttgaatttttcgacttttcatatgatctgaacttatgtgggctaactgaggaccccgacttgcaggtttcagcaatgcagcaccagaccgtgctggaactgacagagaccggcgtcgaagcagccgcggctagcgcgataagcgtggctcgcaccctgttggtatttgaagttcaacagccttttcttttcgtactctgggaccagcagcataaattccctgtgtttatggggagggtttatgaccctagggcg

SEQ ID NO: 972 - DNA, 1500 bp, Artificial Sequence
  derived and/or modified sequence
atggcctcccggctgacccttctgaccctgctgctgcttctcctcgcgggcgaccgggcctcttccaaccctaacgcgaccagctcctcttcccaagatcccgaaagtttgcaggatcgcggtgaaggcaaggtagccacgactgtgattagcaaaatgctgtttgtcgagcccattctggaggtgtctagcctgccaacgacaaacagtaccaccaattctgctactaagattaccgcaaacaccactgatgaacctacaacgcagcccactacggagcccacgacacagcctaccatccagcccactcaacctaccacccagttgccaaccgactcccctacacagccaacaaccggtagcttttgtccaggcccggtcactctgtgtagtgatctggaaagccactccactgaagctgttcttggtgacgctctggtggatttcagtttgaagctgtatcacgccttcagtgccatgaaaaaagtggagaccaacatggccttctcccctttttccattgcaagcttgctcacccaagtgctgttgggcgccggcgaaaatacaaagactaacctggagagtatcctgagttaccctaaggactttacatgcgtgcatcaggcactgaagggttttacaacgaagggcgtgacctccgtgtcccagatcttccacagccccgatctcgcaatccgcgacacgttcgtgaatgccagccgaaccctgtactccagctccccacgcgtcctgtccaacaactctgacgccaatctggagctcatcaatacgtgggtcgctaagaacaccaataacaagatctcccgcctgctggacagtttgccatccgatacaagactggtgctgctgaacgccatttacctgtctgccaaatggaaaaccaccttcgaccccaagaaaacgcggatggagccattccacttcaagaacagcgttattaaagtcccaatgatgaattccaagaagtatcccgttgcccacttcatcgatcaaaccctgaaggctaaggtcggccagttgcagctgtcccataatctcagcctggtcattctggtgccccagaacctcaagcataggctggaggatatggaacaagctctctccccgtccgttttcaaagctattatggaaaagcttgaaatgagcaaatttcagcctaccctgctgacccttccccgcatcaaggtgaccacaagccaggacatgctcagtattatggagaagctcgagtttttcgacttctcttacgatctgaacctgtgcggcctgaccgaagatcctgatctgcaggtctccgcaatgcagcaccagaccgtgctggagctgactgagactggcgtggaggcagccgccgcaagtgccatatccgtggctagaactcttctggtgttcgaagtgcagcagccgttcttgtttgtgctgtgggatcagcagcacaagttccccgtgttcatggggagggtgtatgatccccgggcc

SEQ ID NO: 973 - DNA, 1500 bp, Artificial Sequence
  derived and/or modified sequence
atggcctctaggctcaccctccttactttgctgcttctgctgcttgccggggacagagctagtagtaatccgaacgcaacctcgtcctccagccaagacccagaatccctgcaggacaggggcgagggcaaggtagcgacgactgtcatcagcaagatgctgtttgttgagcctatcctcgaggtgtcctctctgccgactactaatagcacaacaaactctgcgacaaagattaccgctaatacaaccgacgaaccaactacccagcctacaaccgaacccaccacacagccaactatccaaccaacccagccgactactcaactgccaacagacagtccaacccagcctaccacgggcagcttctgccccggacctgttacgctgtgttcagacctcgaatcacattccacagaagctgttttgggcgacgcgttggtcgactttagtttaaagttgtaccatgccttttctgcaatgaaaaaagtggagacgaacatggcattttcccctttcagcattgcatcactgctgacacaagtactactgggtgctggggagaacactaaaactaatctggaatcaatcctgtcttatccaaaagatttcacttgtgtgcatcaggccctgaaaggctttacaaccaaaggagtgacgtcagtcagccaaatcttccactcccctgaccttgctatccgcgatacctttgtaaacgcctctcgaaccctttattcatcaagtcctagagttttaagcaataactccgatgctaacttggagctcataaatacatgggttgctaaaaatactaacaacaaaatctcacggctactggatagtcttccatccgacactagattagttctgctcaacgccatttatttgtcggcgaagtggaagacaacgttcgaccctaaaaagacgaggatggagccattccactttaagaattcagtgattaaggtccccatgatgaacagcaagaaatatccagtggctcacttcatagatcagacattgaaagccaaggtgggccaattacagctgtcccacaacctctccctcgtcattctggtgccccagaacctgaaacaccgactagaagatatggagcaagccctgtctccgtccgtgttcaaggcgattatggagaagctcgaaatgtcaaagtttcagccgactttgctaaccctgccccgcatcaaagtgactacttcacaggacatgctgtcgattatggagaaactcgaatttttcgactttagttacgatctgaacctatgtggccttactgaagacccagatttgcaggtgtccgccatgcaacaccagacggtgttggagttgactgagacgggcgtggaggctgcggcagccagcgcaatcagcgtggcccgtacactgctcgtgttcgaggtacagcagccgttcctgtttgtgttgtgggatcagcaacacaaatttccagtctttatgggtagagtttatgaccccagagct

SEQ ID NO: 974 - DNA, 1500 bp, Artificial Sequence
  derived and/or modified sequence
atggcatcccgactgaccctcctcacactgctactcctgttgcttgcaggcgaccgggcatcctctaatccgaatgccacatccagctccagtcaggatcctgaatctttacaggatcggggagaggggaaggtagcgactacagtgatatccaagatgctcttcgtcgaacccattcttgaggtttcgtcattgcctaccacgaattctaccacgaattcggccacgaaaattaccgctaacacaacggatgagccgaccacccagcctactaccgaacccactacccagcctaccattcagcctacgcagcctactacgcagttacctaccgacagcccaactcaacccacaactggctcattctgtcccggacccgtcacgctgtgctctgatcttgaatcgcactccacggaagcagtcctaggggacgcgcttgtcgatttctccctcaagttgtaccacgcgttctcagcaatgaagaaagtggagaccaacatggcgttttcgccgttttccattgctagcctacttactcaggtcttactcggtgctggggaaaacactaagactaacttagaatccatcctgagctatcccaaagacttcacttgcgtgcatcaggcgctgaagggttttaccactaaaggagtaaccagtgtttctcagatcttccattcgcctgatctagccatacgagatacattcgttaatgcttcacgcacgttgtacagttcttcgccacgcgtcttgtccaacaactccgacgcaaacctggagttaatcaatacttgggttgcgaaaaacacaaataacaaaatatcccgcttactcgattctctgccaagcgacacccgcctagtcctcttgaatgctatttacctgagcgctaaatggaagacaacatttgaccctaagaaaacacgaatggaacctttccacttcaagaactccgtgatcaaagtgcctatgatgaattcaaagaagtatccggttgctcacttcattgatcagactttgaaggctaaggtagggcagttgcagctttcgcataatctctcattggtgatcttggttccccaaaatctgaaacacaggctggaagatatggaacaagcactttctccctctgtgttcaaagcaattatggaaaagctggagatgtcaaagtttcaaccgacattgcttaccctgccacgaataaaagtcacaaccagtcaggatatgctctctatcatggagaagttggaatttttcgatttttcttatgacctcaatctctgcggcctaaccgaagatcctgatctccaagtgagcgccatgcagcatcagaccgtcttggagctcacagaaacaggcgtggaggccgccgccgcctccgctatctcggttgctcgcactctgcttgtattcgaagtacagcagcccttcttatttgtgctctgggaccagcagcataagttcccagttttcatggggcgtgtgtacgatccacgagct

SEQ ID NO: 975 - DNA, 1500 bp, Artificial Sequence
  derived and/or modified sequence
atggcttcgagattgaccctgttaactctcctgctactactgttagcaggtgatcgtgctagttcaaacccaaatgcaacatcatcaagctcacaggacccagagtcccttcaggataggggtgagggaaaggttgccaccactgttatctccaagatgctgttcgtcgagccgatactggaggtctcctcactgccgacaacaaatagcacaactaattctgccaccaaaatcacggcaaacaccaccgacgagcccacaacacagccaaccaccgaaccaacgacccagccaaccatccagcccactcagcctaccactcagctacccaccgattcccctacccaacccacaacagggtccttctgcccaggaccagtgactctctgcagcgatcttgaatcccactcaacagaggcggtgttgggagacgcattggtggatttcagcctgaaactttatcatgctttctctgccatgaagaaagttgagacgaacatggcgtttagccccttcagcatcgcatctcttcttacacaggttctacttggagcaggcgagaacacaaagacaaacctcgaatccatcctcagctatcccaaggatttcacttgcgtgcatcaagcactgaagggcttcactaccaaaggggttactagcgtcagtcaaatcttccactcaccagacctcgcaatcagagacacatttgtgaatgcttcaagaacactgtactcgtcttctcctcgcgtgctgtccaataattctgacgccaacctagagctgattaatacatgggtggccaagaatacaaataacaagatcagtcgtctgttagacagtttaccctctgatacacgtctggtgctgctgaatgcgatttacctctccgctaagtggaagacaaccttcgacccgaagaagacacgcatggaaccttttcacttcaaaaacagcgtgatcaaagtaccgatgatgaactccaaaaagtatccggtggcacacttcatcgaccagactctcaaggcaaaagtgggacagctacagctttcccacaacctgtctctggttatcctggtccctcaaaacttgaagcaccggctggaagatatggaacaggctctgagcccctccgtctttaaggccatcatggagaaattagagatgtctaagttccagcccaccttactgacactcccccgtatcaaagtgactaccagccaggatatgctatctataatggagaagctggaattctttgacttctcctacgatctgaacctgtgcggattgacagaagatcctgacctgcaggtgtctgctatgcagcaccaaaccgtgctggaactgacagagaccggcgtggaggcggccgcggcatccgcaatatccgtggcccgtacgttactagtgtttgaagtccaacaaccatttctcttcgtgctgtgggatcaacagcacaagtttcccgtgttcatgggcagagtgtatgaccctagggcc

SEQ ID NO: 976 - DNA, 1500 bp, Artificial Sequence
  derived and/or modified sequence
atggcgagtaggctgacgcttctgactttgctcctgctgttgctggctggtgacagggcttccagtaatcccaacgctacgtcgagctccagtcaggaccctgaaagcttacaagatcggggtgaagggaaggttgccaccacagttatcagcaagatgctttttgtcgaacccatcctggaggtaagctccctcccaaccaccaacagcaccaccaactcagctaccaagatcactgccaacacaaccgacgaacccacaactcagccaaccactgaacctacaacacagcctactatccaaccaacccagcctacaacccagctgcccacagacagtccaactcagcctaccaccggatctttttgcccaggccctgtcaccctttgttcggatttggagagccacagcactgaggctgtgctgggcgatgctcttgtggacttctccctgaagttgtatcatgccttttcagcgatgaagaaagtagaaacaaacatggcattttcgcctttcagcatagcctctctgcttacccaggtcctgcttggcgctggagagaatactaagacaaacctggaatctatactctcctacccaaaagacttcacttgtgtgcaccaggcacttaaaggctttaccactaaaggggttaccagcgttagtcaaatctttcacagtcccgacctggccattcgcgatacattcgttaacgcctcccggacactttactccagcagtccgagggtactcagcaacaacagtgatgccaacctggaactgatcaacacttgggtggcaaaaaacaccaacaacaagatttctagactgctggactccctgcctagcgacactcggctcgtcctactcaatgccatctatctttccgctaagtggaagaccacttttgacccgaagaagacccgcatggaaccattccacttcaagaattcagtgatcaaggttcctatgatgaattcaaagaaataccccgtagctcacttcattgatcagactctgaaggctaaggtcggtcaactgcaattgagccacaatctgtctctggtgatacttgttccccagaatctgaaacaccggttggaggatatggaacaagccctctcacccagtgttttcaaggcgattatggaaaaactcgaaatgagcaagtttcaaccaacgctcctcacacttccacgcattaaagttaccactagccaggatatgctgagcatcatggaaaaattggagttttttgacttctcctacgacctcaacttgtgcgggctcacggaggatccagacctccaggttagcgccatgcagcatcaaaccgtcctcgaactcactgagacgggagtagaggctgccgcagcttctgctatttcagttgctaggacactcctagtgttcgaggtgcaacagccattcctgtttgtgctttgggaccagcagcacaaattcccagtgttcatgggacgggtctacgacccaagagcc

SEQ ID NO: 977 - DNA, 1500 bp, Artificial Sequence
  derived and/or modified sequence
atggcttctcgcctgaccctgctgacattgctgctcctactactcgcgggcgacagagcaagttcaaatccgaacgcgacctcatcttctagtcaagaccctgaatcactacaggatcgcggggaaggaaaggtcgcaacaacagtgatttctaaaatgctgttcgtcgagcccattttggaagtgtcatccctgcccactaccaactccaccaccaactcagctacaaagataaccgctaataccactgacgaacctacaacacaacccactactgagcctactacgcagcctaccatacagcccacgcagccaactactcagctcccgaccgatagccccacacagcctacgactggctccttttgcccgggccccgtgactctgtgttctgacctggaatcccacagcacggaagccgtgctgggcgatgcactcgtcgacttcagccttaagctctaccacgctttcagcgcaatgaaaaaagtggagacaaacatggccttctccccttttagtatcgcaagtttattgacccaggtgcttctgggggccggagagaatacaaaaacaaacctcgagtcgatattgtcctatccaaaggacttcacttgcgtgcatcaggccctgaaaggctttactactaagggtgtgacatcagtgtcccaaatctttcatagccctgatttagcaataagagacaccttcgtgaatgcctcccggacactgtacagctcaagtcctagagtgttgagcaataatagcgatgctaatttggaactgatcaatacctgggtggcaaagaacacaaacaacaaaatcagccgacttctcgactctctgccttccgacacccggttggtccttctgaacgcaatctacctgtctgccaagtggaagacaacattcgaccctaaaaagactcgcatggagcctttccatttcaaaaactccgtcataaaagttcctatgatgaatagtaagaaataccctgtcgcccactttattgatcaaactctgaaggccaaggtcggacaactgcagctatcccacaatctgtctctggttattcttgtgcctcagaatcttaagcatagacttgaggacatggagcaggcactgtccccaagtgtcttcaaagccataatggagaaacttgagatgtcaaaattccagcccacactgctgacacttcccagaatcaaggtgaccacatctcaggatatgctgagcatcatggaaaagctcgagttcttcgacttttcctacgatctcaacctttgcggcttgaccgaggatccagatttgcaggtcagtgccatgcagcatcagaccgttctggagttgacagaaaccggggtggaggcagccgcagcttctgctattagcgtagcccgcactctcctcgtcttcgaggtgcaacagcccttcctgtttgtgctgtgggatcagcaacacaagtttcctgtgttcatgggccgtgtatatgacccgcgtgcc

SEQ ID NO: 978 - DNA, 1500 bp, Artificial Sequence
  derived and/or modified sequence
atggcctctagacttaccctgctgactctgctcttgctcctcctggctggagatagggcgtccagtaaccccaacgcgacaagttcttctagtcaggacccagagtccctgcaagaccgcggtgaaggaaaggttgccactaccgtcattagcaaaatgctctttgtcgagccaatcctggaggtatcatctcttcctaccactaactctaccacaaattccgccactaagatcaccgccaacaccactgatgaaccaacaacccaacccaccacagagccgactactcaaccaactatccagcctacccagcccactacacagctgcccacagattcaccaactcagccaacaacaggaagcttctgccctggcccagtcaccctttgcagcgacctggagagtcactccaccgaggcggtcctcggagatgcattggttgacttctctttgaagctgtatcatgcattttcagcaatgaagaaagttgaaacgaacatggcctttagtcccttctcaatcgctagcctgctgactcaggtgttgctcggagcaggtgaaaacaccaagaccaacttggaatcaattttgtcttatccaaaggatttcacctgcgtgcaccaggctctcaaaggcttcaccaccaagggagtgactagcgtaagtcagattttccattctccagacctggcaatcagagacacattcgtaaatgcatcccgcacactgtatagttcctctccacgcgttctgagcaacaactctgacgctaaccttgagctgatcaacacatgggtcgccaagaacactaataataagatcagtcgcttgttggattcacttccctccgacacacgcctcgtgttgcttaacgcaatttacctgagtgccaagtggaagaccaccttcgatccgaaaaaaacgcgcatggaacctttccatttcaaaaacagtgttattaaggttcctatgatgaattccaagaagtatccggtggcccacttcatcgaccagacactcaaggctaaggtgggccagctgcagctgagccataacctgtcactcgtgatcctcgtgccacagaacctcaaacataggttggaagatatggagcaggccttgtccccgagcgtttttaaggcgataatggagaagctcgagatgagcaagttccaaccaaccctgctcacccttcctcgcatcaaggtaacgacttcccaggacatgctgtccattatggaaaagcttgagttcttcgatttctcctacgacctgaacctgtgcggtctcaccgaggacccagatctgcaggtaagtgccatgcagcatcagacagttctggagttgacggagacgggcgttgaagctgccgctgctagtgcaatcagtgtcgccaggactctcctggtttttgaagtccaacagccatttttgtttgtgctctgggaccagcaacacaaatttccagttttcatgggacgcgtctacgaccctagggcc

SEQ ID NO: 979 - DNA, 1500 bp, Artificial Sequence
  derived and/or modified sequence
atggcctcccggctgacactcctcacgcttctgctgctattactggccggagacagggccagttctaacccaaacgccacaagctcaagctcgcaagatcccgagtccctgcaggaccgaggtgaggggaaggtggccaccacagttataagcaagatgctctttgttgagcccatattagaagttagttcactgccaaccactaactctaccaccaactccgcgactaagattacagccaacactactgacgagccaacaacacagccaacgacggaacctaccactcaaccaacaattcagccgacacagccaactacccagctacctacagacagccccactcaaccgactaccggatctttctgccccggacctgtcaccctttgctcagacctggagtctcattctacagaggctgtcctcggagatgccttggtagactttagcctcaagttgtatcacgcctttagtgccatgaagaaagtagagacgaacatggccttcagtcctttctcgatcgctagtctgttaacacaggtactgctcggggcaggagaaaacaccaaaacaaatctagagtcaattctctcatatccaaaggacttcacttgtgtgcaccaggcactgaaggggtttacgaccaaaggggttaccagcgttagccagatattccattcgcccgacctggccatccgggacacgtttgtcaatgcaagtcgtaccttgtactcgtctagtccgcgggtcctttcgaacaattccgacgccaatcttgagctgatcaacacatgggtggcaaagaacacgaacaacaaaatcagcagactgttggactccctcccctcggacacacgtctggtgctgctgaatgccatttacctttcggcaaagtggaagacaacctttgatccaaagaaaacacggatggaaccgtttcatttcaaaaattctgtgattaaagtccccatgatgaacagcaagaagtacccagtggcacatttcattgaccagacactgaaggcaaaggttggacagctgcagctttcgcacaatctctctctcgtcattctagtgcctcagaatctgaaacataggcttgaggacatggaacaagcactgagcccttctgtctttaaagctatcatggagaagttggagatgtccaaatttcagcctaccttactgacgttgccgagaattaaggtgacaacttcacaagacatgctttctatcatggagaaacttgaatttttcgatttttcctatgacctgaacctctgcggtctgaccgaggaccctgatctgcaggtgtctgcaatgcagcaccaaacagtactcgagctgactgagaccggcgtggaagcggccgcggcatccgcgattagcgtggcacgcacgttactcgtgtttgaggtgcagcaaccctttctgtttgtgctctgggatcagcaacataaatttcccgtttttatgggcagagtgtatgatccccgggct

SEQ ID NO: 980 - DNA, 1500 bp, Artificial Sequence
  derived and/or modified sequence
atggcttctagactaacactgctaacacttctcctcctacttctggctggggatagggcttcttctaacccaaatgccacttcttcttcgtcacaagatcccgaatctcttcaagatagaggagaagggaaggttgctacaacagttatttccaaaatgcttttcgtggagccaattctcgaagtgtcgtctctgcccacaacaaattcaactacaaattcagcaacaaagatcactgccaatactactgatgaaccaactacacagcctacaactgagccaactactcagcccactattcagcctacacagccaactacacagctgcccactgattcacctacacagccaacaacaggatctttctgtcccgggccagtaacactttgcagtgaccttgaatctcactccacagaagcagtgcttggagatgcactcgtcgatttctcactgaagctgtaccatgcattcagtgcaatgaaaaaagttgaaacaaacatggctttttcccccttttcgatcgcctccctactaactcaggtcttacttggggcaggggaaaatacaaaaacaaatttggaatccattctcagttatcctaaagatttcacatgtgtgcaccaggcattgaaaggatttactactaaaggagtcacttctgtctcccagatatttcatagtcctgatttggctatccgcgatacattcgtgaatgcttctcgaacactctattcgtccagtcctcgggtgttaagtaacaatagtgatgcgaaccttgaactgatcaatacttgggtcgctaaaaacactaataacaagatctcccgcctcctcgattctttaccttctgatacacgcttagtgctactgaacgctatatatctctcagcaaaatggaaaacaacttttgatcccaagaaaacaaggatggagcctttccactttaagaattctgtaattaaagtgcctatgatgaactctaagaaatacccggtggcccatttcatagatcagacgctcaaagcaaaagtcgggcagctgcagctctcccacaatctgtctcttgtgatactcgtccctcagaacttaaagcaccgcttagaagatatggaacaggccctgagtccatccgtgtttaaagcaataatggaaaaattagaaatgagtaaattccagcctacactgcttacactaccaaggataaaagtgactacttctcaggatatgctgagtataatggaaaaacttgaattcttcgatttctcctatgatctaaatttatgtggacttacagaagatccagatctccaggtctcagccatgcagcaccaaacggtgctggagcttacagaaacaggggttgaggcagcagccgccagtgcaatctccgtagctcggactctcctggtgtttgaggttcagcagccttttctttttgtactatgggatcagcagcataaattccctgtgttcatgggacgcgtgtatgatcccagggca

SEQ ID NO: 981 - DNA, 1500 bp, Artificial Sequence
  derived and/or modified sequence
atggccagccggctcacactcctgacactcctgctcctactgctggccggcgaccgggcttcaagtaaccctaatgcaaccagcagtagctctcaggacccagaaagcctgcaggatcggggcgagggaaaggtggcaactaccgtaatctctaaaatgctgtttgtcgaacctattctggaagtgtcatcgctcccaaccacaaacagcactaccaacagcgcaactaagattaccgcaaataccaccgacgagcccaccacacaacccactaccgagcctacaactcagcccaccatccaacccacacaacccaccacacagctccctacagactcaccaacccagcccaccacaggaagtttttgccctgggccagtgaccctctgtagcgacctggagtcacattctacggaagctgttctaggggacgccctggtggatttcagccttaagctgtatcacgcattctctgccatgaaaaaagtagaaaccaacatggctttttcaccgttttccatcgcatccctactcactcaggttctgctgggggcaggcgaaaacacaaagacaaacctggagagcattctgtcctatcctaaagactttacatgtgtgcaccaagccttgaaaggtttcactactaaaggggtcacatcggtctcacaaatattccacagccccgacctggccataagagacacattcgttaacgcctcgcgaaccttgtacagctcctcgccacgggtgctatcaaacaactctgacgctaatttggagctcatcaatacttgggttgctaagaatacaaacaacaaaatcagtcgcctgcttgactcacttccatcggacactaggctggtccttctgaatgcaatctatttgtccgcgaaatggaagaccacctttgacccaaagaaaactagaatggaaccgtttcactttaaaaactctgtaatcaaagttccaatgatgaactccaaaaagtaccccgtggcccacttcattgatcaaacactgaaagccaaggttggccaactgcaactctcccacaacctgagtctcgtgatactggtgccccagaacctgaaacatagacttgaagacatggagcaggccttgtcgcccagtgtgttcaaagccataatggagaaattagagatgtcgaagttccaacctacgctcctcaccctaccgcggattaaggtgaccacatcacaggatatgttatccatcatggagaaattggaattcttcgattttagttacgatctgaacctttgcgggctgacggaggacccagatctgcaagtcagcgccatgcaacatcagacggtgctggagctcaccgagactggcgtggaggcagcagccgcatctgccatttcagtcgctcgcaccctgctggtattcgaggtccagcagcctttcttgtttgtcctttgggatcaacaacacaagtttccagtgtttatgggtagagtttacgacccccgcgca

SEQ ID NO: 982 - DNA, 1503 bp, Artificial Sequence
  derived and/or modified sequence
atggccagcagactgaccctgctgaccctgctgctgctgctgctggccggcgacagagccagcagcaaccccaacgccaccagcagcagcagccaggaccccgagagcctgcaggacagaggcgagggcaaggtggccaccaccgtgatcagcaagatgctgttcgtggagcccatcctggaggtgagcagcctgcccaccaccaacagcaccaccaacagcgccaccaagatcaccgccaacaccaccgacgagcccaccacccagcccaccaccgagcccaccacccagcccaccatccagcccacccagcccaccacccagctgcccaccgacagccccacccagcccaccaccggcagcttctgccccggccccgtgaccctgtgcagcgacctggagagccacagcaccgaggccgtgctgggcgacgccctggtggacttcagcctgaagctgtaccacgccttcagcgccatgaagaaggtggagaccaacatggccttcagccccttcagcatcgccagcctgctgacccaggtgctgctgggcgccggcgagaacaccaagaccaacctggagagcatcctgagctaccccaaggacttcacctgcgtgcaccaggccctgaagggcttcaccaccaagggcgtgaccagcgtgagccagatcttccacagccccgacctggccatcagagacaccttcgtgaacgccagcagaaccctgtacagcagcagccccagagtgctgagcaacaacagcgacgccaacctggagctgatcaacacctgggtggccaagaacaccaacaacaagatcagcagactgctggacagcctgcccagcgacaccagactggtgctgctgaacgccatctacctgagcgccaagtggaagaccaccttcgaccccaagaagaccagaatggagcccttccacttcaagaacagcgtgatcaaggtgcccatgatgaacagcaagaagtaccccgtggcccacttcatcgaccagaccctgaaggccaaggtgggccagctgcagctgagccacaacctgagcctggtgatcctggtgccccagaacctgaagcacagactggaggacatggagcaggccctgagccccagcgtgttcaaggccatcatggagaagctggagatgagcaagttccagcccaccctgctgaccctgcccagaatcaaggtgaccaccagccaggacatgctgagcatcatggagaagctggagttcttcgacttcagctacgacctgaacctgtgcggcctgaccgaggaccccgacctgcaggtgagcgccatgcagcaccagaccgtgctggagctgaccgagaccggcgtggaggccgccgccgccagcgccatcagcgtggccagaaccctgctggtgttcgaggtgcagcagcccttcctgttcgtgctgtgggaccagcagcacaagttccccgtgttcatgggcagagtgtacgaccccagagcctag

SEQ ID NO: 983 - DNA, 1518 bp, Artificial Sequence
  derived and/or modified sequence
atggccagcagactgaccctgctgaccctgctgctgctgctgctggccggcttcctggagccccaggacagagccagcagcaaccccaacgccaccagcagcagcagccaggaccccgagagcctgcaggacagaggcgagggcaaggtggccaccaccgtgatcagcaagatgctgttcgtggagcccatcctggaggtgagcagcctgcccaccaccaacagcaccaccaacagcgccaccaagatcaccgccaacaccaccgacgagcccaccacccagcccaccaccgagcccaccacccagcccaccatccagcccacccagcccaccacccagctgcccaccgacagccccacccagcccaccaccggcagcttctgccccggccccgtgaccctgtgcagcgacctggagagccacagcaccgaggccgtgctgggcgacgccctggtggacttcagcctgaagctgtaccacgccttcagcgccatgaagaaggtggagaccaacatggccttcagccccttcagcatcgccagcctgctgacccaggtgctgctgggcgccggcgagaacaccaagaccaacctggagagcatcctgagctaccccaaggacttcacctgcgtgcaccaggccctgaagggcttcaccaccaagggcgtgaccagcgtgagccagatcttccacagccccgacctggccatcagagacaccttcgtgaacgccagcagaaccctgtacagcagcagccccagagtgctgagcaacaacagcgacgccaacctggagctgatcaacacctgggtggccaagaacaccaacaacaagatcagcagactgctggacagcctgcccagcgacaccagactggtgctgctgaacgccatctacctgagcgccaagtggaagaccaccttcgaccccaagaagaccagaatggagcccttccacttcaagaacagcgtgatcaaggtgcccatgatgaacagcaagaagtaccccgtggcccacttcatcgaccagaccctgaaggccaaggtgggccagctgcagctgagccacaacctgagcctggtgatcctggtgccccagaacctgaagcacagactggaggacatggagcaggccctgagccccagcgtgttcaaggccatcatggagaagctggagatgagcaagttccagcccaccctgctgaccctgcccagaatcaaggtgaccaccagccaggacatgctgagcatcatggagaagctggagttcttcgacttcagctacgacctgaacctgtgcggcctgaccgaggaccccgacctgcaggtgagcgccatgcagcaccagaccgtgctggagctgaccgagaccggcgtggaggccgccgccgccagcgccatcagcgtggccagaaccctgctggtgttcgaggtgcagcagcccttcctgttcgtgctgtgggaccagcagcacaagttccccgtgttcatgggcagagtgtacgaccccagagcctag

SEQ ID NO: 984 - DNA, 1347 bp, Artificial Sequence
  derived and/or modified sequence
atgctgttcgtggagcccatcctggaggtgagcagcctgcccaccaccaacagcaccaccaacagcgccaccaagatcaccgccaacaccaccgacgagcccaccacccagcccaccaccgagcccaccacccagcccaccatccagcccacccagcccaccacccagctgcccaccgacagccccacccagcccaccaccggcagcttctgccccggccccgtgaccctgtgcagcgacctggagagccacagcaccgaggccgtgctgggcgacgccctggtggacttcagcctgaagctgtaccacgccttcagcgccatgaagaaggtggagaccaacatggccttcagccccttcagcatcgccagcctgctgacccaggtgctgctgggcgccggcgagaacaccaagaccaacctggagagcatcctgagctaccccaaggacttcacctgcgtgcaccaggccctgaagggcttcaccaccaagggcgtgaccagcgtgagccagatcttccacagccccgacctggccatcagagacaccttcgtgaacgccagcagaaccctgtacagcagcagccccagagtgctgagcaacaacagcgacgccaacctggagctgatcaacacctgggtggccaagaacaccaacaacaagatcagcagactgctggacagcctgcccagcgacaccagactggtgctgctgaacgccatctacctgagcgccaagtggaagaccaccttcgaccccaagaagaccagaatggagcccttccacttcaagaacagcgtgatcaaggtgcccatgatgaacagcaagaagtaccccgtggcccacttcatcgaccagaccctgaaggccaaggtgggccagctgcagctgagccacaacctgagcctggtgatcctggtgccccagaacctgaagcacagactggaggacatggagcaggccctgagccccagcgtgttcaaggccatcatggagaagctggagatgagcaagttccagcccaccctgctgaccctgcccagaatcaaggtgaccaccagccaggacatgctgagcatcatggagaagctggagttcttcgacttcagctacgacctgaacctgtgcggcctgaccgaggaccccgacctgcaggtgagcgccatgcagcaccagaccgtgctggagctgaccgagaccggcgtggaggccgccgccgccagcgccatcagcgtggccagaaccctgctggtgttcgaggtgcagcagcccttcctgttcgtgctgtgggaccagcagcacaagttccccgtgttcatgggcagagtgtacgaccccagagcctag

SEQ ID NO: 985 - DNA, 483 bp, Artificial Sequence
  derived and/or modified sequence
atggccagcagactgaccctgctgaccctgctgctgctgctgctggccggcgacagagccagcagcaaccccaacgccaccagcagcagcagccaggaccccgagagcctgcaggacagaggcgagggcaaggtggccaccaccgtgatcagcaagatgctgttcgtggagcccatcctggaggtgagcagcctgcccaccaccaacagcaccaccaacagcgccaccaagatcaccgccaacaccaccgacgagcccaccacccagcccaccaccgagcccaccacccagcccaccatccagcccacccagcccaccacccagctgcccaccgacagccccacccagcccaccaccggcagcttctgccccggccccgtgaccctgtgcagcgacctggagagccacagcaccgaggccgtgctgggcgacgccctggtggacttcagcctgaagctgtaccacgccttcagcgccatgtag

SEQ ID NO: 986 - DNA, 402 bp, Artificial Sequence
  derived and/or modified sequence
atggccagcagactgaccctgctgaccctgctgctgctgctgctggccggcgacagagccagcagcaaccccaacgccaccagcagcagcagccaggaccccgagagcctgcaggacagaggcgagggcaaggtggccaccaccgtgatcagcaagatgctgttcgtggagcccatcctggaggtgagcagcctgcccaccaccaacagcaccaccaacagcgccaccaagatcaccgccaacaccaccgacgagcccaccacccagcccaccaccgagcccaccacccagcccaccatccagcccacccagcccaccacccagctgcccaccgacagccccacccagcccggctacgccctgaaccacggcgagatcggcatcctgagattcttcctgtag

SEQ ID NO: 987 - DNA, 1503 bp, Artificial Sequence
  derived and/or modified sequence
atggcatctcgcttgactctgttgactttgctgctgctcctgcttgctggcgaccgtgcaagcagtaatccaaacgctacctcctcctcttcacaggaccccgaaagcctgcaagaccgcggcgaggggaaagtggctacaaccgtcatcagcaagatgctgtttgtggaacccatcttagaggtgagtagcctccccacaaccaactccacaaccaattcagcgacgaagataacagcaaataccactgatgagcctaccacgcaacctaccactgagcccacaacccagccaacgatacagcccacccagcccaccacacagctccctacagattcccccacgcaaccaaccaccggctccttttgtccaggccccgtaactttgtgctccgacctggagagccacagcaccgaagcagttctgggcgacgcgctggtggattttagcctgaaactgtaccacgccttctctgcaatgaagaaggttgagacgaatatggcattttcacccttctcgattgcctctcttctcacgcaggtgcttctgggcgccggtgaaaacactaagacaaacctagaatctatcctcagctacccaaaggatttcacgtgcgttcaccaagccttgaagggatttaccacaaaaggcgttactagcgtcagccagatcttccacagccccgatttggccattagagacacgtttgttaatgcttctcgtacgctctattccagttctccacgcgtcctctccaacaattctgatgcgaatttggagctgattaatacttgggttgccaagaacaccaataacaagatttcaagactgttggattccttgccatccgatacacggctggtcctcttgaacgcaatttacttgagtgccaaatggaaaactacatttgaccctaaaaaaacgcggatggaaccatttcactttaagaacagcgtgatcaaggtgcccatgatgaacagcaaaaagtaccccgtcgcccacttcatagaccagaccctgaaggccaaagtcggacagctccaactgtctcacaacctgtcactggtcatcttggttccccagaatctcaagcaccggctggaggacatggaacaggctttgagccctagtgtctttaaagccatcatggagaaactggagatgtccaagtttcaaccaacactcctcacacttcctagaatcaaagtcactacatcgcaggatatgctatccatcatggaaaaactggaatttttcgatttcagctacgaccttaacttatgcgggctcacagaggatcccgaccttcaagtgagcgcaatgcagcaccagaccgtactggagctcaccgaaaccggcgtggaagctgccgccgcttcagccatctccgtggcgcgcacccttcttgtgttcgaagtacagcagccattcttgttcgttctatgggaccagcagcacaagttccctgtgtttatggggcgagtgtacgaccccagagcctag

SEQ ID NO: 988 - DNA, 1518 bp, Artificial Sequence
  derived and/or modified sequence
atggcctcaaggttaacattgttgaccctgctgcttctgctgctggcaggcttcttggaacctcaagatcgggcttccagtaatccaaacgctacctccagttcctcacaagatcccgagagcctccaggacaggggagagggaaaagtggccaccactgtgatcagtaagatgctgttcgtggagcctatactggaggtctcttctcttcccacaactaactccacaactaatagtgcaactaaaatcactgccaacactacagatgaacctacaacccagcctaccactgaacctaccacccagccaaccattcagcccacccagccaaccactcagttgccaacagactcccccacccaacctaccaccggctccttttgtcctgggccagtaactctttgttctgatctggagtcacatagcactgaggccgtgttaggcgatgcattagtggatttcagtcttaagctgtatcatgctttttctgctatgaagaaagtagaaactaacatggccttctcccctttctctatcgcttccctgctgacccaagtccttctgggagctggcgagaacactaaaaccaatctggaaagcatcctctcatacccgaaggattttacttgcgtacatcaggctttgaaaggctttactacgaagggtgtaacttccgtctcccagatatttcactcacccgatcttgctattcgggatacattcgtgaacgcatcccgcactctatacagttccagtccacgcgtgctgtcgaacaactctgatgctaatctggagctgatcaacacttgggttgcaaaaaataccaacaacaagatcagtcgtctacttgactcgcttcctagtgatacgcgcctggtcctcctcaatgcaatttacctgtccgcgaagtggaaaaccacattcgacccgaagaaaactaggatggaaccttttcatttcaagaactcggttatcaaggtcccaatgatgaattcaaaaaagtacccagtggcgcattttattgaccagaccttgaaagctaaggtgggtcagcttcaactgtcccataacctctcgctggtcatcctggtgcctcagaaccttaagcacagactggaagatatggaacaggcgctgagcccatcagtgtttaaggccattatggagaaactggagatgtccaagtttcagccgactctgctgacactgcccagaattaaggtgacgacctcgcaggacatgctaagtatcatggagaagctcgaattctttgactttagctatgatctaaatttgtgcggactgaccgaggaccctgacctccaggtctcggcaatgcagcatcagacggtactggagctaactgagaccggtgtagaagctgccgctgcaagtgccatcagtgtcgccaggaccctgctcgtgttcgaggttcaacagccctttttgttcgtgttgtgggatcaacagcataaattccctgtctttatgggaagggtttatgatccccgcgcgtag

SEQ ID NO: 989 - DNA, 1347 bp, Artificial Sequence
  derived and/or modified sequence
atgttatttgtggagcccatcctggaggtgagttcactccctacaactaattctactacaaattcagccaccaagataactgccaataccactgacgaacctactacgcagcccaccacagaacctacaacacagcccactatacagccgactcaaccgacgacccagcttcctacagactcacccacacagcccacaaccggatccttctgtccagggccagttaccctgtgttctgacttagaaagtcactccaccgaagcagtgttaggcgatgcccttgtggacttctctctcaaactctaccatgcgttctctgcaatgaagaaagttgaaactaatatggctttctcaccctttagcatagccagcctgctgacacaggtgctgcttggggctggcgaaaatacaaagaccaacctagagtccattttgtcctacccgaaggattttacgtgcgtgcaccaggccttgaagggcttcaccacaaagggagtgacaagcgtgtcccaaatatttcactctcctgaccttgccattcgggacactttcgtaaatgcctccaggacgctgtacagttcgagtcccagggttttgtcaaataactctgatgctaacctggagttgataaatacctgggtcgctaaaaatacgaacaacaagatctcaaggctgctggacagcttgcctagtgacaccaggctggtccttctcaacgcaatctacctgagtgcgaagtggaaaacaacgtttgatcctaagaaaactcgcatggagcccttccacttcaaaaactcagtgatcaaggtgcctatgatgaacagtaaaaagtatcccgtggctcacttcatagaccaaactctgaaggccaaagttgggcagctgcagttatcccataatttgagcctggttatcctcgtgccacagaatcttaaacatagacttgaagatatggagcaggctttatcacccagtgttttcaaggctatcatggaaaagctggagatgtcaaagtttcagccaactttactgacactgcctcgtatcaaagttaccacgtcccaggacatgctctctatcatggagaagctagagttctttgacttcagttacgatctgaacttatgtgggctgaccgaggatcccgatctgcaagttagcgcaatgcagcaccaaacagttctggagctgaccgaaacgggcgtggaggcagcagcagcaagcgcaatatcagtggccagaaccctgctggtttttgaggtccagcagcccttcctttttgtcttgtgggaccaacagcacaagtttccagtgtttatggggcgcgtttacgaccctcgagcttag

SEQ ID NO: 990 - DNA, 483 bp, Artificial Sequence
  derived and/or modified sequence
atggcctccaggttgacgctgctcacacttttactgctgctgcttgctggtgatagggctagcagtaatcctaatgccacaagctcaagctctcaggatccggagtcccttcaggaccgcggcgaaggcaaagttgcaacaaccgtgatctccaaaatgctgtttgtggaacctatactggaggtgagcagtctgcctacaaccaacagtactacgaatagcgccacaaaaattacagctaacaccacagacgaaccaaccacacagcccacaaccgaaccaactacacaaccaaccattcagcccacccagccgaccacccagttacctactgattccccgactcagcctacaacagggtctttctgccccggcccagtcacactatgctccgacctggagtcccactccactgaagccgtgcttggagatgcacttgtggacttttctctgaaactctatcatgctttcagcgcgatgtag

SEQ ID NO: 991 - DNA, 402 bp, Artificial Sequence
  derived and/or modified sequence
atggcctcacgcttgaccctgctgacccttcttcttctgctgctcgctggggacagggcttcaagtaacccaaacgcgaccagtagtagttcccaggaccccgagagcctgcaggacagaggtgaagggaaagtggctactaccgtcatttctaagatgctcttcgtggagccaatcttagaggtgtcaagcctccccacaaccaacagcacgaccaattcagccacaaaaatcaccgctaacaccaccgacgaacccaccacccaaccaactactgaacccactacccagccaaccattcaaccaactcagccaactacacaactgcccaccgacagcccaacccagcctggatacgccctcaatcacggagagatcggcatcctgaggttctttctatag

SEQ ID NO: 992 - DNA, 1503 bp, Artificial Sequence
  derived and/or modified sequence
atggccagccggctgaccctgctgaccctgctgctgctgctgctggccggggaccgggccagcagcaaccccaatgccaccagcagcagcagccaggaccctgagagcctgcaggacagaggagagggcaaggtggccaccaccgtcatcagcaagatgctgtttgtggagcccatcctggaggtgagcagcctgcccaccaccaacagcaccaccaacagcgccaccaagatcacagccaacaccacagatgagcccaccacccagcccaccacagagcccaccacccagcccaccatccagcccacccagcccaccacccagctgcccacagacagccccacccagcccaccaccggcagcttctgccccggccctgtgaccctgtgcagcgacctggagagccacagcacagaggccgtgctgggagatgccctggtggacttcagcctgaagctgtaccacgccttcagcgccatgaagaaggtggagaccaacatggccttcagccccttcagcatcgccagcctgctgacccaggtgctgctgggcgctggggagaacaccaagaccaacctggagagcatcctgagctaccccaaggacttcacctgtgtgcaccaggccctgaagggcttcaccaccaagggcgtgacctctgtgtcccagatcttccacagcccagacctggccatccgggacacctttgtgaatgccagcaggaccctgtacagcagcagcccccgggtgctgagcaacaacagtgatgccaacctggagctgatcaacacctgggtggccaagaacaccaacaacaagatcagccggctgctggacagcctgcccagcgacacccggctggtgctgctgaatgccatctacctgagcgccaagtggaagaccacctttgaccccaagaagaccaggatggagcccttccacttcaagaacagcgtcatcaaggtgcccatgatgaacagcaagaagtaccctgtggcccacttcatcgaccagaccctgaaggccaaggtgggccagctgcagctgagccacaacctgagcctggtgatcctggtgccccagaacctgaagcaccggctggaggacatggagcaggccctgagccccagcgtcttcaaggccatcatggagaagctggagatgagcaagttccagcccaccctgctgaccctgccccgcatcaaggtgaccaccagccaggacatgctgagcatcatggagaagctggagttctttgacttctcctatgacctgaacctgtgtggcctgacagaggaccctgacctgcaggtgtctgccatgcagcaccagacagtgctggagctgacagagaccggggtggaggccgccgccgccagcgccatctctgtggcccggaccctgctggtgtttgaggtgcagcagcccttcctgtttgtgctgtgggaccagcagcacaagtttcctgtgttcatgggccgggtgtatgacccccgggcctag

SEQ ID NO: 993 - DNA, 1518 bp, Artificial Sequence
  derived and/or modified sequence
atggccagccggctgaccctgctgaccctgctgctgctgctgctggccggcttcctggagccccaggaccgggccagcagcaaccccaatgccaccagcagcagcagccaggaccctgagagcctgcaggacagaggagagggcaaggtggccaccaccgtcatcagcaagatgctgtttgtggagcccatcctggaggtgagcagcctgcccaccaccaacagcaccaccaacagcgccaccaagatcacagccaacaccacagatgagcccaccacccagcccaccacagagcccaccacccagcccaccatccagcccacccagcccaccacccagctgcccacagacagccccacccagcccaccaccggcagcttctgccccggccctgtgaccctgtgcagcgacctggagagccacagcacagaagctgtgctgggagatgccctggtggacttcagcctgaagctgtaccacgccttcagcgccatgaagaaggtggagaccaacatggccttcagccccttcagcatcgccagcctgctgacccaggtgctgctgggcgctggggagaacaccaagaccaacctggagagcatcctgagctaccccaaggacttcacctgtgtgcaccaggccctgaagggcttcaccaccaagggcgtgacctctgtgtcccagatcttccacagcccagacctggccatccgggacacctttgtgaatgccagcaggaccctgtacagcagcagcccccgggtgctgagcaacaacagtgatgccaacctggagctgatcaacacctgggtggccaagaacaccaacaacaagatcagccggctgctggacagcctgcccagcgacacccggctggtgctgctgaatgccatctacctgagcgccaagtggaagaccacctttgaccccaagaagaccaggatggagcccttccacttcaagaacagcgtcatcaaggtgcccatgatgaacagcaagaagtaccctgtggcccacttcatcgaccagaccctgaaggccaaggtgggccagctgcagctgagccacaacctgagcctggtgatcctggtgccccagaacctgaagcaccggctggaggacatggagcaggccctgagccccagcgtcttcaaggccatcatggagaagctggagatgagcaagttccagcccaccctgctgaccctgccccgcatcaaggtgaccaccagccaggacatgctgagcatcatggagaagctggagttctttgacttctcctatgacctgaacctgtgtggcctgacagaagatcctgacctgcaggtgtctgccatgcagcaccagacagtgctggagctgacagaaacaggagtggaggccgctgctgccagcgccatctctgtggcccggaccctgctggtgtttgaggtgcagcagcccttcctgtttgtgctgtgggaccagcagcacaagtttcctgtgttcatgggccgggtgtatgacccccgggcctag

SEQ ID NO: 994 - DNA, 1347 bp, Artificial Sequence
  derived and/or modified sequence
atgctgtttgtggagcccatcctggaggtgagcagcctgcccaccaccaacagcaccaccaacagcgccaccaagatcacagccaacaccacagatgagcccaccacccagcccaccacagagcccaccacccagcccaccatccagcccacccagcccaccacccagctgcccacagacagccccacccagcccaccaccggcagcttctgccccggccctgtgaccctgtgcagcgacctggagagccacagcacagaggccgtgctgggagatgccctggtggacttcagcctgaagctgtaccacgccttcagcgccatgaagaaggtggagaccaacatggccttcagccccttcagcatcgccagcctgctgacccaggtgctgctgggcgctggggagaacaccaagaccaacctggagagcatcctgagctaccccaaggacttcacctgtgtgcaccaggccctgaagggcttcaccaccaagggcgtgacctctgtgtcccagatcttccacagcccagacctggccatccgggacacctttgtgaatgccagcaggaccctgtacagcagcagcccccgggtgctgagcaacaacagtgatgccaacctggagctgatcaacacctgggtggccaagaacaccaacaacaagatcagccggctgctggacagcctgcccagcgacacccggctggtgctgctgaatgccatctacctgagcgccaagtggaagaccacctttgaccccaagaagaccaggatggagcccttccacttcaagaacagcgtcatcaaggtgcccatgatgaacagcaagaagtaccctgtggcccacttcatcgaccagaccctgaaggccaaggtgggccagctgcagctgagccacaacctgagcctggtgatcctggtgccccagaacctgaagcaccggctggaggacatggagcaggccctgagccccagcgtcttcaaggccatcatggagaagctggagatgagcaagttccagcccaccctgctgaccctgccccgcatcaaggtgaccaccagccaggacatgctgagcatcatggagaagctggagttctttgacttctcctatgacctgaacctgtgtggcctgacagaggaccctgacctgcaggtgtctgccatgcagcaccagacagtgctggagctgacagagaccggggtggaggccgccgccgccagcgccatctctgtggcccggaccctgctggtgtttgaggtgcagcagcccttcctgtttgtgctgtgggaccagcagcacaagtttcctgtgttcatgggccgggtgtatgacccccgggcctag

SEQ ID NO: 995 - DNA, 483 bp, Artificial Sequence
  derived and/or modified sequence
atggccagccggctgaccctgctgaccctgctgctgctgctgctggccggggaccgggccagcagcaaccccaatgccaccagcagcagcagccaggaccctgagagcctgcaggacagaggagagggcaaggtggccaccaccgtcatcagcaagatgctgtttgtggagcccatcctggaggtgagcagcctgcccaccaccaacagcaccaccaacagcgccaccaagatcacagccaacaccacagatgagcccaccacccagcccaccacagagcccaccacccagcccaccatccagcccacccagcccaccacccagctgcccacagacagccccacccagcccaccaccggcagcttctgccccggccctgtgaccctgtgcagcgacctggagagccacagcacagaggccgtgctgggagatgccctggtggacttcagcctgaagctgtaccacgccttcagcgccatgtag

SEQ ID NO: 996 - DNA, 402 bp, Artificial Sequence
  derived and/or modified sequence
atggccagccggctgaccctgctgaccctgctgctgctgctgctggccggggaccgggccagcagcaaccccaatgccaccagcagcagcagccaggaccctgagagcctgcaggacagaggagagggcaaggtggccaccaccgtcatcagcaagatgctgtttgtggagcccatcctggaggtgagcagcctgcccaccaccaacagcaccaccaacagcgccaccaagatcacagccaacaccacagatgagcccaccacccagcccaccacagagcccaccacccagcccaccatccagcccacccagcccaccacccagctgcccacagacagccccacccagcccggctacgccctgaaccacggggagatcggcatcctgcgcttcttcctgtag

SEQ ID NO: 997 - DNA, 1503 bp, Artificial Sequence
  derived and/or modified sequence
atggccagccggctgaccctgctgaccctgctgctgctgctgctggcgggcgaccgtgcttcttctaatccaaatgccacatccagcagtagccaggatccagagtctctccaagatagaggcgaggggaaggtagcaacaaccgtgattagtaaaatgttattcgtcgaacccattctcgaggtctcctctttacctacaaccaactccacaacgaattcagccaccaagataactgccaatacaacggacgagcctaccacccagcccaccactgagcccaccacacaacccacaatccaacccacccagccaactacacagctaccgaccgactcccctacgcaacctactactggtagcttctgccctggcccagttacactgtgctcagatctggaaagccattctactgaagccgttctgggcgatgcgctagtggatttctccctgaaactctaccacgcctttagtgcgatgaaaaaagtagaaaccaacatggccttttcccccttttcaatcgcttccctgttaacgcaggtgctactcggcgccggagaaaatactaaaaccaacctagaatccatcctgagttaccctaaggactttacatgcgtccatcaagcccttaagggattcactaccaaaggagtgacatctgtgagtcagatctttcactcaccagatctggctattagagataccttcgtaaatgctagccgcacactctatagttcctctccacgggttctttctaacaacagtgacgctaatttggaactcataaacacatgggtggctaaaaacaccaacaataagatctctcgcctgctggattcacttccttccgataccagactggttctcttaaatgccatctacctttctgctaagtggaagaccacattcgaccccaagaagactcgtatggagcccttccactttaaaaattctgtcatcaaggtgcctatgatgaattctaagaagtacccggtggctcactttattgatcagacgctcaaggccaaggtgggacagcttcaactctcacataaccttagcctggtgattctggtgccccagaatctaaaacacagacttgaggacatggagcaagcattgagcccatccgtgtttaaggcaatcatggaaaagcttgagatgtctaagtttcagccaacccttttgaccttgcctaggattaaggtgactactagccaggatatgttgtccatcatggaaaaactggagtttttcgacttctcctacgatctgaacctgtgcggtctgaccgaagatccggatcttcaggtttcggctatgcagcaccagacagtgctggagcttactgaaactggagttgaagctgccgctgcatccgcgatctcagtggccaggaccctcctggtgtttgaggtccagcagccgttcctgtttgtcctctgggaccagcagcacaaatttcctgtgttcatgggtagggtgtacgatcctagggcatag

SEQ ID NO: 998 - DNA, 1518 bp, Artificial Sequence
  derived and/or modified sequence
atggccagccggctgaccctgctgaccctgctgctgctgctgctggccgggttcctggagccccaagaccgagcctccagtaaccctaacgcaacctcctcctcctcccaggacccagaatccctgcaggatcgtggcgaaggcaaagttgctaccacagtaatatccaagatgttgttcgtggagcccatcctcgaggtgtcatccctgccaacaacgaattctactactaatagcgccaccaaaattactgccaacaccaccgatgaacccaccacccagcctacgacagagcctactacacagccgacaattcagccgacacagccaactacgcaactcccgacagacagtcccacacagcctaccacaggatctttttgtcccggccctgttaccctgtgctcggatttagaatcccacagcaccgaagcggttttaggagacgcgcttgtagacttcagcctgaaactgtaccatgcattcagtgccatgaagaaggtcgagaccaacatggccttcagtccgtttagtattgcctctctgttgacccaggtgctgttgggagccggggagaataccaaaaccaatctcgagtctattctctcttacccaaaagatttcacttgcgtgcaccaagccctcaaaggcttcaccaccaagggtgtcacgtctgtcagtcaaatcttccacagcccagatcttgcaattcgggacacttttgtgaacgcaagcagaaccttatattctagctcgcctagagtgctctccaacaattccgacgcgaacctcgagctgatcaacacctgggtggcgaagaatactaataacaaaatttctaggctgctggactcattgccctccgacacgcggttggttctcctaaacgccatctacctatccgccaaatggaaaacaacctttgatccaaagaagacacgcatggagccatttcatttcaagaacagcgtaatcaaagtgccaatgatgaacagtaaaaagtaccccgtggcccatttcatcgaccagactctcaaggcgaaggtggggcagctacaactgtcacataacctctccctcgtaatcctggtgccacagaacctcaagcataggctggaggatatggaacaggcccttagccccagcgtgtttaaggccattatggaaaaactcgaaatgtctaagttccagccaactctgctcacgctgccccgcatcaaagtgacaacgagtcaagatatgctcagcattatggagaaactggagttcttcgatttcagttacgaccttaatctgtgtggactaaccgaagacccggacctacaggtgagcgcgatgcagcaccagacggtgctggaactgacggagacaggtgtcgaggcggctgcggcgagcgccatcagtgtggcacgaacccttctcgtgttcgaagtccagcagccattcctctttgtgctctgggaccaacagcacaaatttcccgtgtttatgggcagggtctacgatccaagagcatag

SEQ ID NO: 999 - DNA, 1347 bp, Artificial Sequence
  derived and/or modified sequence
atgctgttcgtggagcccatcctggaggtgagcagcctgcccaccacgaactcgaccactaactccgcaacaaaaatcactgccaatacaacagatgagcccaccacacagcccacgacagaaccaacaacccagcccaccatccaacctactcaacccactacacagctgcctactgacagccctacccaacctacaactggcagcttctgtccagggccagtaaccctatgctctgacctcgaatcacactcaaccgaggccgtcttgggggacgccctggtcgacttttcacttaagttgtaccacgcattcagtgctatgaagaaggtagagaccaatatggccttttctccctttagtatcgcctcgcttcttactcaagtgctgctgggcgctggagagaatacgaagacgaatttggagtccattttatcataccccaaggactttacttgtgtgcatcaggcattgaagggttttacgactaagggggtgacttccgtgtctcagattttccacagccctgatcttgccattcgcgatacgttcgtgaatgcaagtagaactctgtacagctcttccccaagggtgcttagcaataattccgatgcaaacttggagttgatcaacacatgggtagcaaaaaataccaacaacaagatctcaagactgcttgatagcctgccctctgacacccgcttggtgctattgaatgcaatctacctaagcgctaagtggaaaacgacctttgatcccaaaaaaactcggatggagcccttccatttcaaaaatagcgtcattaaagtccccatgatgaactcaaaaaaataccctgtcgctcattttatagaccaaactctgaaggccaaggtgggacagctgcaactcagccataatctgtcgttagtgattttggtgccccagaatttaaagcacaggctcgaagacatggagcaagccctgtccccatctgtgtttaaagcaattatggagaagctcgagatgtccaagttccaacccacgttactgaccttgccccgcatcaaagtaacaaccagccaggacatgctcagtattatggagaagctggaatttttcgatttctcttacgaccttaatctgtgcggactcaccgaagatccagaccttcaggtgtccgcaatgcagcaccagacagtgcttgaactgacagaaaccggtgtcgaagctgccgctgccagcgccatcagcgtcgcccgtactctcctggttttcgaagtacaacaacccttcttattcgttttatgggatcagcaacacaaattccccgtctttatgggcagagtttatgaccctagggcctag

SEQ ID NO: 1000 - DNA, 483 bp, Artificial Sequence
  derived and/or modified sequence
atggccagccggctgaccctgctgaccctgctgctgctgctgctggcaggtgatcgggcaagctccaacccaaatgccacatcctcctctagtcaggaccctgagtcactgcaggaccggggagagggcaaggttgccacaacagtaatttcaaaaatgctgtttgtagagccaatactggaggtatcttccctgcctactacaaacagtacaactaacagcgccaccaagataaccgccaacaccacggacgaacccaccacacagccgactacggagcctacaacccagccgaccatacagcctacacagcccaccacccagctgcccaccgattctccaacgcagccaacaaccggctccttctgtcccggcccggtgacactgtgctcagaccttgagtcccactctaccgaggcagtgttaggcgacgctctggtagacttctctttgaaactctatcacgccttttccgccatgtag

SEQ ID NO: 1001 - DNA, 402 bp, Artificial Sequence
  derived and/or modified sequence
atggccagccggctgaccctgctgaccctgctgctgctgctgctggccggagacagggcctcttccaaccccaacgcaaccagcagctcttcccaagaccctgagagtcttcaggatagaggcgaaggcaaggtcgcaactactgtcatttccaaaatgctgttcgtagaacccatactggaggtgagctccctccctactacaaattctactacaaacagtgctactaaaatcactgccaacacgacagatgaacccacgacacagccaaccactgaacccaccacacagccaacgatccagccgacacagccgacaacacaactaccaaccgactcccctactcagccagggtacgccctgaaccacggagaaattggcatcttgagattctttctctag

SEQ ID NO: 1002 - DNA, 1503 bp, Artificial Sequence
  derived and/or modified sequence
atggctagtaggctcacgctgctcaccctcctgctgttgctgttggccggagaccgtgcctcctccaatccaaatgccacctctagcagctcccaggatcccgagagcctgcaagatagaggcgagggaaaagttgccacaaccgtaatttccaagatgctcttcgtggagccaattctcgaagtctcttccctgccaacaacaaacagcactacaaactccgccacaaagataacagcaaatactacagatgaacctaccacacaaccaacgaccgagcccacaactcagccaacaatacagccaacccagcctaccacccagctccccacagattctcctacccagccaaccactggctcattctgccccggtccggtcacactgtgttctgatttggaaagccacagcactgaggctgtcttgggagatgcactggtggacttttctttgaaactgtaccatgcttttagcgctatgaaaaaggtagaaacgaatatggccttttctcccttttctatcgcgtcccttctgactcaggtccttcttggtgcaggagagaacacaaaaaccaacttagaaagtatcttgtcttatcctaaagactttacttgtgtgcatcaggctttaaaaggcttcaccacgaaaggtgtcacaagtgtgtcccagattttccattcccctgatctggctattagggacaccttcgtgaacgcctctcgcaccctgtattccagctcccccagggtcctttccaataactccgatgcgaacctggaactgatcaacacctgggtcgccaaaaacactaacaataagatcagtcgtctcctggacagcttaccctcagacacacgcctggtgttgctgaacgctatttaccttagtgcgaagtggaaaacaacttttgacccaaaaaagaccaggatggagccgtttcatttcaaaaacagtgttataaaagtccccatgatgaactctaagaaataccccgtggcgcatttcattgaccagacgctaaaggcaaaagtcggacaattgcaactgtcgcacaatttgtccctggtaatattggtccctcagaacctaaagcaccggctcgaggacatggaacaggccctgtccccttcagtttttaaagcaatcatggaaaagctggagatgtccaaattccagcccacgctgttgaccctgcctcggatcaaagtcacaacctcccaagatatgctgagcatcatggaaaagctcgagttcttcgatttctcttacgacctgaatttatgtgggctgactgaagatcctgatctgcaggtctcagcaatgcaacaccagacggtcttagaactgactgagacaggcgtggaagccgctgccgcttctgcaatctctgtggccaggacgcttctggtgttcgaggtgcagcagccattcctttttgtgctgtgggatcagcagcataaattccccgtctttatggggagggtttacgacccacgcgcatag

SEQ ID NO: 1003 - DNA, 1518 bp, Artificial Sequence
  derived and/or modified sequence
atggcctcgcggctgacccttctcactctgttgctgctgttgctcgcgggatttctggagccacaagacagggcaagctcaaatcccaacgcgacatcctcaagctcccaggacccagagtcactccaggatagaggcgaggggaaagtggcaaccactgtgatatcaaagatgttgttcgtggaacctatactcgaggtctcaagcctgcctaccacaaactccactaccaactctgccacaaagatcacggctaatactaccgatgagcccacgacacagcccacaaccgagcccacaacacagccaactatccagcccacccaacctaccacccagctcccaaccgattctcccacccagcccacaacgggaagcttttgtccaggccctgttaccctgtgctcagatctggagtcccattctacggaggccgttctgggcgacgccctggttgatttttcattgaagctctaccacgctttcagcgctatgaaaaaggttgaaacaaatatggctttttcacctttctcaatcgctagcctccttacgcaggttcttttgggagcaggcgaaaacaccaaaacaaacctggaatctattctgtcatatccaaaagattttacatgcgttcatcaggccctgaaggggttcaccacaaagggcgtgacaagtgtaagccaaatcttccactcacccgacctggccatacgcgatacattcgttaatgcttcgcgtacactttatagttcctcaccccgagttttgtccaataactcggacgccaacctggaattaattaacacgtgggtcgccaagaatactaacaacaagatcagccgactcctggacagtctcccgagcgacactagactggtgctgttaaatgctatctatctttcagccaagtggaagactacctttgatccgaaaaagactagaatggagccattccacttcaaaaacagcgtgatcaaggtgcctatgatgaactccaagaagtacccagtggcgcatttcatcgatcaaactctcaaagccaaagtaggtcaactgcagttgtcacataatttgtctctggtgatccttgtgccccaaaacctgaaacaccgcctggaagatatggagcaggcactcagtcctagtgttttcaaggctatcatggaaaaattggagatgagcaagttccagcctacactgttaaccctgcccagaatcaaggttaccacatctcaggatatgttgtccattatggagaagctggagttttttgactttagttacgatctcaatctgtgtgggctcacagaggatcctgacctgcaggtcagcgcaatgcaacatcagaccgtccttgaactaactgagaccggagttgaggctgccgcagccagtgctatcagcgtggcacggaccctcctagtcttcgaagtgcaacagcctttccttttcgtgttatgggatcaacaacacaaatttcccgtgttcatggggagagtgtatgacccacgggcttag

SEQ ID NO: 1004 - DNA, 1347 bp, Artificial Sequence
  derived and/or modified sequence
atgctgttcgtggagcctatcttggaggtgtcttcgttaccgacaaccaattctaccactaacagtgcaacgaaaatcactgctaacacgacagacgaacccacgacccaacccaccactgaacccacaactcagcccacaatccaaccgacccagccaacgacacagttgccgacagacagtcccacacagccaaccaccggatctttttgccctggccctgtcacgttatgcagtgatcttgagtcccactcaacagaggctgttcttggagacgccctggtagatttctccttgaaattgtaccacgctttctccgcaatgaaaaaagttgagacgaacatggccttctccccattcagcatagctagcctcttgacccaggtattgctgggcgcaggagagaacactaagactaatctggaaagtatcttgtcttaccccaaggattttacttgtgtgcatcaagctctaaaaggtttcaccaccaagggcgttactagcgtgtctcaaatattccactccccagatctggcaataagggatacatttgtcaatgcttccagaacactatactctagcagtcccagggttctgtcaaataactctgatgccaatctggagctgataaatacatgggtcgccaaaaataccaacaacaaaatcagccggctgctggattctttgccttctgacactagactcgtgctgctgaacgctatctaccttagcgccaagtggaagacaacctttgatcctaagaaaacccgcatggaacccttccacttcaagaactctgtcataaaggtgccaatgatgaattccaaaaaatacccggtcgcccacttcattgatcagactctgaaggcaaaagtcggacaactgcagttaagccacaatctttcactggtcatccttgttccacagaatctcaagcaccgactggaggatatggaacaggccttgtcgccatccgtctttaaggcaatcatggaaaagttagaaatgtctaagtttcagcctacactcctcaccctcccacggattaaagtgaccaccagtcaggatatgctgtcaatcatggagaaactcgagttctttgacttttcctacgaccttaacctgtgtgggttgacagaagaccccgacctccaggtgagtgcaatgcagcatcagactgtattagaattgaccgagacaggagttgaggctgccgcagcatcagccatttctgtcgccaggacacttcttgtgtttgaagtgcagcaaccctttctgttcgtcttatgggatcagcagcataagttccctgtattcatgggcagggtctacgatccaagggcttag

SEQ ID NO: 1005 - DNA, 483 bp, Artificial Sequence
  derived and/or modified sequence
atggcctcccgcctcaccctgctgactttgctgttgctgctgctagcaggggatcgagcatcttctaatccaaatgcgacctctagctcatcacaggatcctgaatctttgcaggacaggggagaaggaaaagtagccaccaccgtgattagtaaaatgttgttcgtggaacccattctggaagtgtccagcctccccacaactaacagtaccacgaattccgccactaaaatcacagctaatacaactgacgaacctactacacaaccgactaccgagcccacgactcagcctaccatccagccaacccagcccacaacgcagctgcctacagacagccccacgcagccaacgaccggcagcttttgcccaggccctgtcacattatgctctgacctggaatcgcattccaccgaggccgtgttgggcgatgccctggttgacttcagcctgaagctgtaccacgctttttccgcaatgtag

SEQ ID NO: 1006 - DNA, 402 bp, Artificial Sequence
  derived and/or modified sequence
atggccagccggctcaccttgctgactctcctgctcctccttttagcaggagacagggcctctagcaacccaaacgccacctctagttcatcacaagatcctgaatcccttcaggatagaggagaaggaaaggtggcaaccaccgtaattagcaagatgctctttgtcgagccaatcctcgaggtgtccagcctgcctaccactaattccaccactaacagcgccacaaagataacggccaataccaccgacgaaccaaccacacagcctacgaccgagcctacaactcagccaaccatccagcctacccaacctaccacacaactgcccactgatagtcccactcaaccaggctacgcactcaatcatggtgagattggaatcttaaggttctttctctag

SEQ ID NO: 1007 - DNA, 1503 bp, Artificial Sequence
  derived and/or modified sequence
atggcaagtcgactgacgctgttgacactgctgttgctcctccttgctggcgaccgggcttcctcaaatcccaatgctactagttcatccagtcaggatcccgagtctcttcaagataggggcgagggcaaggtcgccacaacagtgatctccaaaatgctcttcgtggaaccaatcctcgaggtgtcttctctgccaaccacaaattccaccacgaattcagccaccaagattactgccaacactacggacgaacctaccacgcagccaactactgaaccgacaactcaaccaaccattcagcccacacagccaactactcaactgcctacagactctcccacccagcccactacaggctcattttgtccaggccctgtcaccctgtgttctgacttggagtctcattccactgaagccgtccttggggatgcacttgtcgactttagcttgaaactttaccacgccttttcagccatgaaaaaagttgagaccaacatggccttttcacctttctctattgcatccttgctgacccaggtcttactaggtgccggcgagaacactaagaccaatttagaatcaattttgagctaccctaaggactttacgtgtgtgcatcaggcactcaaaggcttcacaacaaagggggtcaccagcgtttcacaaatatttcacagcccagacctcgcaattcgagatacattcgtcaacgcatccaggaccctctactcttcctcccccagagtgctgtccaacaattctgacgcaaatcttgaactcatcaatacctgggttgcaaaaaatacaaacaataagatatctcggctcctggattctcttcctagcgacactcggctggttttgctcaatgctatctatctctccgccaaatggaaaaccaccttcgaccctaagaaaacccgcatggaaccatttcacttcaagaatagcgtgattaaggtgcctatgatgaatagcaagaaataccccgtcgcacacttcatcgaccaaactctgaaagccaaagtgggacagctacaactcagccataatctatcactggtgatcctcgtcccacagaatctcaagcataggctggaagacatggagcaagccctgtctccaagtgtattcaaggctattatggaaaaactggagatgagtaaattccagccaacactgcttaccctgccacgcattaaagtgaccacatcacaggacatgctttctatcatggaaaagctggaattctttgacttttcttatgacctgaacctatgtggcctcacggaagatcccgatctccaggtctcagctatgcaacaccagacagtcctggaattgacagagactggcgtagaggccgccgctgcgagtgcaatcagtgttgcccgcacattattagtttttgaagtgcaacagccttttctcttcgtgctttgggaccagcaacacaaatttccagtttttatgggccgcgtttatgatccaagggcgtag

SEQ ID NO: 1008 - DNA, 1518 bp, Artificial Sequence
  derived and/or modified sequence
atggccagcagactgacactcctcactctactgctcctgttacttgccggatttctggaaccccaagaccgcgcatcctcaaaccccaatgccacatcatccagctcccaggaccccgagagcttgcaggacaggggcgaaggcaaagtggcaacaacagtaatctccaaaatgttatttgtcgaacctattctcgaggtgagtagcctccccaccactaacagcacaacgaacagcgcaactaagatcacagcaaacacaaccgatgaacctaccacccagcccaccacagaaccgacaactcaaccgactattcagcccactcagcccaccactcagctgcctacggattccccaacccagcccacaacgggtagcttttgtcccggacccgttaccctgtgttctgatctcgagtctcacagcactgaagccgtcctgggcgatgccctagttgacttctctctcaaactctatcacgcctttagtgccatgaagaaagtggaaacaaacatggcctttagtccattttcgattgcatccttacttacgcaggtgttgctgggtgccggcgagaatacaaaaaccaacctagaatccattctgagttacccaaaggacttcacatgcgtgcatcaagcactgaagggtttcactaccaaaggggtaacctcagtatcccagatcttccactcccccgatctggctatccgcgatacctttgtgaatgcatcacggaccctttatagcagtagcccaagggtcctctccaataacagcgacgctaacctcgagctgatcaacacctgggttgcaaaaaatactaacaacaagatttccagactcctggactcattgccgagtgatacccggcttgttttattgaacgcaatctacttatccgcaaaatggaaaaccacattcgaccccaagaaaacccgtatggaaccattccacttcaagaactccgtgatcaaggttccgatgatgaactcaaagaagtatcccgtcgctcacttcatcgatcagaccttgaaggcgaaggtgggtcagttgcagctgtcccataacctgtcattagtgattcttgtaccccagaatcttaagcatcgactagaagatatggaacaggcgctctcaccgagtgtgtttaaagcaattatggaaaaacttgaaatgagcaaattccaaccgaccttactgacgctgccaagaatcaaagtcacaacaagtcaggatatgctgtccatcatggagaaattggaattcttcgacttctcatacgatttaaatctttgcgggttaacagaggatccagacctgcaagtgtctgccatgcagcatcagaccgtcctggagctgacagaaactggggtggaggccgcagcagcttccgccatttcagtggctagaaccctcttggtttttgaggtgcaacagccatttcttttcgtcctgtgggaccagcagcacaaattccccgtgtttatgggacgcgtatatgatccccgtgcctag

SEQ ID NO: 1009 - DNA, 1347 bp, Artificial Sequence
  derived and/or modified sequence
atgttgttcgttgaaccaattctggaagtctctagtttacccacaacaaatagcaccacaaactccgcgacaaaaattaccgccaataccacagacgaaccgactacacagccgacaacagagcccactacgcagcccaccattcagcccacccaacctactacccagctgcctacagattcccctacacagccgacaaccggaagtttttgccccgggcccgtgacactgtgcagcgacttagaatcccattcaactgaggcagttcttggcgatgcactggtggatttctcacttaagctttatcacgctttcagcgctatgaaaaaggtcgaaacaaacatggccttctcgccattttccatagcttctcttttgactcaggtgttactgggagccggggagaatacgaaaacgaacctggagtcaatactaagttatccgaaggattttacctgcgtacaccaggctctgaaaggctttacaaccaaaggggtcacatccgtcagccagatttttcattctcccgacctagcaatcagggatacattcgtgaacgcttcaagaacactttatagcagcagcccacgggtgctgtctaataactccgacgccaatttggagctcattaacacttgggtggccaagaacaccaacaacaaaattagccgtctcctggactccctcccatccgatacaagattagttcttctcaatgccatctacctttctgccaagtggaaaacaacatttgaccctaagaaaactaggatggagcctttccattttaagaattcagttatcaaggtacctatgatgaactctaagaaatatcctgttgcccactttattgatcagactctcaaggcaaaggtgggccagttgcagttgtcgcacaatctatccctcgttatcctggtccctcaaaatctgaagcaccgcctggaagatatggagcaagctctctccccatctgtctttaaagctataatggaaaagcttgaaatgtccaagttccagcctacactgctcacactcccacgcataaaagtcactacctcccaggacatgctgagcatcatggaaaaactggaattttttgacttctcttatgatttaaacttatgcgggttaaccgaggatcctgacctgcaggtgtctgctatgcagcaccaaaccgtcctagagctaacagaaactggcgtggaagccgctgccgcaagcgccatcagcgtggcacgtacactgcttgtctttgaagttcagcagcccttcctctttgttttgtgggatcaacaacataaatttccggtttttatgggccgagtgtacgatccaagggcctag

SEQ ID NO: 1010 - DNA, 483 bp, Artificial Sequence
  derived and/or modified sequence
atggcatcccgcctcaccctgctcacccttctactcctccttctggctggcgaccgggctagtagtaaccccaatgcaacctctagcagttctcaggatccagagtccctccaagacagaggtgaggggaaagttgcaaccactgtgatctctaaaatgttatttgtggagcctattctggaagtaagcagcctacccacaacaaattcaactaccaattccgccacgaagataacagctaacacgacagacgagccaacaactcaacctacgaccgagcccactactcaacccaccattcagcctacccagcctacaactcaactgcctaccgatagccctactcagcccacaactggctctttttgccctggccctgtgacactgtgcagtgatctggagagccacagtaccgaggcagtgttgggtgacgcactggtcgatttctctttaaaactttatcatgccttttcagccatgtag

SEQ ID NO: 1011 - DNA, 402 bp, Artificial Sequence
  derived and/or modified sequence
atggcctctcgactcaccctcctcactctcttactgttgctgttggctggagacagagcttctagcaatccaaacgccacaagttccagctcacaggacccagaaagcttgcaggaccgcggtgaaggcaaggtggccactacggtgatttccaagatgctctttgtcgaacccattctggaggtaagctctctcccaacaacaaacagcacaacgaattccgccacaaagatcacagctaacacgaccgatgagcccacaacgcagccaacaacagaacccaccacgcagcccacaatacaaccgacccagcccacgacacagcttcctactgacagccccactcaaccaggctacgccctaaaccatggagaaataggcattctgcggttttttctttag

SEQ ID NO: 1012 - DNA, 1503 bp, Artificial Sequence
  derived and/or modified sequence
atggcatccagactcacactactcacccttctcctgctgctgctcgctggagatagagcatcatccaatcctaacgctacatctagtagctcccaagacccagagtccctgcaagatcgaggcgaagggaaggtcgccaccactgtgatctccaagatgttattcgtggaaccaattctagaagtgtcctccctcccgacaaccaactcgaccacaaactcggccaccaagatcacagcgaacacaaccgatgagcccactacccagccaactaccgaaccaaccactcagcccacaatacagcccacacagccaactactcaactgcctacagactctcccacccagcccactacaggctcattttgtccaggccctgtcaccctgtgttctgacttggagtctcattccactgaagccgtccttggggatgcacttgtcgactttagcttgaaactttaccacgccttttcagccatgaaaaaagttgagaccaacatggccttttcacctttctctattgcatccttgctgacccaggtcttactaggtgccggcgagaacactaagaccaatttagaatcaattttgagctaccctaaggattttacatgcgtgcaccaggcacttaaaggattcacaaccaaaggagtcacctctgtttcacagatatttcactctcctgacttagccattcgagacaccttcgtcaacgcctcccgtactctgtatagtagttcacctagagttctgtcaaataattcagacgccaacctagagctcatcaacacatgggtcgctaaaaacactaacaacaagatctctaggctccttgacagtctgccaagtgatacaaggctcgtgttgttgaacgccatatacctcagcgccaagtggaagacaaccttcgatcctaaaaaaacgcgaatggaaccattccatttcaagaacagtgtgatcaaagtaccaatgatgaatagtaagaagtaccctgttgcccatttcatcgatcaaaccctcaaagcaaaagtcggccagctacagcttagccataacctcagcttggtgattcttgtaccacaaaaccttaaacacaggctggaggacatggaacaggctctgtccccaagcgtcttcaaagctatcatggaaaaactcgagatgtctaaatttcaacctacattacttactctaccgagaatcaaggtgactacttcacaggacatgctgagtattatggagaaacttgaattcttcgacttttcttacgatctcaatctctgcggactgaccgaagacccagatttgcaagtgtctgccatgcagcaccagactgtcctcgagttaaccgaaactggagtagaggcagcagcggccagtgccatctcggttgcacggactctgctcgtatttgaagtgcaacaaccatttctatttgtcctatgggatcagcagcataagttcccagtgtttatgggaagagtgtacgaccctagagcctag

SEQ ID NO: 1013 - DNA, 1518 bp, Artificial Sequence
  derived and/or modified sequence
atggccagcagactgacactcctcactctactgctcctgttacttgccggatttctggaaccccaagaccgcgcatcctcaaaccccaatgccacatcatccagctcccaggaccccgagagcttgcaggacaggggcgaaggcaaagtggcaacaacagtaatctccaaaatgttatttgtcgaacctattctcgaggtgagtagcctccccaccactaacagcacaacgaacagcgcaactaagatcacagcaaacacaaccgatgaacctaccacccagcccaccacagaaccgacaacccagcccactatccagccaacacaaccgactacacaactgcccactgatagtcctacacagcctaccacagggagcttttgtccaggtccagtaactctatgttctgatttagaaagccactctacagaagccgtgctgggggatgccttagttgacttctcactcaaattgtatcacgcctttagtgccatgaaaaaggtcgagactaatatggctttttcaccgttttccatcgcttccctgttaacccaggtgttactcggcgccggcgagaacacaaaaacaaatttggagagcatcctcagctatcccaaagatttcacttgtgtccatcaggccctcaaaggttttactaccaaaggagtgacttctgtttcccagatcttccatagccccgacctggccataagggatacattcgtcaacgccagccgcacactctactcttccagccccagagtcctctcaaataattcagacgccaacctggagctgatcaatacctgggtagctaaaaacactaataataagatctctcgtttattggactccctcccttctgatacaagactggtcctgctcaacgccatttacttatcagcaaagtggaaaacaacatttgatccaaagaaaaccagaatggagccattccacttcaaaaactccgttatcaaagtccctatgatgaattcaaaaaaataccccgtagcgcactttatagaccagaccttaaaggctaaggtggggcaactgcaactatcacacaatctcagcttagtaatactggtgccacagaatctgaaacaccgcctggaagacatggagcaggccctcagccctagcgttttcaaggcgatcatggaaaaactcgaaatgtcaaagtttcagcctactctcttaacgttgccaaggattaaagtgaccacaagccaggacatgctctctattatggaaaagcttgaatttttcgattttagctacgacttaaacctctgcggtctcaccgaagatcccgacctacaagtgtccgcaatgcaacatcaaaccgtgttggagttgaccgaaactggcgtggaggcagcagcagcatccgcaatcagcgtggctcgaactctgcttgtgtttgaggtacagcaacccttcctgttcgttctgtgggaccagcagcacaagtttccagtcttcatgggcagagtttatgatccaagagcctag

SEQ ID NO: 1014 - DNA, 1347 bp, Artificial Sequence
  derived and/or modified sequence
atgttattcgtagaacctattcttgaggtgagctcattaccaaccactaattccacaaccaactctgctaccaaaattaccgccaatactaccgacgaaccaaccacccaacccaccaccgaaccaactacacaacctacaattcagcccactcaaccaaccacgcaactccctaccgattctcccacccagccgacaacaggtagtttctgtcctggaccagtgaccctttgttccgacctcgaatcccattctactgaagcagttcttggagacgccctcgtggacttttcactcaaactgtaccatgcttttagcgcaatgaaaaaggtcgaaaccaacatggcctttagtccattttccatagcttccttactgacccaggtcctgctgggggcaggcgaaaacacaaagaccaatctcgaaagcattttgtcatacccaaaagattttacttgtgtccaccaagccttgaaaggcttcaccacgaaaggtgtcacttcagtcagccagattttccatagtccagatcttgccatcagagacacctttgtcaatgcctctaggaccctctactcctccagtcctcgcgtgctctcaaataattctgatgctaacctggaacttattaatacctgggtggcaaaaaacactaataataagatctctcgtctcctcgattctttaccaagtgatacaaggctggtgcttctcaacgccatatatctctctgctaaatggaagaccacattcgacccgaaaaagaccaggatggaaccttttcacttcaagaactctgtcattaaagtgccgatgatgaacagtaaaaaatatccagtagctcacttcatcgaccaaaccctgaaagccaaagtagggcagctgcaactctctcataatctgagcctggtcatattagtcccacaaaacttgaagcatcgtctcgaagatatggagcaggccctttcccctagcgtgttcaaagctataatggaaaaactcgaaatgtcgaaattccagccaaccctccttacgctacccagaataaaagtgactacctcccaggacatgctgtctatcatggaaaaactggaattctttgacttttcttatgaccttaacctttgcgggttaaccgaagatcccgacctccaggtatcggcgatgcaacaccaaacagtgctagaactgactgagacaggtgtggaagccgcagccgcatcggccatctccgtagctagaactttattggtgtttgaggtccagcagccttttctgtttgtcctctgggatcagcagcacaaattcccagttttcatgggccgagtgtacgaccctcgcgcatag

SEQ ID NO: 1015 - DNA, 483 bp, Artificial Sequence
  derived and/or modified sequence
atggcatcccgcctcaccctgctcacccttctactcctccttctggctggcgaccgggctagtagtaaccccaatgcaacctctagcagttctcaggatccagagtccctccaagacagaggtgaggggaaagttgcaaccactgtgatctctaaaatgttatttgtggagcctattctggaagtaagcagcctacccacaacaaattcaactaccaattccgccacgaagataacagctaacacgacagacgagccaacaactcaacctacgaccgagcccactactcaacccaccattcaacccactcagccaacgacccagctgcccactgattctcccacccagccaactactggttctttttgtcccggtccagttactttgtgctcagatttggaaagccattctactgaagcagtgctcggggacgccctcgttgatttttctctcaaattgtaccacgccttctccgcaatgtag

SEQ ID NO: 1016 - DNA, 402 bp, Artificial Sequence
  derived and/or modified sequence
atggcctcccgtttaacccttctcaccttactgttactccttttggcgggcgaccgggcctcaagcaatcccaacgccactagtagtagttcacaagatccggagtcattacaagatcggggggagggtaaagttgccacgacggtcatatccaaaatgctgtttgtggagccaatccttgaagtcagctcacttcctacaacaaattctacgaccaattccgcgacaaagataactgccaacacaactgatgagcctacaacacagccaaccaccgagcccacgacacagcctacaattcagcccacccaacccacaactcaactacccactgactccccaacccagcccggttatgccctcaatcacggagagatcggcattctgcgcttcttcctctag

SEQ ID NO: 1017 - DNA, 2002 bp, Artificial Sequence
  derived and/or modified sequence
aagaagaccaagcggtcagtcccattccgtcccatcctgatttacaggaactcacaccagcgatcaatcttccttaatttgtaactgggcagtgtcccgggccagccaatagctaagactgccccccccgcaccccaccctccctgaccctgggggactctctactcagtctgcactggagctgcctggtgaccagaagtttggagtccgctgacgtcgccgcccagatggcctccaggctgaccctgctgaccctcctgctgctgctgctggctggggatagagcctcctcaaatccaaatgctaccagctccagctcccaggatccagagagtttgcaagacagaggcgaagggaaggtcgcaacaacagttatctccaagatgctattcgttgaacccatcctggaggtttccagcttgccgacaaccaactcaacaaccaattcagccaccaaaataacagctaataccactgatgaacccaccacacaacccaccacagagcccaccacccaacccaccatccaacccacccaaccaactacccagctcccaacagattctcctacccagcccactactgggtccttctgcccaggacctgttactctctgctctgacttggagagtcattcaacagaggccgtgttgggggatgctttggtagatttctccctgaagctctaccacgccttctcagcaatgaagaaggtggagaccaacatggccttttccccattcagcatcgccagcctccttacccaggtcctgctcggggctggggagaacaccaaaacaaacctggagagcatcctctcttaccccaaggacttcacctgtgtccaccaggccctgaagggcttcacgaccaaaggtgtcacctcagtctctcagatcttccacagcccagacctggccataagggacacctttgtgaatgcctctcggaccctgtacagcagcagccccagagtcctaagcaacaacagtgacgccaacttggagctcatcaacacctgggtggccaagaacaccaacaacaagatcagccggctgctagacagtctgccctccgatacccgccttgtcctcctcaatgctatctacctgagtgccaagtggaagacaacatttgatcccaagaaaaccagaatggaaccctttcacttcaaaaactcagttataaaagtgcccatgatgaatagcaagaagtaccctgtggcccatttcattgaccaaactttgaaagccaaggtggggcagctgcagctctcccacaatctgagtttggtgatcctggtaccccagaacctgaaacatcgtcttgaagacatggaacaggctctcagcccttctgttttcaaggccatcatggagaaactggagatgtccaagttccagcccactctcctaacactaccccgcatcaaagtgacgaccagccaggatatgctctcaatcatggagaaattggaattcttcgatttttcttatgaccttaacctgtgtgggctgacagaggacccagatcttcaggtttctgcgatgcagcaccagacagtgctggaactgacagagactggggtggaggcggctgcagcctccgccatctctgtggcccgcaccctgctggtctttgaagtgcagcagcccttcctcttcgtgctctgggaccagcagcacaagttccctgtcttcatggggcgagtatatgaccccagggcctgagacctgcaggatcaggttagggcgagcgctacctctccagcctcagctctcagttgcagccctgctgctgcctgcctggacttggcccctgccacctcctgcctcaggtgtccgctatccaccaaaagggctccctgagggtctgggcaagggacctgcttctattagcccttctccatggccctgccatgctctccaaaccactttttgcagctttctctagttcaagttcaccagactctataaataaaacctgacagaccatgactttc

SEQ ID NO: 1018 - DNA, 1733 bp, Artificial Sequence
  derived and/or modified sequence
ctgcactggagctgcctggtgaccagaagtttggagtccgctgacgtcgccgcccagatggcctccaggctgaccctgctgaccctcctgctgctgctgctggctgggtttcttgaaccacaggatagagcctcctcaaatccaaatgctaccagctccagctcccaggatccagagagtttgcaagacagaggcgaagggaaggtcgcaacaacagttatctccaagatgctattcgttgaacccatcctggaggtttccagcttgccgacaaccaactcaacaaccaattcagccaccaaaataacagctaataccactgatgaacccaccacacaacccaccacagagcccaccacccaacccaccatccaacccacccaaccaactacccagctcccaacagattctcctacccagcccactactgggtccttctgcccaggacctgttactctctgctctgacttggagagtcattcaacagaggccgtgttgggggatgctttggtagatttctccctgaagctctaccacgccttctcagcaatgaagaaggtggagaccaacatggccttttccccattcagcatcgccagcctccttacccaggtcctgctcggggctggggagaacaccaaaacaaacctggagagcatcctctcttaccccaaggacttcacctgtgtccaccaggccctgaagggcttcacgaccaaaggtgtcacctcagtctctcagatcttccacagcccagacctggccataagggacacctttgtgaatgcctctcggaccctgtacagcagcagccccagagtcctaagcaacaacagtgacgccaacttggagctcatcaacacctgggtggccaagaacaccaacaacaagatcagccggctgctagacagtctgccctccgatacccgccttgtcctcctcaatgctatctacctgagtgccaagtggaagacaacatttgatcccaagaaaaccagaatggaaccctttcacttcaaaaactcagttataaaagtgcccatgatgaatagcaagaagtaccctgtggcccatttcattgaccaaactttgaaagccaaggtggggcagctgcagctctcccacaatctgagtttggtgatcctggtaccccagaacctgaaacatcgtcttgaagacatggaacaggctctcagcccttctgttttcaaggccatcatggagaaactggagatgtccaagttccagcccactctcctaacactaccccgcatcaaagtgacgaccagccaggatatgctctcaatcatggagaaattggaattcttcgatttttcttatgaccttaacctgtgtgggctgacagaggacccagatcttcaggtttctgcgatgcagcaccagacagtgctggaactgacagagactggggtggaggcggctgcagcctccgccatctctgtggcccgcaccctgctggtctttgaagtgcagcagcccttcctcttcgtgctctgggaccagcagcacaagttccctgtcttcatggggcgagtatatgaccccagggcctgagacctgcaggatcaggttagggcgagcgctacctctccagcctcagctctcagttgcagccctgctgctgcctgcctggacttggcccctgccacctcctgcctcaggtgtccgctatccaccaaaagggctccctgagggtctgggcaagggacctg

SEQ ID NO: 1019 - DNA, 1751 bp, Artificial Sequence
  derived and/or modified sequence
gcactggagctgcctggtgaccagaagtttggagatagagcctcctcaaatccaaatgctaccagctccagctcccaggatccagagagtttgcaagacagaggcgaagggaaggtcgcaacaacagttatctccaagatgctattcgttgaacccatcctggaggtttccagcttgccgacaaccaactcaacaaccaattcagccaccaaaataacagctaataccactgatgaacccaccacacaacccaccacagagcccaccacccaacccaccatccaacccacccaaccaactacccagctcccaacagattctcctacccagcccactactgggtccttctgcccaggacctgttactctctgctctgacttggagagtcattcaacagaggccgtgttgggggatgctttggtagatttctccctgaagctctaccacgccttctcagcaatgaagaaggtggagaccaacatggccttttccccattcagcatcgccagcctccttacccaggtcctgctcggggctggggagaacaccaaaacaaacctggagagcatcctctcttaccccaaggacttcacctgtgtccaccaggccctgaagggcttcacgaccaaaggtgtcacctcagtctctcagatcttccacagcccagacctggccataagggacacctttgtgaatgcctctcggaccctgtacagcagcagccccagagtcctaagcaacaacagtgacgccaacttggagctcatcaacacctgggtggccaagaacaccaacaacaagatcagccggctgctagacagtctgccctccgatacccgccttgtcctcctcaatgctatctacctgagtgccaagtggaagacaacatttgatcccaagaaaaccagaatggaaccctttcacttcaaaaactcagttataaaagtgcccatgatgaatagcaagaagtaccctgtggcccatttcattgaccaaactttgaaagccaaggtggggcagctgcagctctcccacaatctgagtttggtgatcctggtaccccagaacctgaaacatcgtcttgaagacatggaacaggctctcagcccttctgttttcaaggccatcatggagaaactggagatgtccaagttccagcccactctcctaacactaccccgcatcaaagtgacgaccagccaggatatgctctcaatcatggagaaattggaattcttcgatttttcttatgaccttaacctgtgtgggctgacagaggacccagatcttcaggtttctgcgatgcagcaccagacagtgctggaactgacagagactggggtggaggcggctgcagcctccgccatctctgtggcccgcaccctgctggtctttgaagtgcagcagcccttcctcttcgtgctctgggaccagcagcacaagttccctgtcttcatggggcgagtatatgaccccagggcctgagacctgcaggatcaggttagggcgagcgctacctctccagcctcagctctcagttgcagccctgctgctgcctgcctggacttggcccctgccacctcctgcctcaggtgtccgctatccaccaaaagggctccctgagggtctgggcaagggacctgcttctattagcccttctccatggccctgccatgctctccaaaccactttttgcagctttctctagttcaagttcaccagactctataaataaaacctgacagaccatg

SEQ ID NO: 1020 - DNA, 648 bp, Artificial Sequence
  derived and/or modified sequence
atgctgtttttattgttactcatgaagacgcgggggaagctttggttgtgtaaagctgagaactgcacccaagcttccccgttcaccccacctaccaggggatttgggctaaattcctggcctggcccacaaagaagaccaagcggtccgctgacgtcgccgcccagatggcctccaggctgaccctgctgaccctcctgctgctgctgctggctggggatagagcctcctcaaatccaaatgctaccagctccagctcccaggatccagagagtttgcaagacagaggcgaagggaaggtcgcaacaacagttatctccaagatgctattcgttgaacccatcctggaggtttccagcttgccgacaaccaactcaacaaccaattcagccaccaaaataacagctaataccactgatgaacccaccacacaacccaccacagagcccaccacccaacccaccatccaacccacccaaccaactacccagctcccaacagattctcctacccagcccactactgggtccttctgcccaggacctgttactctctgctctgacttggagagtcattcaacagaggccgtgttgggggatgctttggtagatttctccctgaagctctaccacgccttctcagcaatga

SEQ ID NO: 1021 - DNA, 634 bp, Artificial Sequence
  derived and/or modified sequence
atggcctccaggctgaccctgctgaccctcctgctgctgctgctggctggggatagagcctcctcaaatccaaatgctaccagctccagctcccaggatccagagagtttgcaagacagaggcgaagggaaggtcgcaacaacagttatctccaagatgctattcgttgaacccatcctggaggtttccagcttgccgacaaccaactcaacaaccaattcagccaccaaaataacagctaataccactgatgaacccaccacacaacccaccacagagcccaccacccaacccaccatccaacccacccaaccaactacccagctcccaacagattctcctacccagccaggatatgctctcaatcatggagaaattggaattcttcgatttttcttatgaccttaacctgtgtgggctgacagaggacccagatcttcaggtttctgcgatgcagcaccagacagtgctggaactgacagagactggggtggaggcggctgcagcctccgccatctctgtggcccgcaccctgctggtctttgaagtgcagcagcccttcctcttcgtgctctgggaccagcagcacaagttccctgtcttcatggggcgagtatatgaccccagggcctga

SEQ ID NO: 1022 - RNA, 1503 nt, Artificial Sequence
  derived and/or modified sequence
auggcaagucgacugacgcuguugacacugcuguugcuccuccuugcuggcgaccgggcuuccucaaaucccaaugcuacuaguucauccagucaggaucccgagucucuucaagauaggggcgagggcaaggucgccacaacagugaucuccaaaaugcucuucguggaaccaauccucgaggugucuucucugccaaccacaaauuccaccacgaauucagccaccaagauuacugccaacacuacggacgaaccuaccacgcagccaacuacugaaccgacaacucaaccaaccauucagcccacacagccaacuacucaacugccuacagacucucccacccagcccacuacaggcucauuuuguccaggcccugucacccuguguucugacuuggagucucauuccacugaagccguccuuggggaugcacuugucgacuuuagcuugaaacuuuaccacgccuuuucagccaugaaaaaaguugagaccaacauggccuuuucaccuuucucuauugcauccuugcugacccaggucuuacuaggugccggcgagaacacuaagaccaauuuagaaucaauuuugagcuacccuaaggacuuuacgugugugcaucaggcacucaaaggcuucacaacaaagggggucaccagcguuucacaaauauuucacagcccagaccucgcaauucgagauacauucgucaacgcauccaggacccucuacucuuccucccccagagugcuguccaacaauucugacgcaaaucuugaacucaucaauaccuggguugcaaaaaauacaaacaauaagauaucucggcuccuggauucucuuccuagcgacacucggcugguuuugcucaaugcuaucuaucucuccgccaaauggaaaaccaccuucgacccuaagaaaacccgcauggaaccauuucacuucaagaauagcgugauuaaggugccuaugaugaauagcaagaaauaccccgucgcacacuucaucgaccaaacucugaaagccaaagugggacagcuacaacucagccauaaucuaucacuggugauccucgucccacagaaucucaagcauaggcuggaagacauggagcaagcccugucuccaaguguauucaaggcuauuauggaaaaacuggagaugaguaaauuccagccaacacugcuuacccugccacgcauuaaagugaccacaucacaggacaugcuuucuaucauggaaaagcuggaauucuuugacuuuucuuaugaccugaaccuauguggccucacggaagaucccgaucuccaggucucagcuaugcaacaccagacaguccuggaauugacagagacuggcguagaggccgccgcugcgagugcaaucaguguugcccgcacauuauuaguuuuugaagugcaacagccuuuucucuucgugcuuugggaccagcaacacaaauuuccaguuuuuaugggccgcguuuaugauccaagggcguag

SEQ ID NO: 1023 - RNA, 1518 nt, Artificial Sequence
  derived and/or modified sequence
auggccagcagacugacacuccucacucuacugcuccuguuacuugccggauuucuggaaccccaagaccgcgcauccucaaaccccaaugccacaucauccagcucccaggaccccgagagcuugcaggacaggggcgaaggcaaaguggcaacaacaguaaucuccaaaauguuauuugucgaaccuauucucgaggugaguagccuccccaccacuaacagcacaacgaacagcgcaacuaagaucacagcaaacacaaccgaugaaccuaccacccagcccaccacagaaccgacaacucaaccgacuauucagcccacucagcccaccacucagcugccuacggauuccccaacccagcccacaacggguagcuuuugucccggacccguuacccuguguucugaucucgagucucacagcacugaagccguccugggcgaugcccuaguugacuucucucucaaacucuaucacgccuuuagugccaugaagaaaguggaaacaaacauggccuuuaguccauuuucgauugcauccuuacuuacgcagguguugcugggugccggcgagaauacaaaaaccaaccuagaauccauucugaguuacccaaaggacuucacaugcgugcaucaagcacugaaggguuucacuaccaaagggguaaccucaguaucccagaucuuccacucccccgaucuggcuauccgcgauaccuuugugaaugcaucacggacccuuuauagcaguagcccaaggguccucuccaauaacagcgacgcuaaccucgagcugaucaacaccuggguugcaaaaaauacuaacaacaagauuuccagacuccuggacucauugccgagugauacccggcuuguuuuauugaacgcaaucuacuuauccgcaaaauggaaaaccacauucgaccccaagaaaacccguauggaaccauuccacuucaagaacuccgugaucaagguuccgaugaugaacucaaagaaguaucccgucgcucacuucaucgaucagaccuugaaggcgaaggugggucaguugcagcugucccauaaccugucauuagugauucuuguaccccagaaucuuaagcaucgacuagaagauauggaacaggcgcucucaccgaguguguuuaaagcaauuauggaaaaacuugaaaugagcaaauuccaaccgaccuuacugacgcugccaagaaucaaagucacaacaagucaggauaugcuguccaucauggagaaauuggaauucuucgacuucucauacgauuuaaaucuuugcggguuaacagaggauccagaccugcaagugucugccaugcagcaucagaccguccuggagcugacagaaacugggguggaggccgcagcagcuuccgccauuucaguggcuagaacccucuugguuuuugaggugcaacagccauuucuuuucguccugugggaccagcagcacaaauuccccguguuuaugggacgcguauaugauccccgugccuag

SEQ ID NO: 1024 - RNA, 1347 nt, Artificial Sequence
  derived and/or modified sequence
auguuguucguugaaccaauucuggaagucucuaguuuacccacaacaaauagcaccacaaacuccgcgacaaaaauuaccgccaauaccacagacgaaccgacuacacagccgacaacagagcccacuacgcagcccaccauucagcccacccaaccuacuacccagcugccuacagauuccccuacacagccgacaaccggaaguuuuugccccgggcccgugacacugugcagcgacuuagaaucccauucaacugaggcaguucuuggcgaugcacugguggauuucucacuuaagcuuuaucacgcuuucagcgcuaugaaaaaggucgaaacaaacauggccuucucgccauuuuccauagcuucucuuuugacucagguguuacugggagccggggagaauacgaaaacgaaccuggagucaauacuaaguuauccgaaggauuuuaccugcguacaccaggcucugaaaggcuuuacaaccaaaggggucacauccgucagccagauuuuucauucucccgaccuagcaaucagggauacauucgugaacgcuucaagaacacuuuauagcagcagcccacgggugcugucuaauaacuccgacgccaauuuggagcucauuaacacuuggguggccaagaacaccaacaacaaaauuagccgucuccuggacucccucccauccgauacaagauuaguucuucucaaugccaucuaccuuucugccaaguggaaaacaacauuugacccuaagaaaacuaggauggagccuuuccauuuuaagaauucaguuaucaagguaccuaugaugaacucuaagaaauauccuguugcccacuuuauugaucagacucucaaggcaaaggugggccaguugcaguugucgcacaaucuaucccucguuauccuggucccucaaaaucugaagcaccgccuggaagauauggagcaagcucucuccccaucugucuuuaaagcuauaauggaaaagcuugaaauguccaaguuccagccuacacugcucacacucccacgcauaaaagucacuaccucccaggacaugcugagcaucauggaaaaacuggaauuuuuugacuucucuuaugauuuaaacuuaugcggguuaaccgaggauccugaccugcaggugucugcuaugcagcaccaaaccguccuagagcuaacagaaacuggcguggaagccgcugccgcaagcgccaucagcguggcacguacacugcuugucuuugaaguucagcagcccuuccucuuuguuuugugggaucaacaacauaaauuuccgguuuuuaugggccgaguguacgauccaagggccuag

SEQ ID NO: 1025 - RNA, 483 nt, Artificial Sequence
  derived and/or modified sequence
auggcaucccgccucacccugcucacccuucuacuccuccuucuggcuggcgaccgggcuaguaguaaccccaaugcaaccucuagcaguucucaggauccagagucccuccaagacagaggugaggggaaaguugcaaccacugugaucucuaaaauguuauuuguggagccuauucuggaaguaagcagccuacccacaacaaauucaacuaccaauuccgccacgaagauaacagcuaacacgacagacgagccaacaacucaaccuacgaccgagcccacuacucaacccaccauucagccuacccagccuacaacucaacugccuaccgauagcccuacucagcccacaacuggcucuuuuugcccuggcccugugacacugugcagugaucuggagagccacaguaccgaggcaguguugggugacgcacuggucgauuucucuuuaaaacuuuaucaugccuuuucagccauguag

SEQ ID NO: 1026 - RNA, 402 nt, Artificial Sequence
  derived and/or modified sequence
auggccucucgacucacccuccucacucucuuacuguugcuguuggcuggagacagagcuucuagcaauccaaacgccacaaguuccagcucacaggacccagaaagcuugcaggaccgcggugaaggcaagguggccacuacggugauuuccaagaugcucuuugucgaacccauucuggagguaagcucucucccaacaacaaacagcacaacgaauuccgccacaaagaucacagcuaacacgaccgaugagcccacaacgcagccaacaacagaacccaccacgcagcccacaauacaaccgacccagcccacgacacagcuuccuacugacagccccacucaaccaggcuacgcccuaaaccauggagaaauaggcauucugcgguuuuuucuuuag

SEQ ID NO: 1027 - RNA, 1503 nt, Artificial Sequence
  derived and/or modified sequence
auggcauccagacucacacuacucacccuucuccugcugcugcucgcuggagauagagcaucauccaauccuaacgcuacaucuaguagcucccaagacccagagucccugcaagaucgaggcgaagggaaggucgccaccacugugaucuccaagauguuauucguggaaccaauucuagaaguguccucccucccgacaaccaacucgaccacaaacucggccaccaagaucacagcgaacacaaccgaugagcccacuacccagccaacuaccgaaccaaccacucagcccacaauacagcccacacagccaacuacucaacugccuacagacucucccacccagcccacuacaggcucauuuuguccaggcccugucacccuguguucugacuuggagucucauuccacugaagccguccuuggggaugcacuugucgacuuuagcuugaaacuuuaccacgccuuuucagccaugaaaaaaguugagaccaacauggccuuuucaccuuucucuauugcauccuugcugacccaggucuuacuaggugccggcgagaacacuaagaccaauuuagaaucaauuuugagcuacccuaaggauuuuacaugcgugcaccaggcacuuaaaggauucacaaccaaaggagucaccucuguuucacagauauuucacucuccugacuuagccauucgagacaccuucgucaacgccucccguacucuguauaguaguucaccuagaguucugucaaauaauucagacgccaaccuagagcucaucaacacaugggucgcuaaaaacacuaacaacaagaucucuaggcuccuugacagucugccaagugauacaaggcucguguuguugaacgccauauaccucagcgccaaguggaagacaaccuucgauccuaaaaaaacgcgaauggaaccauuccauuucaagaacagugugaucaaaguaccaaugaugaauaguaagaaguacccuguugcccauuucaucgaucaaacccucaaagcaaaagucggccagcuacagcuuagccauaaccucagcuuggugauucuuguaccacaaaaccuuaaacacaggcuggaggacauggaacaggcucuguccccaagcgucuucaaagcuaucauggaaaaacucgagaugucuaaauuucaaccuacauuacuuacucuaccgagaaucaaggugacuacuucacaggacaugcugaguauuauggagaaacuugaauucuucgacuuuucuuacgaucucaaucucugcggacugaccgaagacccagauuugcaagugucugccaugcagcaccagacuguccucgaguuaaccgaaacuggaguagaggcagcagcggccagugccaucucgguugcacggacucugcucguauuugaagugcaacaaccauuucuauuuguccuaugggaucagcagcauaaguucccaguguuuaugggaagaguguacgacccuagagccuag

SEQ ID NO: 1028 - RNA, 1518 nt, Artificial Sequence
  derived and/or modified sequence
auggccagcagacugacacuccucacucuacugcuccuguuacuugccggauuucuggaaccccaagaccgcgcauccucaaaccccaaugccacaucauccagcucccaggaccccgagagcuugcaggacaggggcgaaggcaaaguggcaacaacaguaaucuccaaaauguuauuugucgaaccuauucucgaggugaguagccuccccaccacuaacagcacaacgaacagcgcaacuaagaucacagcaaacacaaccgaugaaccuaccacccagcccaccacagaaccgacaacccagcccacuauccagccaacacaaccgacuacacaacugcccacugauaguccuacacagccuaccacagggagcuuuuguccagguccaguaacucuauguucugauuuagaaagccacucuacagaagccgugcugggggaugccuuaguugacuucucacucaaauuguaucacgccuuuagugccaugaaaaaggucgagacuaauauggcuuuuucaccguuuuccaucgcuucccuguuaacccagguguuacucggcgccggcgagaacacaaaaacaaauuuggagagcauccucagcuaucccaaagauuucacuuguguccaucaggcccucaaagguuuuacuaccaaaggagugacuucuguuucccagaucuuccauagccccgaccuggccauaagggauacauucgucaacgccagccgcacacucuacucuuccagccccagaguccucucaaauaauucagacgccaaccuggagcugaucaauaccuggguagcuaaaaacacuaauaauaagaucucucguuuauuggacucccucccuucugauacaagacugguccugcucaacgccauuuacuuaucagcaaaguggaaaacaacauuugauccaaagaaaaccagaauggagccauuccacuucaaaaacuccguuaucaaagucccuaugaugaauucaaaaaaauaccccguagcgcacuuuauagaccagaccuuaaaggcuaagguggggcaacugcaacuaucacacaaucucagcuuaguaauacuggugccacagaaucugaaacaccgccuggaagacauggagcaggcccucagcccuagcguuuucaaggcgaucauggaaaaacucgaaaugucaaaguuucagccuacucucuuaacguugccaaggauuaaagugaccacaagccaggacaugcucucuauuauggaaaagcuugaauuuuucgauuuuagcuacgacuuaaaccucugcggucucaccgaagaucccgaccuacaaguguccgcaaugcaacaucaaaccguguuggaguugaccgaaacuggcguggaggcagcagcagcauccgcaaucagcguggcucgaacucugcuuguguuugagguacagcaacccuuccuguucguucugugggaccagcagcacaaguuuccagucuucaugggcagaguuuaugauccaagagccuag

SEQ ID NO: 1029 - RNA, 1347 nt, Artificial Sequence
  derived and/or modified sequence
auguuauucguagaaccuauucuugaggugagcucauuaccaaccacuaauuccacaaccaacucugcuaccaaaauuaccgccaauacuaccgacgaaccaaccacccaacccaccaccgaaccaacuacacaaccuacaauucagcccacucaaccaaccacgcaacucccuaccgauucucccacccagccgacaacagguaguuucuguccuggaccagugacccuuuguuccgaccucgaaucccauucuacugaagcaguucuuggagacgcccucguggacuuuucacucaaacuguaccaugcuuuuagcgcaaugaaaaaggucgaaaccaacauggccuuuaguccauuuuccauagcuuccuuacugacccagguccugcugggggcaggcgaaaacacaaagaccaaucucgaaagcauuuugucauacccaaaagauuuuacuuguguccaccaagccuugaaaggcuucaccacgaaaggugucacuucagucagccagauuuuccauaguccagaucuugccaucagagacaccuuugucaaugccucuaggacccucuacuccuccaguccucgcgugcucucaaauaauucugaugcuaaccuggaacuuauuaauaccuggguggcaaaaaacacuaauaauaagaucucucgucuccucgauucuuuaccaagugauacaaggcuggugcuucucaacgccauauaucucucugcuaaauggaagaccacauucgacccgaaaaagaccaggauggaaccuuuucacuucaagaacucugucauuaaagugccgaugaugaacaguaaaaaauauccaguagcucacuucaucgaccaaacccugaaagccaaaguagggcagcugcaacucucucauaaucugagccuggucauauuagucccacaaaacuugaagcaucgucucgaagauauggagcaggcccuuuccccuagcguguucaaagcuauaauggaaaaacucgaaaugucgaaauuccagccaacccuccuuacgcuacccagaauaaaagugacuaccucccaggacaugcugucuaucauggaaaaacuggaauucuuugacuuuucuuaugaccuuaaccuuugcggguuaaccgaagaucccgaccuccagguaucggcgaugcaacaccaaacagugcuagaacugacugagacagguguggaagccgcagccgcaucggccaucuccguagcuagaacuuuauugguguuugagguccagcagccuuuucuguuuguccucugggaucagcagcacaaauucccaguuuucaugggccgaguguacgacccucgcgcauag

SEQ ID NO: 1030 - RNA, 483 nt, Artificial Sequence
  derived and/or modified sequence
auggcaucccgccucacccugcucacccuucuacuccuccuucuggcuggcgaccgggcuaguaguaaccccaaugcaaccucuagcaguucucaggauccagagucccuccaagacagaggugaggggaaaguugcaaccacugugaucucuaaaauguuauuuguggagccuauucuggaaguaagcagccuacccacaacaaauucaacuaccaauuccgccacgaagauaacagcuaacacgacagacgagccaacaacucaaccuacgaccgagcccacuacucaacccaccauucaacccacucagccaacgacccagcugcccacugauucucccacccagccaacuacugguucuuuuugucccgguccaguuacuuugugcucagauuuggaaagccauucuacugaagcagugcucggggacgcccucguugauuuuucucucaaauuguaccacgccuucuccgcaauguag

SEQ ID NO: 1031 - RNA, 402 nt, Artificial Sequence
  derived and/or modified sequence
auggccucccguuuaacccuucucaccuuacuguuacuccuuuuggcgggcgaccgggccucaagcaaucccaacgccacuaguaguaguucacaagauccggagucauuacaagaucggggggaggguaaaguugccacgacggucauauccaaaaugcuguuuguggagccaauccuugaagucagcucacuuccuacaacaaauucuacgaccaauuccgcgacaaagauaacugccaacacaacugaugagccuacaacacagccaaccaccgagcccacgacacagccuacaauucagcccacccaacccacaacucaacuacccacugacuccccaacccagcccgguuaugcccucaaucacggagagaucggcauucugcgcuucuuccucuag

SEQ ID NO: 1032 - protein, 752 aa, Artificial Sequence
  derived and/or modified sequence
MGPLMVLFCLLFLYPGLADSAPSCPQNVNISGGTFTLSHGWAPGSLLTYSCPQGLYPSPASRLCKSSGQWQTPGATRSLSKAVCKPVRCPAPVSFENGIYTPRLGSYPVGGNVSFECEDGFILRGSPVRQCRPNGMWDGETAVCDNGAGHCPNPGISLGAVRTGFRFGHGDKVRYRCSSNLVLTGSSERECQGNGVWSGTEPICRQPYSYDFPEDVAPALGTSFSHMLGATNPTQKTKESLGRKIQIQRSGHLNLYLLLDCSQSVSENDFLIFKESASLMVDRIFSFEINVSVAIITFASEPKVLMSVLNDNSRDMTEVISSLENANYKDHENGTGTNTYAALNSVYLMMNNQMRLLGMETMAWQEIRHAIILLTDGKSNMGGSPKTAVDHIREILNINQKRNDYLDIYAIGVGKLDVDWRELNELGSKKDGERHAFILQDTKALHQVFEHMLDVSKLTDTICGVGNMSANASDQERTPWHVTIKPKSQETCRGALISDQWVLTAAHCFRDGNDHSLWRVNVGDPKSQWGKEFLIEKAVISPGFDVFAKKNQGILEFYGDDIALLKLAQKVKMSTHARPICLPCTMEANLALRRPQGSTCRDHENELLNKQSVPAHFVALNGSKLNINLKMGVEWTSCAEVVSQEKTMFPNLTDVREVVTDQFLCSGTQEDESPCKGESGGAVFLERRFRFFQVGLVSWGLYNPCLGSADKNSRKRAPRSKVPPPRDFHINLFRMQPWLRQHLGDVLNFLPL

SEQ ID NO: 1033 - protein, 139 aa, Artificial Sequence
  derived and/or modified sequence
MGPLMVLFCLLFLYPGLADSAPSCPQNVNISGGTFTLSHGWAPGSLLTYSCPQGLYPSPASRLCKSSGQWQTPGATRSLSKAVCKPVRCPAPVSFENGIYTPRLGSYPVGGNVSFECEDGFILRGSPVRQCRPNGMWDG

SEQ ID NO: 1034 - protein, 125 aa, Artificial Sequence
  derived and/or modified sequence
MGPLMVLFCLLFLYPGLADSAPSCPQNVNISGGTFTLSHGWAPGSLLTYSCPQGLYPSPASRLCKSSGQWQTPGATRSLSKAVCKPGHCPNPGISLGAVRTGFRFGHGDKVRYRCSSNLVLTGSS

SEQ ID NO: 1035 - DNA, 2259 bp, Artificial Sequence
  derived and/or modified sequence
atgggtcctcttatggtgctgttctgcctccttttcttgtatcctggcctggcggattctgcaccatcatgcccccagaacgtgaatatctcgggaggcaccttcaccctgtcacacggatgggcacctggctcactgctgacgtatagctgtccccagggactgtatccaagcccagcttctagattgtgtaagtcctcaggacagtggcagacccccggagccactagaagtctgagcaaggccgtctgtaagccagtccgctgtccagccccagtgtccttcgaaaatggcatttacactccgcgattaggcagttatcctgtgggggggaacgtcagcttcgagtgtgaggacgggttcatcctgcgcggttcaccagtgcggcagtgccgacccaacggaatgtgggacggggagaccgccgtttgtgacaacggagcagggcactgtccaaatccaggaatatccctaggtgctgtgaggaccgggtttaggttcggacacggagataaggtacggtaccgatgtagttccaacctcgttctgaccggctcaagcgagagagagtgccagggaaatggtgtttggtctgggaccgagcctatctgcagacagccatacagttatgatttcccagaagacgtggcccctgcgttgggaacctctttttcccatatgctcggtgcaacgaacccgacccagaaaactaaggaaagtctaggtcgcaaaatccagattcagagatcaggccaccttaacttatacctgctgctggattgctcacaatctgttagcgaaaacgacttcctaatctttaaggaatcagcaagtctaatggtagacagaatattcagctttgagataaacgtgtcagtcgcaatcatcactttcgcttcagaaccaaaagtactgatgtccgtgctcaacgataacagtcgggatatgaccgaagttattagttcgctcgagaatgccaactataaggaccatgaaaacggcactgggaccaacacatacgcggccctaaatagcgtctatctgatgatgaataaccagatgcggcttctgggcatggagaccatggcttggcaggaaatccgccatgccattatcttgctgaccgacggcaaaagtaacatgggcggctcacccaagaccgcggttgaccacatcagggagattctcaacatcaaccagaagcggaatgattaccttgatatatatgccataggcgtggggaagttagatgtcgattggagggagctcaacgagctcgggtccaaaaaggacggcgaacggcacgcctttatcttacaggataccaaagccctgcatcaagtgtttgaacacatgcttgacgtctctaaactgacagacaccatttgtggagtagggaacatgtccgccaatgcttccgaccaggaacggacaccgtggcacgtaaccatcaagccaaaatctcaggagacctgtcggggcgctctcattagcgaccagtgggtccttacagccgcacactgcttcagggacgggaacgaccacagcctgtggagagtaaatgtcggagatcctaagtcccaatggggaaaggagtttctcatcgaaaaggccgtcattagtccaggcttcgacgtgttcgctaaaaagaaccaagggattttggaattctacggtgatgatatcgccttgttgaagctcgcccagaaggtgaaaatgtctacgcatgcccgaccaatttgcctgccctgcaccatggaagcaaacctggctttgaggcgccctcagggctcgacatgccgcgaccatgaaaatgagttgttaaataaacaatcggtgcccgctcactttgtggctctcaatggttctaaactgaacatcaaccttaagatgggagttgagtggacatcctgtgctgaggtggtgtcacaagagaagacaatgtttcccaatctgacggacgtgagagaggtggttacggaccaatttctttgcagtggcacacaggaggatgagtctccttgcaagggggagagtggcggagccgtgtttctggagcggcgcttccggttctttcaggtgggactggtcagctggggcctttataatccctgtctgggaagtgccgataaaaatagcaggaagagagccccgcgcagcaaggtgcctccccccagggactttcacattaacctgttccgcatgcagccatggctgaggcagcacttgggtgatgtgcttaactttctccccctctag

SEQ ID NO: 1036 - DNA, 2259 bp, Artificial Sequence
  derived and/or modified sequence
atgggccccctgatggtgctgttctgcctactttttttatatccagggctcgctgattcagctccatcatgtcctcaaaatgtcaatattagcggaggcacttttacactaagtcacggatgggctcctggaagcttgttgacatatagctgtccgcagggcttgtacccttccccagcctctcggctttgcaaaagctctgggcagtggcagaccccaggcgcaacacgtagcttgagcaaggcggtgtgcaagcctgtgaggtgccccgctcccgtgagcttcgagaatggaatctacacaccacgtttgggctcctatcccgtgggaggcaacgtatcttttgagtgcgaagacggattcatcctgcgaggctctcccgtccggcagtgccggcccaatggcatgtgggacggagagaccgccgtgtgtgataatggcgcaggccattgtcctaatcctggcatctcccttggagcagttcgcactggatttcggttcgggcacggggataaagtgcgatataggtgcagctcgaacctggttctgactggctcatcagagcgagagtgtcagggcaatggagtgtggtcgggcactgagcccatttgtcggcagccctacagttatgattttcccgaggatgttgctcccgcactgggcacttcgttctctcacatgttgggcgccacaaacccaacccagaaaacaaaggaatcgctcggccgaaagattcagatccagcggagcggtcatctcaatctgtacctgctgctcgattgtagccaatccgttagcgagaatgattttctgatcttcaaagagtcagcaagcctcatggtggataggattttctcctttgagattaacgtgagcgtggctattattacattcgctagcgagcctaaggtcttaatgtcagtcctgaatgacaacagcagggacatgaccgaggtcataagttctttggaaaacgcgaattacaaggatcacgaaaacggcactggcaccaacacatacgcagctctgaacagtgtgtacctcatgatgaataaccaaatgagattgttaggcatggaaactatggcatggcaagagatcagacatgccatcattctactcactgacggtaaatcaaatatgggggggagtccgaaaaccgcggtggatcatattagggaaattcttaatattaaccaaaagcggaatgattatctggacatctacgcaataggcgtaggcaaactggatgtggactggagggagctgaatgagctggggtccaagaaagatggggagaggcatgcttttatcctgcaggacacgaaagccctgcaccaagttttcgagcacatgttagatgtatcaaagctgacggacaccatctgtggcgttggcaatatgtctgctaacgcttccgaccaggaaaggaccccctggcacgtgacaataaagccaaagagccaggagacttgtagaggggcactgatctctgatcaatgggtgttaacggcagcgcactgttttcgtgatggaaacgaccatagtttatggagggtgaatgtaggggatcctaagagtcagtggggaaaggaattccttatcgagaaggccgtgatttctcccgggttcgatgtgtttgccaagaagaatcaggggattctagagttctacggtgatgatattgcactgctgaagctcgcccagaaagtcaaaatgtctacacacgctcgacccatctgcctaccttgcaccatggaggctaatcttgccctgcgcaggcctcaaggctccacctgccgggatcatgaaaatgagctattaaacaaacagagtgtgcctgcccatttcgtggccttaaatggcagcaagcttaatataaaccttaagatgggtgtggagtggaccagctgtgctgaggtcgtgtcacaggaaaaaacaatgtttccaaacctgacagacgtccgtgaggtggttactgaccagttcctgtgtagcggcactcaagaagatgagtccccatgtaagggcgaatctgggggagccgttttcctggaacgaagatttaggttttttcaggtggggctcgtaagttggggtctctataacccgtgtttaggttctgcagacaagaattcgcgcaaaagggccccccgcagcaaagtaccccctcccagggacttccacattaatctgttcagaatgcagccatggctgaggcagcacctaggcgatgtcctgaactttcttccactatag

SEQ ID NO: 1037 - DNA, 2259 bp, Artificial Sequence
  derived and/or modified sequence
atgggccctctaatggtcttgttctgccttctgtttctgtacccagggctcgctgactctgcacccagctgtccccagaacgttaacatctcaggaggcacctttactctatcccacggttgggcacctggatccctcttgacctactcttgcccccaggggctctatccatcccccgctagccggctgtgtaagtctagcggacagtggcagacccctggtgccactaggagtctcagcaaggccgtgtgcaagcctgtgcgctgtcccgcacccgtgtctttcgagaacggcatttatacgcctcgattgggcagttacccagttggaggcaacgtcagctttgaatgcgaggacgggttcatccttcgggggagccccgtccgacagtgcaggcctaacggtatgtgggacggagagacagccgtgtgcgacaacggagctggccattgtccaaaccctggcatttccttaggcgccgtgcggaccggtttccggttcggccacggagataaggtaaggtaccgatgttcttctaatctggtgctgactggaagctctgagagggagtgtcaggggaacggtgtttggagcggtaccgagcccatctgtcggcaaccctactcctacgacttccctgaagatgtcgcccctgccctcggcacatccttctctcatatgttaggagccaccaatcccacacagaagacaaaagagagtctggggcggaagattcaaattcagaggtcaggacatctgaatctttatctgttgttggattgctctcagagtgtctcggagaatgattttttgatctttaaagagagcgcgagcctgatggtggacaggattttctccttcgagattaatgtttcagtggcaattatcacttttgccagtgaacccaaggtcctgatgtctgtccttaacgacaactcccgagatatgacagaggtgatctcctccttagaaaatgctaattacaaggaccatgaaaatggtaccggtaccaacacttacgcagcccttaatagcgtttacctaatgatgaataaccagatgcgattgctcgggatggaaactatggcctggcaagaaatccgccacgccatcattctgctcactgacggaaagagcaatatgggcggctcgcccaaaacggcggtggaccacatccgcgaaatattaaacatcaaccaaaaacgaaatgactacttggatatatacgcgattggggttgggaaactggatgtagactggcgggaactaaacgaattaggctcaaaaaaggatggcgagcggcacgcctttatattgcaggacaccaaggcgctacatcaggtgtttgaacacatgctggacgtttctaagctgaccgatacaatttgtggcgtcggaaacatgtccgcaaatgcttctgaccaggagcgtactccgtggcacgtgaccattaaaccaaaatcccaggagacgtgtaggggtgcgcttatctctgatcaatgggttctaactgccgcacattgttttcgagacgggaacgaccattccctctggcgagtgaatgtaggagatcctaaaagccagtggggtaaagagttcctcatcgaaaaagctgtgatctctccggggttcgatgtgttcgccaagaagaaccaggggatactcgaattctacggggatgacattgctctgcttaagctggcccaaaaagtaaaaatgtctacccacgctaggcctatttgcctgccctgcaccatggaggccaatcttgcattacgtaggccccagggctcaacctgtcgcgaccatgagaacgaactgctaaataagcaaagcgtacctgctcacttcgtggctctgaacggctccaagctcaatataaatttgaagatgggcgtggaatggactagttgcgctgaggtggtatcccaggaaaagacaatgtttccgaacttgacagacgtccgagaggtggtgactgaccagttcctctgctccggaacccaggaggatgagtcaccatgcaaaggagaaagtgggggcgccgttttcctggaaaggcgttttcgtttttttcaagtgggactggttagctggggactttataacccgtgtctcgggagtgccgataaaaattcacggaaacgcgctccacgttccaaggtgcctccgccccgagatttccacatcaacttgtttaggatgcagccttggctgagacagcacctgggggatgtgttgaacttcttacctctgtag

SEQ ID NO: 1038 - DNA, 2259 bp, Artificial Sequence
  derived and/or modified sequence
atgggacctctcatggtgctcttttgtcttctgttcctgtacccaggcttagccgattccgcacctagctgtccacagaacgtcaatattagcgggggtaccttcaccctcagccatggctgggcaccaggatctttgctgacttatagctgcccacaaggtctgtatccctcccccgcttctaggctctgcaagtctagcggtcagtggcagactccgggtgcgactcggagtctttccaaggccgtttgcaaaccagttcggtgtcctgcccccgtgagcttcgagaacggcatttacacccctcggctggggagctatccagtgggcgggaacgtctctttcgaatgtgaggacggtttcatcctgaggggcagccctgtgagacagtgcagacccaacggcatgtgggacggagaaaccgctgtgtgtgataacggggccgggcattgcccaaaccccggtattagtttaggagcagttaggacagggttccgcttcggacacggagacaaggtgcgatatcgatgtagctcgaatctcgtgctgacgggctctagtgagagagagtgccaagggaacggtgtgtggagtggcacggagcctatctgccgccagccatattcctacgattttccagaggatgtggcccccgcactaggcaccagctttagccatatgctgggagccaccaatcctacgcagaaaaccaaggagtctttgggcagaaagattcagatccagagaagtgggcatctcaacctctatttactgctggactgctcacagtcagtgtcagaaaacgacttcctgatcttcaaagagtctgctagcttaatggtggacaggattttttcattcgaaatcaacgtgtctgtggctatcatcaccttcgcatctgagcctaaggtcctcatgtctgtgctcaacgacaacagccgtgatatgaccgaggtaattagttccttagagaatgctaattacaaggatcatgagaatggcacaggtacgaatacctatgccgccctcaattctgtctacctcatgatgaacaatcagatgcggctgttgggcatggaaacaatggcctggcaagagatcagacatgctatcatactgctcactgatggaaagtccaatatggggggtagcccaaagactgccgtagatcacatccgtgaaattctgaatattaaccagaagaggaacgactatctggacatctacgccattggcgtgggaaagctcgacgtagattggagagagctaaatgaactaggatctaagaaagacggagagaggcatgcttttattctgcaggacacgaaggccctgcatcaggtctttgaacacatgctcgacgtgtccaaattaactgacaccatctgcggtgttggcaacatgagtgctaacgctagcgaccaggagcgtacaccctggcacgtgactattaaacccaagagtcaggaaacttgtcgtggtgcactcatttcagaccagtgggttcttaccgcggcccattgttttcgcgatggaaatgatcactctttgtggcgggtcaacgtaggagacccaaaatctcaatggggaaaggaattcctcatagagaaagcagtgatatcccccggtttcgatgtgttcgcaaagaaaaaccaggggatccttgaattttatggtgatgacattgctttactgaaacttgcacagaaggtcaagatgagcacccacgcgagacctatctgcctcccatgtactatggaagcgaatctggcgctgaggcgaccacaaggtagtacttgtagggatcacgaaaacgaacttttaaataagcagtctgtgccagcccacttcgtggctcttaatggctccaagctgaacatcaatcttaaaatgggagtggagtggacctcatgcgcagaggtggtcagccaggaaaagacaatgtttccgaatttaactgatgtgagggaagtggttaccgaccagtttctttgttccggcactcaagaggatgaaagcccttgcaagggggagtccgggggggcagtatttcttgagcggcgcttcagattcttccaggttggcttagtgtcctggggtctctacaatccttgtcttggaagcgccgacaagaactccagaaaacgtgcccccaggtctaaagtaccgcctccgagggattttcatatcaatcttttccgaatgcagccatggctacgacagcatttaggcgatgtacttaacttcctgccactttag

SEQ ID NO: 1039 - DNA, 2259 bp, Artificial Sequence
  derived and/or modified sequence
atggggcccctgatggtgttgttctgtctcctctttctctatcctgggctggcagattctgcaccttcgtgtccccagaatgtgaacatttccggcggcactttcaccctgagccacggatgggctccaggctccctcctgacctactcatgcccccaaggactgtacccttctccagcttcccgcctgtgcaagtcatccggacaatggcagacgccaggagcaacacgttccttgagcaaggccgtctgtaaacctgtcagatgtccggcccctgtaagcttcgagaatggcatctacacccccaggctggggagttaccctgtggggggtaacgtatcgtttgagtgcgaggatggctttatacttaggggcagcccggtgcggcaatgccgacccaacggaatgtgggacggggaaaccgccgtctgcgataatggcgccggccactgccctaatcctgggatcagcctgggtgccgtgaggacaggcttcaggtttggacacggcgacaaggttcggtatagatgcagttctaacttggtgctgaccggatcaagcgagagagagtgccagggaaatggtgtgtggtctggcactgagccgatatgtcgccagccctattcatacgattttcccgaagatgtagcgcccgctctgggtacctcctttagccatatgctcggggcgaccaatcctacccaaaagaccaaagaaagcctcgggcgcaagattcagatccagagatccggtcacctgaatctttacctgctcctggactgtagccagagtgtctccgaaaacgatttcctgatatttaaggaatccgcgtccctcatggtcgaccgaatcttttccttcgaaatcaatgtgagcgtggccatcattacttttgcatcagaacccaaggttctcatgtccgtgttgaatgacaactcccgggacatgaccgaggtgatttcctccttggagaatgctaactataaagatcacgaaaacgggactggaacaaacacatatgcggccttgaactcagtgtatttaatgatgaacaaccagatgaggttactgggtatggagaccatggcgtggcaggagattcggcatgccattatcctgctgaccgacggaaagtccaacatgggaggctccccaaagactgcagtcgaccatatccgagagattctgaacataaaccagaagagaaacgattacctcgacatctatgctatcggagtagggaagcttgacgttgactggcgtgagctgaatgagctaggctcaaagaaggatggtgagcggcacgcctttattctgcaggatactaaagcgcttcaccaagtgttcgagcacatgctggacgtgagcaagctgacagatactatttgcggagtgggcaatatgtctgcaaatgcatccgaccaggaacgtacaccctggcacgtcaccattaagcctaagagtcaagaaacctgcagaggcgccctcatcagcgatcaatgggtgctgacggccgcacactgctttcgtgacggaaatgaccactctctgtggcgcgtaaacgtgggagaccctaaatcccagtggggaaaggaatttcttattgaaaaagcagtcatctctccaggatttgatgtttttgccaaaaagaatcaggggatcctggagttttacggcgacgatatagctcttctaaaactggctcagaaggtgaagatgagcacgcacgctcgtccgatatgccttccttgtacaatggaggctaatctcgctctgaggaggcctcaaggatctacctgtcgtgaccatgaaaacgaactcctgaataagcagagcgttccagctcacttcgttgccctcaatggctccaagctgaatatcaacttaaagatgggggttgaatggacaagctgcgctgaggtggtttcccaagagaagacaatgttccctaacctcaccgatgtgagggaggttgtgactgaccagttcctctgttctggtacacaagaggatgagagcccttgcaaaggtgagtcaggtggggctgtcttccttgagcgacggtttaggttcttccaggtgggcctagtttcatgggggctatataatccatgccttggatctgctgataagaatagccgaaaacgggccccgcggagtaaagtgcctccacccagggattttcatatcaacctcttcaggatgcagccctggctcaggcagcacctcggagatgtgttgaactttctccctctctag

SEQ ID NO: 1040 - DNA, 2259 bp, Artificial Sequence
  derived and/or modified sequence
atgggcccgcttatggtgctgttctgtttactgttcctgtaccctgggttagctgatagcgcccccagctgcccccagaacgttaatatatccggcggaacttttacactgtcccacgggtgggcacctggctcgctgctgacttattcatgtccgcagggactgtatccttctcctgctagccggttatgcaagtcatccgggcagtggcagacccctggggcaacacgcagtctgtcgaaggccgtatgtaagcctgtgaggtgtcccgcacccgttagttttgaaaatggtatttacactcctagattaggtagctatccagtcggtggcaatgtaagctttgagtgcgaggacgggtttattcttagggggagtcctgtgcggcagtgccgcccgaacggaatgtgggatggcgaaaccgcggtgtgtgacaatggcgccggtcactgtcctaatcccggaattagtctgggtgctgtgcggaccgggtttcgctttgggcacggggataaggtgaggtaccgttgctcatccaatctggttcttaccggcagctctgaacgagagtgccaaggtaacggcgtgtggtccggcacagaaccaatctgccgccagccatacagttatgactttcccgaggacgtggctcctgcattagggaccagtttttcccacatgctgggcgcaacgaatcccactcagaagaccaaagagtccttgggccggaagatccagatacaaagatccgggcacctgaacttatacctcctcttggactgtagtcagagcgtgagtgagaacgactttttaatctttaaggagtccgcttcattgatggtcgatcgtatctttagctttgaaattaatgtgagtgtcgcgataatcacatttgcgtcagaaccaaaagtattgatgtcagtccttaacgataattccagagatatgacagaagtaatatcctctctggagaatgccaactataaggaccacgaaaacgggaccgggaccaacacttatgctgctcttaacagtgtatatctcatgatgaacaaccagatgaggctgctcggtatggaaacaatggcttggcaagaaatcagacacgccattatactcctgacggacggaaaatccaacatggggggctctccgaagacagccgttgaccacattcgcgagattctgaatatcaatcagaagcgcaatgattacttggacatctatgcaattggagtaggcaagctagatgtcgattggcgggaattgaatgagctcggaagcaaaaaagacggtgagaggcacgcttttattcttcaagatactaaggccctgcaccaggtgttcgagcatatgctcgatgtttccaagttaacagacaccatttgcggcgtgggaaatatgtcagccaacgcatccgaccaggagaggaccccatggcacgtgaccatcaaacccaaaagtcaagagacatgtcggggagcactcatctcggaccagtgggtcttgacagccgcgcattgtttcagggacggtaacgaccatagcctctggcgcgtgaatgtgggcgatccgaagtcacagtggggcaaggagtttctgatagaaaaagccgtgatctctcccggatttgacgtttttgccaagaagaatcaaggtattttggagttttatggggacgacatcgctcttttgaaactggcccagaaggttaagatgtccacccacgcacgtccgatctgtttaccctgcacgatggaagctaacttggcccttaggaggccccagggcagcacgtgcagagatcatgaaaatgagctcctcaacaagcagagtgtcccagcacactttgtggccctcaacggatccaaacttaatattaatcttaaaatgggagtcgagtggaccagctgtgctgaggtcgtctcgcaggagaaaactatgttccccaatctgaccgatgttagggaagtggtcacggatcagttcctgtgtagcggaacacaggaggacgagagtccctgcaagggggagtctgggggggcagtcttcctcgagcggaggttccggttctttcaagttgggctagttagctgggggttatataacccatgtctgggaagcgccgacaaaaactcccgcaagagggctccacggtcgaaggtgccgcccccacgtgatttccacatcaacctcttccgcatgcagccatggctcagacagcacctaggagacgtcctcaatttcttgcccctttag

SEQ ID NO: 1041 - DNA, 2259 bp, Artificial Sequence
  derived and/or modified sequence
atgggccccctgatggtcctgttttgtctgctgttcttgtatcctggtcttgccgactccgctcccagctgccctcagaatgtaaacatctcaggtggtactttcactctttcccacgggtgggctcccggcagcctgcttacctattcttgtccccaagggttatatcccagtcctgcaagccgtttgtgcaaatcctcaggccagtggcaaacccctggggccactcgatctctgtccaaggctgtgtgcaagcctgtgaggtgtcccgcacccgtgtcatttgaaaacggcatctataccccgcgactcggctcataccctgtaggcggcaatgtatcctttgagtgtgaagacgggttcatactgcgaggaagcccagtgagacagtgcaggcctaacggtatgtgggacggcgagactgcagtctgtgacaacggagccggccattgcccaaaccctggcattagcttgggagccgtgaggaccggctttcgattcgggcacggtgacaaggtcagatatcgatgtagttctaatctcgtgttaactgggagctcagaaagagagtgccaaggaaacggagtgtggagcgggaccgagcctatctgtcggcagccttatagctacgatttcccagaagacgtggccccagccttaggcacatcattttctcacatgcttggagccactaatcctacccaaaagaccaaggagagccttggtaggaaaattcagatccaacgaagcggccacttgaacttgtatctcttactggattgtagtcaatccgtcagtgaaaacgattttctcatatttaaggagtccgcctccctcatggttgatcgcatctttagttttgagattaatgtctctgttgccattatcacatttgcctctgaaccaaaggttctgatgtccgtgctgaatgataattcaagggacatgacagaagtgatctccagtctggaaaacgctaactataaagatcacgagaacggaactggaacaaatacgtatgccgcattgaatagcgtttacctgatgatgaacaaccagatgcgccttctaggaatggagaccatggcctggcaggaaataaggcacgctattatattgttgaccgacggcaagagtaacatgggcggcagcccgaagactgcagttgaccatatcagagagatcttaaatataaatcagaagagaaacgactacctggacatttacgccattggggtaggcaaactggacgtcgattggcgagagctcaacgaactgggttcaaagaaggacggtgagcgccacgcattcatccttcaggacacaaaagccctccaccaggtctttgaacacatgcttgatgtgagtaaactgacagacactatttgcggtgtgggcaacatgtccgcgaatgccagcgaccaagaacggacgccgtggcatgtcacaattaagcctaaatctcaggagacttgtaggggggctcttattagcgatcaatgggtcctcaccgctgctcactgctttcgcgacgggaacgaccactccttatggagagtgaacgtaggtgatccaaaaagtcagtggggtaaagaattcctgatcgaaaaggccgtgatctcaccaggcttcgacgtgttcgccaagaaaaatcagggtattcttgaattttatggcgatgacattgcacttctgaaactggcccaaaaagtgaaaatgtcgactcatgctcgcccgatctgtctgccttgcactatggaagccaacctggccttacggcgccctcaggggtccacatgccgcgatcacgaaaatgaactgctgaataagcagagcgtccctgcacactttgttgcgctaaacggttcaaaattgaacattaatctcaaaatgggagttgagtggacctcctgtgcagaggtggtgtcccaggagaagactatgttccccaacctcactgatgtcagagaggtagtaacagaccaatttctgtgctcgggcacccaggaagacgagtctccttgcaaaggcgaatcaggaggtgcggtattccttgagaggcgatttcggttttttcaagtaggtctggtcagttggggattgtataatccctgcttaggctctgccgataagaacagccggaaaagagctccccggagcaaagtgccgcctccccgagactttcatataaatttgtttaggatgcagccctggttgaggcagcacctcggagacgtcctcaattttttaccactctag

SEQ ID NO: 1042 - DNA, 2259 bp, Artificial Sequence
  derived and/or modified sequence
atgggccccctgatggtgctcttctgcctgctcttcctgtacccaggcctggccgacagcgcccccagctgcccccagaatgtgaacatcagcggcggcaccttcaccctgagccacggctgggcccctggcagcctgctgacctacagctgcccccagggcctgtaccccagccctgccagccggctgtgcaagagcagcggccagtggcagacccctggggccaccaggagcctgagcaaggctgtgtgcaagcctgtgcgctgcccagcccctgtgtcctttgaaaatggcatctacaccccccggctgggcagctaccctgtgggcggcaatgtgtcctttgaatgtgaagatggcttcatcctgcggggcagccctgtgcggcagtgccggcccaacggcatgtgggatggagaaacagctgtgtgtgacaacggggccggccactgccccaaccctggcatcagcctgggcgctgtgaggacaggcttccgctttggacatggagacaaggtgcgctaccgctgcagcagcaacctggtgctgaccggcagcagcgagcgggagtgccagggcaatggagtgtggagcggcacagagcccatctgccggcagccctacagctatgacttcccagaagatgtggccccagccctgggcaccagcttcagccacatgctgggcgccaccaaccccacccagaagaccaaggagagcctgggcaggaagatccagatccagaggagcggccacctgaacctgtacctgctgctggactgcagccagagcgtgtctgaaaatgacttcctgatcttcaaggagagcgccagcctgatggtggaccgcatcttctcctttgagatcaacgtgtctgtggccatcatcacctttgccagcgagcccaaggtgctgatgtctgtgctgaatgacaacagccgggacatgacagaggtgatcagcagcctggagaatgccaactacaaggaccatgaaaatggaacaggcaccaacacctatgctgccctgaacagcgtgtacctgatgatgaacaaccagatgaggctgctgggcatggagaccatggcctggcaggagatcagacatgccatcatcctgctgacagatggcaagagcaacatgggcggcagccccaagacagctgtggaccacatccgggagatcctgaacatcaaccagaagagaaatgactacctggacatctatgccatcggcgtgggcaagctggatgtggactggagggagctgaatgagctgggcagcaagaaggatggagagagacatgccttcatcctgcaggacaccaaggccctgcaccaggtgtttgagcacatgctggatgtgtccaagctgacagacaccatctgtggggtgggcaacatgtctgccaatgccagtgaccaggagaggaccccctggcacgtgaccatcaagcccaagagccaggagacctgccgcggggccctgatcagtgaccagtgggtgctgacagctgcccactgcttcagagatggaaatgaccacagcctgtggagggtgaatgtgggggaccccaagagccagtggggcaaggagttcctgattgagaaggccgtcatcagccctggctttgatgtgtttgccaagaagaaccagggcatcctggagttctatggagatgacatcgccctgctgaagctggcccagaaggtgaagatgagcacccacgcccggcccatctgcctgccctgcaccatggaggccaacctggccctgcggcggccccagggcagcacctgccgggaccatgaaaatgagctgctgaacaagcagagcgtgcctgcccactttgtggccctgaatggcagcaagctgaacatcaacctgaagatgggcgtggagtggaccagctgtgccgaggtggtgtcccaggagaagaccatgttccccaacctgacagatgtgcgggaggtggtgacagaccagttcctgtgcagcggcacccaggaggatgagagcccctgcaagggggagagcggcggcgctgtgttcctggagcggcgcttccgcttcttccaggtgggcctggtgtcctggggcctgtacaacccctgcctgggcagcgctgacaagaacagcaggaagagggcccccaggagcaaggtgcccccaccccgggacttccacatcaacctcttcaggatgcagccctggctgcggcagcacctgggagatgtgctgaacttcctgcccctgtag

SEQ ID NO: 1043 - DNA, 2259 bp, Artificial Sequence
  derived and/or modified sequence
atgggccccctgatggtgctgttctgcctgctgttcctgtaccccggactggccgacagtgcccctagctgtccacagaacgtgaacattagcggcggaactttcactctgtctcacggctgggccccaggatccttactgacatactcctgcccacagggcctgtatccctcccctgcatccaggctctgcaagtcatctggccaatggcaaacaccaggcgccacacggagccttagcaaggccgtgtgcaaaccagtcagatgccccgctcccgtttcttttgagaacggaatttacaccccccgcctgggatcttacccggtgggcggtaacgtgtccttcgagtgcgaagacggctttattctcaggggcagtcctgtgcgacagtgtcgcccaaatggaatgtgggatggagagacagctgtatgcgacaacggcgctggacattgtcccaatcctggtatctccctaggtgcagtgaggactggattcaggtttggtcatggtgacaaggtacgataccggtgctcatctaatctggtgctgacagggtcctccgaacgagagtgtcagggcaatggcgtgtggtcgggcaccgagcccatatgccgccagccttactcctatgactttcccgaagacgtggctcctgctctcggtacctcgttttctcacatgctcggtgccacaaaccctactcaaaagactaaagagtcccttggccgcaaaatacagatacaacggagtggacacctgaacctgtacctcctcctggattgctctcagagtgtatctgagaacgatttcttgatttttaaagaaagcgcgtccttaatggtggacagaatcttcagcttcgagatcaacgtcagcgtcgcaatcattacctttgccagcgagcccaaagtgctcatgagtgtgctcaatgacaattcacgggacatgactgaggttatttcttcgctcgagaacgctaactacaaagatcatgagaatgggactggtactaacacatacgccgcactgaactctgtttacctgatgatgaataatcagatgcggcttctaggcatggagaccatggcctggcaggagatacggcatgccattatcttgctgactgacggaaaaagcaatatgggcggatctcccaagactgcggtagaccacattcgagaaattttaaatatcaatcaaaaacgtaatgactatttggatatctacgctatcggcgttggaaagttggacgtggactggcgcgagctcaatgaactgggcagcaagaaagacggggagaggcacgctttcatcctccaggacaccaaagcgctgcaccaagttttcgagcacatgctcgacgtcagcaagttgacggatacgatctgtggtgtgggaaatatgtccgccaatgctagcgaccaagaaagaaccccctggcacgtgactatcaaacctaaaagccaagagacctgtcggggggctcttattagcgaccagtgggtcttgacggccgctcactgcttcagagacggtaacgatcattccttgtggagagtcaacgtgggtgaccccaagtcccaatgggggaaggaatttcttattgagaaggctgttatctctccgggatttgacgtattcgcgaagaagaatcagggcatccttgagttctacggtgatgatatagccctcttaaagctggctcagaaggttaagatgagcacacatgctcgtcctatttgtctcccctgcacaatggaggccaacctagccctgcgaagaccacagggatccacctgccgcgaccatgagaacgaactgctgaataagcagagcgtacctgcacactttgttgcactcaatggctccaagttaaacattaacctcaagatgggggtggaatggaccagctgcgctgaggtggtgtcccaagaaaagactatgtttcccaatcttacagacgtgcgggaggtagtgactgaccaattcctgtgcagcggtacccaggaggatgaatcaccttgtaagggggagtccggcggcgctgtgttcttggaacgaaggtttcgcttctttcaagttgggttggtgtcctggggcctgtacaacccatgcctaggtagtgctgacaaaaattctcgcaagcgggcacccagaagtaaagtaccgccgcctcgggattttcatatcaacctgtttcgcatgcagccatggctgcggcaacaccttggcgacgtcctcaattttctccctctctag

SEQ ID NO: 1044 - DNA, 2259 bp, Artificial Sequence
  derived and/or modified sequence
atgggccccctgatggtgctgttctgcctgctgttcctgtaccccggtctggcagattccgccccctcttgtccccagaatgtcaatataagcggagggactttcactttgagccacggctgggctccaggtagtttgctcacctactcctgtcctcaagggttatatccctctcccgcgtctagactgtgcaaatcgtcagggcagtggcagactcctggcgcgacgagaagtctctccaaagcagtgtgtaaacccgtccgatgtccagcccccgtgagcttcgaaaatggcatctatacccccaggttggggtcttacccggtggggggaaatgtgtcatttgagtgcgaggacggcttcattttgagaggttcccccgtgaggcagtgcagaccaaatggaatgtgggacggtgagaccgcagtgtgtgacaacggggccgggcattgccctaatcccggcatctcattaggcgccgtccgcaccggttttaggttcggacacggcgataaggtgcgctaccgctgtagttccaatttagtgctcaccggctcctcagagagagagtgccaaggtaacggcgtttggagtgggaccgaacccatctgtagacagccctatagctacgacttcccggaggatgtggccccagctctggggaccagcttcagccacatgctgggagccactaatcctacccagaagactaaagagtcactcggcaggaagatacagatacagcgatctggacatcttaacctttatttgctgctggattgcagtcaatcggttagcgagaatgattttctgatctttaaagaatccgcaagcctcatggtcgatcgcattttttcttttgagatcaacgtctctgtcgccatcatcacgttcgcatcagagcccaaggttctgatgagcgtattaaacgacaactctagggacatgacggaagtgatttcaagccttgaaaatgccaattataaagatcatgaaaatggaacaggaactaatacctatgccgcactcaattccgtctacctgatgatgaacaaccagatgcgcctgctgggtatggagacaatggcatggcaggaaattaggcatgccatcatactgctgaccgatggcaagagcaatatgggggggagccccaagaccgccgttgatcacattcgggagatacttaatattaaccaaaagagaaacgattatctcgatatctacgctattggcgtgggaaaactggatgtcgactggagggagctgaacgagttaggtagcaagaaggacggcgaaaggcatgcttttatcctccaagacacgaaggcattgcatcaggtttttgaacacatgcttgatgtgagcaaactgaccgacactatctgcggcgtcggaaacatgagtgcaaatgcttcggatcaggaacggaccccctggcacgtcaccatcaaacctaaaagtcaagaaacctgcaggggcgctctgatttctgaccagtgggtcttgactgcagcacactgtttcagagacggaaatgatcattctctgtggagggtgaatgtaggagaccccaagtcacagtggggaaaggagtttctgatcgagaaggcagtgatcagtccaggatttgacgtgtttgccaagaaaaatcaaggcatattggagttctacggggacgacatcgctctcctcaaactggcacaaaaagtgaagatgtccactcacgctcgacccatctgcctcccctgtaccatggaggccaatttggcgttacggcgcccccaagggagcacgtgcagagatcacgagaatgaacttcttaacaaacagtcagtcccagcacactttgtagctctgaatggcagtaagctcaacatcaacttgaaaatgggagttgaatggacctcttgtgcagaagtggtgagtcaagaaaagacaatgttccccaatctaacggatgttagggaggtggtgaccgaccaattcctgtgctctgggacgcaggaagatgaatccccatgtaagggggagagtggcggggcggtcttcctggaaagacggttccgcttttttcaggttggtttagtatcctggggtctttacaatccatgtttagggtccgccgataaaaatagcaggaagcgggcgccgagaagcaaggtacctccgcctagagatttccacatcaatttgtttaggatgcaaccatggctgcgtcagcacctgggcgatgtgctgaatttccttccactatag

SEQ ID NO: 1045 - DNA, 2259 bp, Artificial Sequence
  derived and/or modified sequence
atgggccccctgatggtgctgttctgcctgctgttcctgtaccccggcctggcagatagtgccccgtcatgcccacaaaacgtgaacataagtggaggcaccttcactctctctcatgggtgggctcccggaagcctgctcacttactcttgtcctcagggactttaccctagcccggcctcccgtctgtgcaagtcctcgggtcagtggcagacccccggcgctacccggagcctgagtaaagccgtatgcaagcctgtccgctgccctgcacctgtgagttttgagaacggaatctacacgccacgtcttggcagctacccagtaggcggaaatgtatcttttgagtgcgaagacggctttatcttacgtggttcacctgtcaggcaatgtcgccctaacggcatgtgggacggcgaaaccgcggtgtgtgacaatggggctggccattgccctaacccagggattagcctcggcgcggtgcgcaccggttttcgcttcggccatggagataaagtgcgctacagatgctctagtaacctcgtactcaccggaagctcagagagagaatgccaaggaaacggtgtttggtctgggactgaacccatctgccggcagccatattcttacgacttcccagaggacgtggccccggcattgggaacatcctttagccacatgctcggcgcgacgaatccaactcaaaaaaccaaggaaagtctcgggcgcaaaatccagatacagcgatcaggtcatcttaacctctatctgctcctggattgctcacagtccgtgtctgaaaacgactttctaatcttcaaagagagcgctagcctaatggtggacagaattttttcgtttgaaattaatgtctctgtggctattatcacatttgcatcggagccaaaggtcttaatgtcagtgcttaatgacaatagccgggatatgacagaagtgatctcatccttagagaatgcaaattataaagaccacgaaaacggtactggtacgaatacgtatgccgctctcaatagtgtatatctgatgatgaacaatcaaatgagactgcttggcatggaaactatggcctggcaggagattagacacgctatcattctcttgaccgatggcaagtcgaatatgggaggttcaccaaaaaccgctgtggatcacatcagagaaattctgaacatcaatcagaagagaaacgactacctggacatctatgctataggtgtgggtaaattggatgtagactggagggagctaaatgagcttggttctaaaaaagatggagaacgacatgctttcattttacaggatactaaagctctccatcaggtttttgagcacatgctagatgtttccaagctgaccgacaccatctgcggcgtggggaatatgagtgctaatgccagtgatcaggagcggactccctggcatgtgacaattaagcccaagtcccaggaaacatgtcgcggcgcactaatttccgaccagtgggtgctgactgccgcccactgctttagggacggaaatgaccacagtttgtggcgtgtgaatgtcggggatcccaagtcccagtgggggaaggagttcctgatagaaaaggctgtgatcagtccaggattcgacgtttttgctaagaagaaccaagggatcctagaattctacggcgacgacattgccctcctgaaattggctcaaaaagtcaagatgtctacacacgccagaccaatatgcctgccgtgcactatggaagcgaacttagccctgcgtaggccccagggttctacatgccgggatcatgagaacgagctgcttaacaagcaaagcgtgccggcacactttgtggctctgaatggatccaagctcaacatcaacctgaaaatgggggtggaatggacctcctgcgcagaggttgtcagccaggagaaaaccatgtttcctaatctcactgacgtgagggaagtggtgaccgaccagtttctgtgttctggcacccaagaagatgagtccccctgtaaaggcgaaagcgggggtgctgtgttccttgaacgccggttcagatttttccaggtgggtcttgtgagctggggtttgtataatccgtgcctggggtcagcggacaaaaactcgaggaagcgggctcctaggtcaaaggtccccccccctcgcgattttcatatcaacctttttagaatgcaaccctggctgcgacaacaccttggggatgtgctgaacttcttgcccctttag

SEQ ID NO: 1046 - DNA, 2259 bp, Artificial Sequence
  derived and/or modified sequence
atgggccccctgatggtgctgttctgcctgctgttcctgtaccccgggcttgcagacagtgccccatcttgtcctcagaatgtaaacatatccgggggcacctttacactgtcccacggctgggcgccgggaagcctccttacatattcatgtcctcagggtctgtatccatcccccgccagtaggctgtgcaaatcttcggggcagtggcagacacccggggccacccggagtctcagcaaggctgtctgcaaacctgtgcggtgcccagcaccagtcagctttgagaatggcatttatactccccggttggggagctatccggttggcggcaacgtttcctttgagtgcgaggatggattcatcctgagaggctccccagtgcgccagtgtcgccctaacggcatgtgggatggcgagacggccgtgtgtgacaatggagccggccactgtcccaatcccggtatatctttgggcgccgtccgaactgggtttagattcggacatggagataaagtgaggtatagatgcagcagtaatttggtcctgacaggatcgtcagagagggaatgccagggcaatggtgtgtggtccgggaccgaacctatttgccgccagccctacagctatgatttccccgaggatgtggcacccgccttgggaacctccttctctcatatgctgggtgctaccaaccccacgcagaaaaccaaggagagtctcggacgtaagatccaaatacagcgctctggccatcttaatttgtatctgctacttgactgtagccaatctgtctctgaaaacgatttcctgatcttcaaagaaagcgcatccctaatggtagaccgaatattttccttcgagattaacgtctctgtagcaatcattacctttgcctctgaacccaaagttctcatgtcagtcttgaacgataacagcagagatatgactgaggtgatatcttcactggagaatgcgaactacaaggatcacgagaatggtacagggaccaatacgtacgcagctctgaattctgtctaccttatgatgaataaccagatgcgcctgctcggcatggaaaccatggcctggcaggagatcaggcatgcaataatccttctgacagatggtaagagcaatatgggtggttcccccaagaccgctgtggaccatataagagagattctcaacatcaaccagaagaggaacgactacctggatatatatgccattggcgtaggcaaattggacgtggactggcgagaacttaatgagttgggaagcaagaaggacggcgagagacatgcatttatcctccaggacaccaaagcgttacaccaggtcttcgaacacatgctggatgtgtctaagctgaccgatacaatctgcggcgttggcaatatgagtgcaaatgccagcgatcaggagcggacaccgtggcatgtgacgatcaagcccaaaagccaggagacctgtcggggcgcactcattagtgaccagtgggtgttgacagctgctcactgctttagagatggaaacgaccatagcctgtggcgggtaaacgttggagaccctaagtctcagtggggtaaagagttccttattgagaaagcggtgatctcccccggatttgatgtgttcgccaagaagaaccagggtattctcgagttttatggggacgacattgcattactcaaattagcacagaaagttaagatgtcaacacacgcccgccccatttgtttgccttgtaccatggaggctaacttggctctgcgcagaccccaagggagcacatgccgcgatcatgagaacgagctgttaaataagcagtctgtgccagcacatttcgttgctttaaatggttcgaaactcaatattaatctgaagatgggcgttgaatggacgtcttgcgccgaggtcgtctcacaggagaaaaccatgtttcccaatctaaccgatgtgagggaagtcgtcacagatcaattcctttgtagcggtacccaggaagacgagtcaccttgtaagggagagtctggcggggcagtttttctggagcggaggtttcggtttttccaggttggcctggtgagttggggcttgtataacccttgccttgggagtgcagataaaaactcaagaaagagagctcctcgatccaaagtcccccctcctagagattttcacattaacctgtttagaatgcaaccctggttacgacaacaccttggtgacgttctgaattttttacccctctag

SEQ ID NO: 1047 - DNA, 2259 bp, Artificial Sequence
  derived and/or modified sequence
atgggccccctgatggtgctgttctgcctgctgttcctgtaccccggcttagccgactccgctccttcttgtccgcagaatgttaacattagcgggggaacctttaccctcagccacggatgggcacccggctcattactgacctattcatgcccccagggtctttacccatctccggcaagtcggttgtgcaaatctagtggtcaatggcaaactcccggagcgaccaggagtctatcaaaggctgtgtgcaagcctgttaggtgtccagcacctgtgtctttcgagaatgggatatatacccccaggctcgggtcctacccggtggggggcaacgtgtcattcgaatgcgaggatggcttcatcctaaggggatccccagtgcggcaatgccgccccaacggcatgtgggatggagaaaccgccgtgtgcgacaatggcgccggccattgcccaaatccaggtatttccctcggtgccgtgaggacaggattccggttcgggcatggtgataaagtgcgctatcggtgttctagcaatctagtgcttaccgggtctagcgagcgggagtgccagggtaacggcgtttggtcaggaacagaacctatttgtaggcagccctacagttacgattttcccgaagacgtcgcaccagctctgggaacttccttcagccacatgctgggtgcaaccaacccgacacagaagaccaaagagagcctcgggcggaaaattcaaatccagaggtcaggccacctgaacttgtacttgcttttagattgcagccagtccgtgagtgaaaatgactttctgatctttaaggagtctgccagcctgatggtcgataggattttctcttttgagatcaatgtctctgtcgcaatcatcacgttcgcttcagagcccaaggtgctgatgagcgtgctcaacgacaactctagagacatgaccgaggtaatctccagtcttgaaaatgccaattataaggaccatgaaaatggcacaggtactaatacatacgctgcactcaactccgtctatctgatgatgaacaaccaaatgaggttgctcggcatggagactatggcctggcaggaaattcggcacgcaatcattctgcttactgatggaaagtctaatatgggcgggtctcctaagaccgctgtggatcacattagggaaatcctcaacattaaccaaaagcgcaacgactacctcgatatctatgctattggggtaggcaagctggatgtggactggagagagctgaacgaactgggttccaaaaaggatggtgaaaggcatgctttcatcttgcaggacacgaaggctctgcaccaggtctttgagcatatgctggatgtgtccaaattgaccgacacgatctgcggggtgggcaatatgtctgccaatgcttctgaccaagaaaggacaccttggcacgtgactataaaacctaaatctcaggagacgtgtcgcggcgctctgatcagcgaccagtgggtcctcaccgctgctcactgtttccgggatggcaatgaccatagtctgtggagagtgaatgttggcgatcccaaatcccagtgggggaaggagttcctgatcgaaaaagcagtgatttcccctggcttcgacgtgtttgccaagaagaaccagggcattctggagttctatggagatgacatcgcgctgcttaaacttgcacaaaaagttaaaatgtctacacatgctagacctatttgcctgccatgcacgatggaggctaatctggcactgcgacggccccagggatctacgtgtcgcgaccacgagaatgagcttctgaataaacagtctgtgcctgctcactttgtcgccctgaacgggtccaagctgaacataaatctgaaaatgggggtggaatggacctcctgtgctgaagtggtttcacaagaaaagaccatgttccctaatttgactgacgtcagagaagtagtgacggaccagttcctatgtagcggaacccaggaggacgagtccccctgtaagggagagtctggtggagccgtgtttctggagcgccggttcaggtttttccaagtgggtctcgtaagctggggactctacaacccctgtttaggatctgctgataaaaacagccgaaaaagggcacccagaagtaaagtgccaccgccaagggacttccatattaacctcttccgaatgcagccatggttgaggcagcatctgggcgacgtcctgaattttctgcctctatag

SEQ ID NO: 1048 - DNA, 2259 bp, Artificial Sequence
  derived and/or modified sequence
atgggccccctgatggtgctgttctgcctgctgttcctgtaccccgggctggctgactcggccccctcgtgtccccagaatgtcaatattagcggtggaacctttactctgtcgcatggctgggcccctgggtctctgttaacttatagttgtccgcaaggtctatatccgtcccccgctagtcgactctgtaagtccagtggacagtggcagacccctggcgccacaaggtccctttcaaaagccgtgtgcaagcccgtgcggtgcccggcccccgtgagcttcgaaaacggcatttataccccacgtctgggatcttatcccgtggggggcaatgtatcatttgagtgcgaggacggctttatactccgtggttcacctgtccggcagtgtaggccgaatgggatgtgggacggcgagactgctgtgtgtgacaatggggcaggccattgtcccaatcctggaatttcactcggcgctgtccgcacaggatttcgatttggccacggggacaaagtccgatacaggtgctcttctaaccttgttttaacagggagttctgaaagagagtgtcagggtaacggagtgtggagcggaaccgagccaatttgcagacagccatattcttacgacttccctgaggacgtggcccctgcactgggcacctccttctcgcacatgctgggcgccaccaacccaactcagaagacaaaagaatcccttgggagaaaaatacagatccagcggtctgggcatctgaatctgtacctgctgctagattgctcacaatccgtatctgagaatgactttctaatttttaaagaatctgcctccctgatggtcgaccgcatcttcagctttgagatcaacgttagcgtggccattattacatttgcctccgaaccaaaagttctgatgtccgtgctcaatgacaactcccgagatatgacagaagtcatttccagtctcgagaatgcgaattacaaggatcacgagaatggcaccggaacaaatacatacgccgctctgaattctgtctacctgatgatgaacaatcagatgaggctactggggatggaaacaatggcctggcaggagatccggcacgctatcattttgctgactgacgggaagagcaacatgggaggatcccctaagactgccgttgatcacattagagaaattctaaatatcaaccagaaacggaatgactacctcgacatttacgctatcggggttggtaagttagacgtagattggcgtgagttgaacgagctggggagtaagaaggacggggagagacacgcctttattctgcaggatactaaagccctccaccaagtgtttgagcatatgctggacgtcagcaaactaacagacaccatttgcggcgtggggaacatgtccgccaatgcatctgaccaagaaaggacgccctggcacgtcacaattaaacccaaatctcaggagacgtgtcgcggcgccttaattagtgatcagtgggtcctcacagccgcccactgcttccgggatggtaacgatcatagcctctggagagtcaacgttggagatccaaaaagtcagtggggtaaggaattcctcatagagaaagctgtgatctctcccggatttgatgtgttcgccaaaaaaaaccaggggatcctggaattctatggggacgacatagctctactgaagctggcccagaaagtgaagatgagcacgcacgctagaccaatatgcttaccatgtactatggaagccaacttggcactgagacggccccaaggatctacatgccgagatcacgaaaatgagctactgaacaagcagtcagtccccgctcacttcgttgcactcaacgggtctaaactcaacatcaacttaaagatgggagttgaatggactagctgcgctgaggtagtctctcaagagaagactatgttcccaaatttgacagacgtgcgcgaagtggtgacagatcagttcttgtgttccggaactcaggaagacgagagtccctgtaaaggcgagtcaggcggcgctgtgtttctcgaacgccggtttcggttcttccaagtcggcctggtctcctggggtctgtacaacccatgtctgggctctgcagacaagaactctcggaaaagagcaccgagatccaaagttccgcctcctcgcgatttccacatcaatctcttccgcatgcagccatggctgaggcaacacctgggcgacgtactcaacttcctccccttgtag

SEQ ID NO: 1049 - DNA, 2259 bp, Artificial Sequence
  derived and/or modified sequence
atgggccccctgatggtgctgttctgcctgctgttcctgtaccccgggcttgcagactccgcaccatcatgtccacagaacgtgaatatttccgggggaacgtttacactgagccacggctgggcccccggtagtctgcttacctactcctgtcctcaagggttatacccctcacccgcatcgagactttgtaaatcctcaggacaatggcagacccctggggcgacccgcagtttatctaaagctgtatgtaaaccagtcaggtgccctgcaccagtctcattcgaaaatggtatttatacaccacgcctagggagttaccccgttggtggaaatgtgtccttcgagtgcgaggacggatttatcctgcggggcagccctgtgcggcagtgcagacctaacggcatgtgggacggagagacggcggtttgtgataatggagctggccattgcccaaatcctggcatctctctgggagccgtgagaacgggattcaggttcggtcatggggataaggtgagatacagatgttcttctaacctggtccttaccggatcatccgaacgtgagtgtcaaggcaatggcgtgtggagtggtaccgaaccaatatgccgtcagccttatagctatgacttcccggaagatgtggcaccagctctcgggacatcttttagccacatgttgggggccaccaacccgactcaaaaaaccaaagagagtctaggccgtaagatacagattcagcgttccggccatctgaatctgtacctcctgttggactgcagccagtcagtatccgagaacgacttcttgatttttaaagaaagcgcctccctaatggttgacagaatttttagctttgagatcaacgtgagtgtagcaatcattacctttgcatccgaaccaaaagttctcatgagtgtcctgaacgacaactcacgcgacatgacagaggtgatttctagccttgaaaacgcaaactacaaagatcacgagaacggcacgggaaccaacacgtacgccgccctgaactctgtttatctgatgatgaataatcaaatgagactcttgggaatggaaaccatggcatggcaggaaatcagacacgccataatcctgctgaccgatggaaaaagcaatatgggcggttcccctaaaaccgccgtcgatcacatacgtgagatcctcaatatcaatcagaaaagaaatgactacttagacatatacgccatcggggttggcaaattggatgttgactggagagaactcaatgaactgggttcaaaaaaggacggggagcgacacgcgttcatactgcaggataccaaggccctgcaccaggtgttcgaacacatgctggatgtgagcaaactgaccgatactatctgcggggtggggaatatgtccgcaaacgcatcggaccaggagaggacaccctggcacgtcacaatcaaacccaaaagccaggagacatgcagaggtgctctaattagcgatcagtgggtgctgaccgcagctcactgtttcagggacgggaatgatcatagcctctggcgcgttaatgtgggcgaccctaagagccagtggggaaaggaatttctcatagagaaagccgtgattagccccggctttgatgtttttgctaaaaagaatcaaggaatcctggaattttacggtgatgatatcgcactgcttaagttggctcagaaagtcaaaatgtccacacacgctcgaccgatttgtcttccatgcacgatggaggccaacctggcacttcggcggccccagggtagcacctgtagggatcacgagaatgagctgctgaataagcagtctgttccagcccactttgtggctctcaacgggtcgaaactgaatattaacctgaaaatgggggtggaatggacttcttgtgcagaggtggttagccaggaaaaaacaatgtttcccaatctgactgacgtaagagaagtggtgacagaccagtttctgtgttccggcacccaagaggatgaaagtccttgcaagggagaaagcggcggagctgtgtttctcgagaggcgcttccgattcttccaggtgggactggttagttggggtctttataatccttgcctcggctccgccgataaaaatagcaggaagagagcaccccgtagtaaagttccacccccgagggattttcatattaatctgttccgtatgcagccctggctacggcagcacctgggcgatgtattgaacttcttgcctctttag

SEQ ID NO: 1050 - DNA, 2259 bp, Artificial Sequence
  derived and/or modified sequence
atgggcccactgatggtgctattttgcctcttattcctgtatcctgggcttgctgacagcgccccatcgtgcccccaaaatgtgaatatatccggcggtaccttcacactgtctcatggttgggctccaggatcactgctgacatattcatgcccgcagggattgtaccccagcccggcaagtcgcctatgcaaatctagtgggcagtggcagacgcccggtgccacgcggtcgctcagtaaggccgtttgtaaacccgtgagatgccctgctcctgtctccttcgaaaatggaatctacactccaaggttgggatcctatcctgtaggcggtaacgtgtccttcgagtgcgaggatggctttatattaagaggcagcccagtgagacagtgtcgcccaaacggaatgtgggacggcgaaaccgcagtctgtgataatggagcgggacattgccccaaccctggaatctcactgggagctgttcgaaccggtttcagatttggtcatggggacaaggtgagatataggtgctcttccaaccttgtgctgacggggtccagcgaaagagagtgccaagggaatggggtatggtctggcacagagccaatctgtcgacagccgtactcctacgacttcccagaagacgtggcacctgctcttggcacttctttctcgcatatgctcggagccacaaaccctacacagaagaccaaggaaagtctgggacgcaaaatacagattcagcgcagcggtcatcttaacctgtatttactgctcgactgttcccagtctgtctcagagaatgactttcttatcttcaaggagtctgccagtcttatggtggaccgaattttctctttcgaaataaatgtatcagtggctattattactttcgcttctgagcccaaagtgctgatgtctgtcctgaacgacaactctagggacatgacagaagtcatctctagcttggagaatgcaaattataaagaccatgagaatggcaccgggacaaacacgtacgcggctctgaactctgtctatctcatgatgaacaatcagatgcggttgctgggtatggagaccatggcttggcaggaaattcgccacgccatcatactgctgaccgatggcaaatcgaacatgggtgggtctccaaaaactgccgtagaccatatcagggagatactgaacataaatcaaaagagaaatgattatttggatatctacgctattggagtcggcaagctggatgtcgactggagggagttgaacgaattgggttcaaagaaagatggggagcgccacgcctttatccttcaggacaccaaggccctccatcaggtgttcgagcacatgctggatgtaagtaaacttactgacaccatctgcggcgttggcaatatgagtgcaaatgcctccgatcaggaacgcacaccctggcatgtcactatcaagcccaaaagccaggagacatgcaggggagcccttatttctgatcaatgggtgctgaccgctgcccactgtttcagggacgggaatgatcactccttgtggcgcgttaacgtgggtgatccaaagtctcagtggggtaaagaatttctgattgagaaggctgtgatctccccaggttttgacgtctttgccaagaagaaccagggtattctggaattttatggagacgatatcgccctgctaaaactggctcagaaagttaagatgtctactcatgccaggccaatctgtctgccttgtacgatggaggctaatctggcccttcgcaggcctcagggctccacctgtcgggaccacgagaacgagctgctcaataagcagtccgtccccgctcactttgtggcactgaacggaagcaaactcaacattaatctcaaaatgggcgttgagtggacatcatgcgccgaggtcgtgtcccaggaaaaaaccatgtttcccaatctgacagacgttagagaagtggttacggaccagtttttgtgctctggcacacaggaggacgagtccccatgtaaaggcgaatccggcggagcagtgttcttggagaggagatttagattttttcaggtaggactagtcagctgggggttgtataacccttgccttggaagcgcagataaaaattccagaaaaagagccccacgctccaaggtccctccccctagagattttcacattaatctctttaggatgcagccctggttaaggcagcatcttggcgatgtgttaaattttttacctttgtag

SEQ ID NO: 1051 - DNA, 2259 bp, Artificial Sequence
  derived and/or modified sequence
atgggtccactgatggtgcttttctgcttactgtttctctaccccggtttagcggattcagccccttcttgtcctcagaacgttaacatctcagggggaacctttactctcagtcatggatgggccccagggtccctacttacgtattcatgtcctcaaggcctgtacccatccccggcatctcgattatgcaagtcctcaggccagtggcagaccccaggagctacaaggtcccttagtaaggccgtgtgtaagcctgtgcgctgccctgctccagtatcttttgaaaacgggatttatactccacgacttgggagctatccagtgggagggaacgtctcctttgagtgcgaggatgggttcatactgagaggcagccctgtgaggcaatgcaggcccaatggcatgtgggacggtgagacagctgtctgcgacaacggcgctggtcactgtccgaaccccggtatttcattgggtgctgtccgcaccggctttagattcgggcacggagataaggtgcgctacaggtgttcaagtaacctcgtccttacgggctctagtgagcgggaatgtcagggcaatggcgtgtggagtggtacagaaccgatctgtagacagccatactcttacgatttccctgaggatgtcgcgcctgcccttggcacttcctttagtcacatgctgggagccacaaacccgactcagaagacaaaggagtctctcggacggaagatccagattcaacgtagcggacatctgaatctctacctgctgctcgattgttctcagagtgtgtcagaaaatgactttctcatcttcaaagagtctgcgagcttaatggtcgacaggattttcagttttgaaataaacgtgtccgtggccatcatcacctttgcctctgagccaaaggtattaatgagcgtgctgaatgataactctagagatatgaccgaggtcattagctccctggagaacgccaactacaaggaccacgaaaacggaacaggtactaatacctacgccgctctaaacagcgtgtatctgatgatgaataatcagatgagacttttgggtatggaaaccatggcctggcaagaaatccgccatgccattattctcttgactgatgggaagtctaacatgggaggttcacccaaaactgccgtagaccatatacgggaaattctgaacatcaaccagaaaagaaacgactatcttgacatatatgccataggagtggggaagctggatgtcgactggcgcgaattaaatgaattgggaagcaaaaaggacggtgaacgccacgccttcatcctccaagataccaaggctctccaccaggtattcgagcatatgcttgacgtcagtaaactgacagacaccatctgcggtgtcggcaatatgagtgctaacgcctcagaccaggagcgcaccccatggcacgtaacaatcaaacctaagtcgcaggaaacttgcagaggggctctaatctctgaccagtgggtcctaacagctgcacactgcttcagggatggcaacgaccactccctgtggagagtgaacgtgggggacccaaagagtcaatggggcaaggagttcctgattgaaaaggccgtgattagccccggatttgatgttttcgctaagaaaaatcaggggattctagaattttacggcgacgatatcgccctcttgaagcttgcacagaaggtgaagatgagcacccacgccaggcctatctgcctaccttgcaccatggaagcaaatctcgccctacggcgaccacaaggcagcacatgccgggaccatgagaatgagctcttaaacaaacagtcagtaccggctcatttcgtagcgcttaacgggagtaagctgaatattaacctgaagatgggagtagaatggacgtcctgtgctgaggtagtcagtcaggaaaagaccatgtttcccaatcttactgatgtgcgtgaggtggtgacagaccaatttctgtgctccggcacacaggaagacgagagcccatgtaaaggcgagtcaggaggggctgtattcttagagcggagatttaggttcttccaggtaggattagtctcctgggggctgtacaatccttgcttaggcagcgccgataagaactctcggaagagagctcccaggtccaaagtgcctcctcccagggatttccacattaacttattccgtatgcagccttggctgagacagcacctgggggatgtccttaatttccttccactgtag

SEQ ID NO: 1052 - DNA, 2259 bp, Artificial Sequence
  derived and/or modified sequence
atgggacctttgatggtgctgttttgccttctgtttctgtacccaggtcttgctgacagcgccccttcttgtcctcagaacgtaaatatctctggaggtacctttacactaagccacggatgggctcccggtagccttctgacttactcctgcccacaaggcctgtatccatcacccgcaagccggctgtgcaaaagtagcggccagtggcagacacctggggctacaaggagtttatcaaaagccgtctgcaagcctgtcagatgccccgcacccgtgagcttcgagaatggaatttacactccgagattggggtcttacccagtgggcggtaatgtctccttcgaatgtgaggacggatttattcttagaggatcgcccgtgagacagtgtcgcccaaacggaatgtgggacggtgaaactgccgtgtgtgacaatggagctggccactgtcctaacccagggatttctttgggcgcagtgcgcaccgggtttcggttcggacacggcgacaaggtgcgctaccggtgtagcagcaatcttgtcttgaccggtagttccgaaagagaatgtcaaggtaatggagtctggtctggtacagaacccatttgccgacagccttacagctacgactttccagaggatgtagctcctgcccttggtacttctttctcccacatgttgggagccacaaatccgacgcaaaagaccaaagagtcgcttgggaggaaaattcaaatccagaggtcgggacacctgaacctgtacctccttctggattgctcccagagtgtgtctgagaatgattttctcatatttaaggagtcggcgagcctcatggtcgaccgcatctttagctttgagattaatgtgagcgtcgcaataattacctttgccagcgagcccaaagtgctcatgtcagtattgaacgataatagccgcgacatgactgaggtgattagcagtttagagaacgccaactacaaggaccacgaaaacggtacagggactaacacttacgcagccctaaacagcgtttatctaatgatgaacaatcaaatgcgcctcctgggtatggagactatggcttggcaggagattagacacgctattattctgctgacagacggtaaatcaaacatggggggatctcctaaaacagcagttgaccacattagagaaatcctgaacatcaaccagaagcgaaatgactatctggatatctatgcaattggagtcggaaagcttgatgtggactggcgggaactcaatgagctgggttccaagaaggatggggagcgccatgcttttatcttgcaggacaccaaggccctccatcaggtgttcgaacatatgcttgatgtgtcaaagcttacagacaccatttgcggggtgggcaacatgtctgccaacgccagcgaccaggagcgcaccccttggcacgtgaccattaagccgaagagccaggagacatgccggggagcgttaatctcagaccagtgggtcctcacagctgctcactgctttagggatggaaacgatcactccctttggagagtaaacgtgggtgaccccaaatcacagtggggcaaggaattccttatcgaaaaggctgtgatcagtccgggattcgatgttttcgctaaaaagaaccagggcatcctggagttctacggcgacgatattgctctgctgaaattagcacagaaggtcaaaatgtctacacacgcaaggccaatctgtcttccctgcaccatggaagccaatctggctcttcggcgaccccagggaagtacctgccgggatcacgaaaacgaacttttgaacaagcaatctgtccctgcccactttgtagccttgaatggatcaaagctcaacattaacctgaagatgggggtggagtggacaagctgcgccgaagtggtgagtcaggagaagactatgtttccaaacctgaccgatgtgcgcgaggtggtcacagaccagtttctgtgctccggaacgcaggaggatgagtcaccctgcaaaggtgaatcgggtggagccgtctttcttgaacgacgcttccgcttctttcaagtggggttggtcagctggggcctctataatccctgtctcggcagcgcagacaagaactcccgcaagcgcgctcccaggtcaaaggtgcccccacctcgggacttccatattaacttgttcagaatgcagccatggctaagacagcacctgggtgacgtactgaatttcctccccctgtag

SEQ ID NO: 1053 - DNA, 2259 bp, Artificial Sequence
  derived and/or modified sequence
atgggaccgctgatggtgcttttttgcctgttatttctctatccaggcctcgctgattcagctcccagttgtccccagaacgttaacatctccggcggaacatttaccctttctcatggctgggcccctggtagcctgttaacatatagctgccctcagggcctttatcccagtcccgctagcagactatgtaagtcctctggacagtggcaaactcccggagccacgaggtcattgtccaaggccgtgtgcaagcctgtaagatgtcccgctccagtttcattcgagaacggcatctataccccgcgtctgggaagctatcccgtgggcggtaacgtgagctttgaatgcgaggacggttttatcctgagaggatccccagtgcgccaatgcagacccaatggcatgtgggacggagaaaccgcagtttgtgacaatggagcaggacactgccctaaccccggaatctcactcggagccgtaaggacagggtttcgctttggtcatggcgataaggtccgataccgatgctcctccaatctggtgctgactggctcgtcagaacgtgagtgccagggcaatggagtatggtccggcactgaaccaatctgtcgccaaccttattcctacgatttccctgaagacgtggctcccgctctgggcaccagctttagtcacatgctgggagcgaccaaccctactcagaaaacaaaagaatctcttggcaggaagattcagatccagcgatcaggacaccttaatctttatttgttacttgactgctcccagtctgtttcagagaacgattttctcattttcaaagagtccgcttctctgatggtcgatagaatttttagctttgaaataaacgtgagtgtggctatcattacgttcgctagcgaaccaaaagtcctgatgtctgtcctcaacgataattcaagagatatgactgaagttattagtagcctggaaaacgctaattataaagaccacgagaacggcaccggtactaacacctacgctgctcttaactcggtgtatctgatgatgaacaaccagatgcgcctgctgggaatggagaccatggcatggcaagaaatcagacacgccattattctcctcacagacggcaagtcaaatatggggggtagtccgaagacagcagtagaccacatacgagaaattcttaatatcaaccagaagcggaacgattatttagatatctatgctatcggcgtagggaagttggatgtcgactggcgcgaacttaacgagctggggtccaaaaaggatggagagagacacgcattcatcctgcaagacacgaaggcgttacatcaggtgtttgagcacatgctcgacgtgtctaagttaacagataccatctgtggggtaggcaatatgagcgccaacgctagcgaccaagagcggactccatggcacgtgaccatcaaacccaaatcgcaagagacctgccgtggggctctgataagcgaccaatgggtgctgaccgccgcacattgtttcagagatggtaacgaccacagtctctggcgggtgaatgtgggcgatcctaaatcacaatggggaaaagaatttctgattgaaaaagctgtgatctcccccggttttgacgtcttcgccaagaaaaaccagggaatactggaattctatggagacgatattgcccttttaaagctggcccagaaagtgaagatgtctacacacgctcgccctatctgtctgccttgcaccatggaggctaatcttgccttacgaaggcctcaggggtcaacctgccgtgaccatgaaaacgagctgttaaacaagcaatccgtgccggctcacttcgtggcactgaacggatcaaagctgaatatcaacctgaaaatgggggtagaatggaccagctgcgctgaagtcgtgtctcaggaaaaaactatgttccccaatctgacggatgtacgagaagtggtcaccgaccaatttttgtgcagcggaacacaagaggacgagtcaccatgtaaaggtgagagtggtggcgcagtgtttctggaacgtcgctttaggttttttcaggtgggactggtgagctggggcttgtacaatccttgcctaggttcagccgacaaaaatagtcggaaacgagcgccacggtctaaggtgccgcctcctcgtgatttccatattaacctcttcagaatgcagccgtggctgcgtcagcacctgggcgacgtcctgaatttcttgccgctctag

SEQ ID NO: 1054 - DNA, 2259 bp, Artificial Sequence
  derived and/or modified sequence
atggggcctttgatggtgctgttttgtctgctgttcttgtatcctggtctggccgactcggcacctagctgccctcaaaatgtgaacatctcaggcggaaccttcacactgtctcacggctgggcacccggttcgctcctcacctactcttgtccccagggcctgtacccaagcccggcatctcgcctgtgcaaaagtagcggccagtggcagactccaggtgctacacgctctctgtctaaggcggtctgtaaaccagttaggtgtccagctcctgtgagtttcgagaatggaatctacacgcctcgcttgggctcctacccagtgggaggcaacgtgtcattcgagtgtgaggacggtttcattcttcggggaagcccggtccgccagtgcagaccgaacggaatgtgggacggggagaccgctgtctgtgacaacggtgcgggtcactgccccaaccctggaatctcactgggagccgtgagaacgggctttcggtttggacacggagataaagtaaggtatagatgtagctccaacctggtacttacaggcagcagtgaaagggagtgtcaggggaatggtgtgtggtctggcaccgagcccatttgcagacaaccctattcctacgattttccggaggacgtcgcaccagccctcggcactagtttctctcatatgctcggggcaaccaatcctacacaaaaaacgaaggagtcactgggccgaaagatccaaattcagagaagcggacacctgaacctgtacctgctacttgactgttctcagtctgtgagcgagaacgacttcctcattttcaaagagtctgcgagtctgatggtagaccgcatcttctcttttgagattaacgtatctgtcgctattattacttttgcatccgagccaaaagttctgatgtcagtattgaacgacaattccagggatatgaccgaagtcataagctcactggagaacgctaattacaaggatcacgagaatgggaccggcacaaacacttacgctgccctcaactccgtttatcttatgatgaacaaccagatgaggcttctgggcatggagaccatggcatggcaggaaattcggcatgcaattattctactgacggatgggaagtccaatatgggcggtagcccgaagactgccgttgaccatattagagaaatcttaaacataaaccaaaagaggaacgattatctggacatctacgctatcggcgttggcaaactcgatgtcgattggagagagctgaatgagctaggttctaagaaagatggcgaacggcatgcattcattctgcaggacacaaaagctctccaccaggtcttcgagcacatgctggacgtgtcgaaactcacagacacaatctgcggcgtcgggaacatgagcgccaacgccagcgaccaggagcgcaccccctggcacgtgacaataaagcccaagtcacaggagacctgccgaggtgcgctgatatcggatcagtgggtgttgacagccgcacactgctttagagacggcaatgatcactctctttggcgcgtaaacgtaggagaccctaagtcccagtggggaaaggagtttctgattgagaaagcagttatctcccccggatttgacgtgttcgccaaaaagaaccaggggatcctggagttttatggcgacgacattgccctgcttaaactcgcccagaaggtcaaaatgtccactcacgcacgacccatctgtctcccttgtactatggaggcaaacctggccctgcggagaccccagggctctacatgccgcgaccacgaaaatgagctcctcaacaagcagagtgtccctgcccacttcgtggccctgaacgggtctaaattaaatattaaccttaaaatgggcgtggagtggactagctgcgctgaggtggtgtctcaggaaaaaacaatgttcccaaatctgaccgatgttagagaggtcgtcacagatcaatttctctgtagcggaacccaggaagacgagagtccctgtaagggtgagagcggaggcgctgtgttcctggagagacgctttcgcttttttcaggtgggcttagtaagctggggcctgtataatccctgcctcgggagtgcagataagaattcgaggaagcgggctccccgatctaaagtgccgcctcccagggactttcatatcaacttgttccgaatgcaaccttggttaagacaacacctgggcgatgtactcaatttcctacccctctag

SEQ ID NO: 1055 - DNA, 2259 bp, Artificial Sequence
  derived and/or modified sequence
atgggtccactcatggtgctgttttgtttgctctttctctatcctggcctagccgatagtgctccaagctgtcctcaaaacgtgaatatttcagggggaactttcacactgtcacacgggtgggccccagggtccctgctaacctattcttgtccacagggactgtacccttcccctgcaagccgtttgtgtaagtctagcggccagtggcaaacgccgggagccaccaggtccctctccaaggcagtgtgcaaaccagtgcggtgcccagctcctgtgagcttcgaaaacgggatttataccccaagattaggatcgtatcctgtgggtggcaatgtcagtttcgaatgtgaagatggatttatcctgcgaggcagccccgtgagacagtgtagaccaaatggtatgtgggacggtgagacagcagtatgcgataacggagcaggccactgcccaaatcctggcataagtctcggagccgtgaggactggattcaggtttggacacggcgataaggtgcgatacagatgcagctcaaatttggtgttgactggatctagcgaacgggagtgccaagggaatggagtgtggagtggaaccgaaccaatttgcagacagccttacagctatgatttccccgaggacgttgcacccgctttagggacctccttttctcatatgctcggtgcaacaaaccccacccagaaaaccaaggagagcctaggtcgcaagatccagattcagagatcaggccacttgaacttatacctgcttcttgattgcagtcagagtgtgagcgagaatgattttctgatattcaaggagtcagccagcctcatggtggatagaatcttcagttttgagataaatgtgagtgtggccattataacgtttgctagtgaaccaaaagttcttatgagtgtccttaacgacaatagcagggatatgaccgaggtgatttcatccctggaaaacgcgaactacaaagaccacgagaacggcactgggacaaatacatatgctgccctgaatagcgtgtacctcatgatgaataaccagatgagactactgggcatggagaccatggcatggcaggaaatccggcatgcaatcatcctcctcactgacggaaagagtaatatgggcggtagtccgaagactgctgtcgatcacattcgggagattctgaacatcaatcagaagcgaaacgactacttggacatctacgcaatcggggtagggaagctcgatgtagactggcgggaactgaatgaactgggaagtaagaaggacggcgagagacatgcttttattctgcaggacactaaagcattgcatcaggtgttcgagcatatgctggacgtttctaagttgacagatacaatatgcggagtcgggaatatgtctgctaatgcctcggaccaggagcggactccctggcacgtcactattaagcccaagtcccaggaaacatgcagaggcgcattaattagcgaccagtgggtcctgacagccgctcattgcttcagagacgggaatgaccactccctatggagggttaatgtcggggaccccaagtcacagtggggcaaagaattcctgatcgagaaagctgtgatcagcccaggattcgatgttttcgctaagaagaatcaaggcatattggaattctatggggatgacatagccctgctgaaactcgcccagaaggtgaagatgagtacccatgccagaccaatctgcctgccgtgtacaatggaagccaatctggccctccggaggccccagggctccacctgcagggatcatgaaaatgagttactcaacaagcagtccgtgccggctcactttgtggcgttaaacggatctaagctgaacataaatcttaaaatgggtgtggagtggacatcctgtgccgaagtggtgtctcaggaaaagactatgttcccaaacctgactgacgtccgggaagtcgtgacagaccaatttctctgctccgggacccaggaagacgagtctccatgtaagggtgagtcaggcggagctgtttttctcgagaggcgattcaggttttttcaggtcggattggtaagttgggggctctacaatccgtgtctgggaagtgccgacaagaactcccgcaaacgggcaccacgtagtaaagtgccaccccctcgagattttcatatcaacttgttccgaatgcagccatggctcaggcagcatctcggtgacgtcctcaattttttgcccctgtag

SEQ ID NO: 1056 - DNA, 2259 bp, Artificial Sequence
  derived and/or modified sequence
atggggcctctcatggttctgttctgcctgctgttcttatatcctggtttggcggattctgccccttcttgcccacagaacgtaaatatcagtggtggaactttcacattgtcccatggctgggccccaggttccctcctgacatacagctgtccccagggcctctacccctcccctgcctcgaggctgtgcaaatcatccggccagtggcaaactcccggagccacgagatcgctgtcaaaggctgtgtgcaaacccgtgcgctgtcccgcaccagtttcttttgagaatgggatatacacaccaagactggggagttaccctgttggtggcaacgtgagttttgaatgcgaggacggatttatattacggggttcccccgtaagacaatgcaggcccaatggaatgtgggatggggagaccgctgtatgcgacaacggagcaggacactgtccgaaccctggtatctctctcggcgcagtgcggacaggattcaggtttggacatggtgataaggtccgctaccgatgttcatccaaccttgtgctgactgggtcaagtgagcgggagtgtcagggaaacggcgtgtggagtggcacagagcccatctgtcgccagccatactcctatgacttccctgaagacgtggctcccgcactggggacgagctttagccacatgctaggggcaacaaaccccacacagaagaccaaagagagcctgggacggaagatccagatccagaggagcgggcatttaaacctttacttgctactggactgctcacagagtgtttctgaaaatgattttctcattttcaaagagtctgctagtctgatggtagatagaatcttctcattcgaaattaatgtaagcgtggctatcatcacattcgccagcgaacccaaagtgttgatgagcgtattaaacgacaattctcgagatatgacagaggttatctcatccctcgaaaacgcaaattacaaagatcatgaaaatgggacaggcactaacacctacgcggcactcaacagcgtgtacctgatgatgaacaatcaaatgcgcctgctcggaatggaaactatggcctggcaggagatccgacacgcaattatcctcctaaccgacgggaagagcaatatggggggtagccccaagacagccgtcgatcacattcgggagattctcaatattaaccagaagcgcaatgattatctagacatttatgctatcggagtgggaaaactggatgtggattggcgcgagctaaacgaacttggctctaagaaggacggggagcgccacgcattcatactacaagacaccaaagccctgcatcaggtgtttgagcacatgttggacgtctctaaactcactgataccatatgtggtgtcggtaatatgtcagccaatgcatccgaccaggagcggaccccttggcacgttactattaagccaaagtcacaagagacttgccggggagctttgatcagtgaccagtgggtgttgactgccgctcattgctttagagacggcaatgatcatagtttgtggcgcgttaacgttggcgaccctaagtctcagtggggaaaagaattcctcatcgaaaaggcagtgattagccccggattcgatgttttcgccaagaagaatcagggtattctcgagttctatggcgacgacattgccttgttgaagctggcacaaaaagtcaaaatgtctacccatgctaggcctatatgcctgccgtgtaccatggaagcaaaccttgccctccggagaccacaagggtcaacttgtagagaccacgagaatgagttgttgaataaacagtctgttcccgcacacttcgtcgcgttgaacggctctaagttgaacatcaatctcaagatgggagtagagtggactagctgtgccgaagtggtgagccaggagaagactatgtttcccaatctgactgacgttagagaagtggtaacagaccagtttttatgttctgggactcaggaggatgaatctccctgcaaaggcgaatcaggaggagcggtctttctcgaaaggcggtttaggttcttccaggtcgggctggtgtcatggggactgtacaacccatgtctaggttcagcagacaagaactcccggaaacgcgcacctcgttccaaagtgccccctccacgcgacttccatatcaacctgtttcgaatgcaaccctggcttcggcagcatctgggggacgtcctaaacttcttacctctttag

SEQ ID NO: 1057 - DNA, 2259 bp, Artificial Sequence
  derived and/or modified sequence
atgggcccccttatggttttgttctgcctgctgtttttataccccggtctcgctgattctgcccccagctgcccacagaacgtcaatatttccggaggaacctttactctgtcacacgggtgggcaccagggagcctgcttacctactcctgcccacagggtctgtatcccagtcctgcttcacgactctgcaaatccagcggacaatggcagactccaggagctacaaggtctctttcgaaagcggtgtgtaagccagtcagatgtccagcgcccgttagtttcgagaatggaatctacacgcctcgcctgggaagttacccagtcggcggaaacgtgtcattcgagtgtgaagacggatttatcttacgcgggtcccctgtacggcagtgccggcctaacggaatgtgggatggggaaacagctgtctgcgacaatggtgcgggacattgtccaaatcctgggatcagcctgggagcagttcggaccggcttccgctttggacacggcgacaaggtgcgctatcgttgtagcagcaacttggtacttactggatcctcagagagggaatgccagggcaatggagtgtggagtgggactgagccaatatgccgccagccttactcgtatgacttccccgaagatgtggcgcctgccctggggactagcttctctcacatgctgggagccacaaatccaacccagaaaactaaggaatctttgggacgaaaaatccagatccagagatcaggacatttaaatctctacttgctgctggattgttctcagtccgtgtcagaaaatgatttcctcatcttcaaagagagcgcatctctgatggtagaccggatctttagcttcgagattaatgtgagcgttgctatcatcacattcgctagcgaaccaaaggtcctgatgagcgttttgaatgacaacagtcgtgacatgaccgaagtgatttccagtttggagaacgctaactacaaggaccatgaaaatggcactggaactaacacttacgcggcactcaactcagtttatctaatgatgaacaaccagatgcgcttactggggatggagactatggcttggcaggagatcagacatgctataatccttctgactgatgggaagagcaatatggggggaagcccgaaaactgcagtcgaccatatacgggaaattctgaacattaaccagaagcggaacgactacctggacatatacgccataggcgtgggcaagcttgatgtcgactggcgtgaactaaacgagctcggcagcaagaaggatggcgagcgccacgcgtttatcctccaggacacgaaagccctgcatcaggtcttcgaacatatgctagacgtttccaagcttacagacacaatctgcggagtaggtaacatgagtgccaacgccagtgatcaagaaagaacgccgtggcacgtgactattaaacctaagtcccaagaaacctgtcggggcgcactaatctccgaccagtgggtgctgactgccgcccattgtttcagagacggaaatgaccactcactgtggcgtgtgaatgtcggtgatcccaaatctcagtggggcaaagagtttttgatcgaaaaggccgtaatcagccctggattcgacgtgtttgcaaagaagaatcaaggcatcctcgaattctatggtgatgacatcgccttgctcaagctcgcacagaaagtgaaaatgtcaacccacgctaggccaatctgccttccctgcactatggaggccaatctggcactgcggcgaccacagggaagtacctgccgagatcatgagaatgaactgctgaataaacagtctgtccctgcccacttcgtagcactcaacggaagcaaactgaacatcaatctaaaaatgggagtggagtggacgagttgtgctgaagttgtcagccaggagaagacaatgtttcctaacctgaccgacgtgcgagaggttgttaccgaccagtttctttgctctggaactcaggaggacgaaagtccttgcaaaggtgaatccggtggtgccgtctttctggaacgccggttccggttcttccaagtaggtctagtcagttggggactctataacccatgccttgggtctgctgacaagaattccagaaagagagctcctagatcaaaagtgccaccccccagagactttcacataaacctgtttcgcatgcaaccttggctccggcaacacctcggcgacgtgttgaattttctgccactatag

SEQ ID NO: 1058 - DNA, 2259 bp, Artificial Sequence
  derived and/or modified sequence
atgggcccccttatggttttgttctgcctgctgtttttataccccggtctcgctgattctgcccccagctgcccacagaacgtcaatatttccggaggaacctttactctgtcacacgggtgggcaccagggagcctgcttacctactcctgcccacagggtctgtatcccagtcctgcttcacgactctgcaaatccagcggacaatggcagactccaggagctacaaggtctctttcgaaagcggtgtgtaagccagtcagatgtccagcgcccgttagtttcgagaatggaatctacaccccccgtctgggctcataccccgttggcggtaatgtttcatttgagtgcgaggatggttttattctaaggggctctccagtcagacagtgcagacctaacggcatgtgggatggtgaaacggcagtctgtgataatggagccggccattgccccaaccctgggatctctctaggagctgttcgcactggtttcagatttggccatggcgataaagtgcgataccgctgctcaagcaatttggtcctcaccggtagcagcgaaagggaatgccaagggaatggtgtatggtctggcaccgaaccaatctgtcgacagccttactcctatgattttccagaggatgtagctcccgcccttggcacctccttctcacacatgctgggagccactaatcccacacagaaaacgaaagagtccctcgggaggaaaatccaaatccagagatccggccacctgaacctgtaccttctcctcgactgtagccagagcgtgtcagaaaatgactttttgatctttaaggaatctgcctcccttatggtagaccgaatatttagcttcgagattaacgtgtccgtggcgatcatcacttttgcctctgaaccgaaggtcctaatgagtgttttgaatgataatagccgtgacatgaccgaagtgatctcaagcctggaaaacgccaactataaggaccacgaaaacggaactggcaccaacacatacgcagctctgaattccgtctacttaatgatgaacaaccaaatgagactcctgggaatggaaacgatggcctggcaggagatcagacatgctatcatcctccttactgacggaaagtcaaatatgggaggctcaccgaaaaccgcagttgatcacattagagagattctgaatattaatcagaaaagaaacgactatctagatatctatgcaattggagtgggcaaactggatgttgactggagagagctcaacgagttgggatcaaaaaaggacggcgagagacatgcttttatcttgcaagacactaaggcgctgcaccaggtgttcgaacatatgttagacgtgtcaaagctcacagacaccatctgcggagttggcaatatgtcagcaaatgcttcagatcaagaaaggaccccatggcacgtcactatcaaaccaaagagtcaagagacttgcaggggtgccctgatctctgaccaatgggttcttaccgccgcccattgcttccgagacggaaacgaccactctttatggagggtaaatgtcggcgacccaaagagtcaatggggaaaagagttccttattgagaaagcagttatttcacccgggttcgacgtgttcgctaagaaaaatcagggcatcctcgaattctatggggacgatatcgcactgctgaagctggctcaaaaagttaagatgagtacccacgctagacctatttgcctcccctgtacaatggaagctaatctggctcttcgccgcccacaaggctcaacgtgtagggatcacgaaaatgagctccttaataagcagtccgtacccgcacatttcgtcgcattgaacgggtccaaattaaatatcaacttgaagatgggagtcgaatggactagctgtgccgaggttgtgagccaggagaagaccatgttcccgaatttaactgatgtgcgtgaggtcgtcacagatcaattcctatgctccggcactcaagaggacgagtccccgtgtaaaggcgaatccggtggtgccgtgttcctagaacggcggtttagattctttcaggtgggtcttgtgtcctggggactctataacccatgccttgggtctgctgacaagaattccagaaagagagctcctagatcaaaagtgccaccccccagagactttcacataaacctgtttcgcatgcaaccttggctccggcaacacctcggcgacgtgttgaattttctgccactatag

SEQ ID NO: 1059 - DNA, 2850 bp, Artificial Sequence
  derived and/or modified sequence
gagcgtgggggcagtacacaaagcctgtgggggagatctattgaccctatagatatattagcatcagggagacagggcaaaggtttcacccttcagttcagtccccaatccctgcttattatttccctaacagaagaccatcccccttgccactccctggtttttcttctctggcagcaatgaagcagctgctgacccagctctagttttcgggaagtcagatgaccttttccctcccgcggctctctacctctcgccgcccctagggaggacaccatgggcccactgatggttcttttttgcctgctgttcctgtacccaggtctggcagactcggctccctcctgccctcagaacgtgaatatctcgggtggcaccttcaccctcagccatggctgggctcctgggagccttctcacctactcctgcccccagggcctgtacccatccccagcatcacggctgtgcaagagcagcggacagtggcagaccccaggagccacccggtctctgtctaaggcggtctgcaaacctgtgcgctgtccagcccctgtctcctttgagaatggcatttataccccacggctggggtcctatcccgtgggtggcaatgtgagcttcgagtgtgaggatggcttcatattgcggggctcgcctgtgcgtcagtgtcgccccaacggcatgtgggatggagaaacagctgtgtgtgataatggggctggccactgccccaacccaggcatttcactgggcgcagtgcggacaggcttccgctttggtcatggggacaaggtccgctatcgctgctcctcgaatcttgtgctcacggggtcttcggagcgggagtgccagggcaacggggtctggagtggaacggagcccatctgccgccaaccctactcttatgacttccctgaggacgtggcccctgccctgggcacttccttctcccacatgcttggggccaccaatcccacccagaagacaaaggaaagcctgggccgtaaaatccaaatccagcgctctggtcatctgaacctctacctgctcctggactgttcgcagagtgtgtcggaaaatgactttctcatcttcaaggagagcgcctccctcatggtggacaggatcttcagctttgagatcaatgtgagcgttgccattatcacctttgcctcagagcccaaagtcctcatgtctgtcctgaacgacaactcccgggatatgactgaggtgatcagcagcctggaaaatgccaactataaagatcatgaaaatggaactgggactaacacctatgcggccttaaacagtgtctatctcatgatgaacaaccaaatgcgactcctcggcatggaaacgatggcctggcaggaaatccgacatgccatcatccttctgacagatggaaagtccaatatgggtggctctcccaagacagctgttgaccatatcagagagatcctgaacatcaaccagaagaggaatgactatctggacatctatgccatcggggtgggcaagctggatgtggactggagagaactgaatgagctagggtccaagaaggatggtgagaggcatgccttcattctgcaggacacaaaggctctgcaccaggtctttgaacatatgctggatgtctccaagctcacagacaccatctgcggggtggggaacatgtcagcaaacgcctctgaccaggagaggacaccctggcatgtcactattaagcccaagagccaagagacctgccggggggccctcatctccgaccaatgggtcctgacagcagctcattgcttccgcgatggcaacgaccactccctgtggagggtcaatgtgggagaccccaaatcccagtggggcaaagaattccttattgagaaggcggtgatctccccagggtttgatgtctttgccaaaaagaaccagggaatcctggagttctatggtgatgacatagctctgctgaagctggcccagaaagtaaagatgtccacccatgccaggcccatctgccttccctgcacgatggaggccaatctggctctgcggagacctcaaggcagcacctgtagggaccatgagaatgaactgctgaacaaacagagtgttcctgctcattttgtcgccttgaatgggagcaaactgaacattaaccttaagatgggagtggagtggacaagctgtgccgaggttgtctcccaagaaaaaaccatgttccccaacttgacagatgtcagggaggtggtgacagaccagttcctatgcagtgggacccaggaggatgagagtccctgcaagggagaatctgggggagcagttttccttgagcggagattcaggttttttcaggtgggtctggtgagctggggtctttacaacccctgccttggctctgctgacaaaaactcccgcaaaagggcccctcgtagcaaggtcccgccgccacgagactttcacatcaatctcttccgcatgcagccctggctgaggcagcacctgggggatgtcctgaattttttacccctctagccatggccactgagccctctgctgccctgccagaatctgccgcccctccatcttctacctctgaatggccacccttagaccctgtgatccatcctctctcctagctgagtaaatccgggtctctaggatgccagaggcagcgcacacaagctgggaaatcctcagggctcctaccagcaggactgcctcgctgccccacctcccgctccttggcctgtccccagattccttccctggttgacttgactcatgcttgtttcactttcacatggaatttcccagttatgaaattaataaaaatcaatggtttccaca

SEQ ID NO: 1060 - DNA, 2785 bp, Artificial Sequence
  derived and/or modified sequence
agtacacaaagcctgtgggggagatctattgaccctatagatatattagcatcagggagacagggcaaaggtttcacccttcagttcagtccccaatccctgcttattatttccctaacagaagaccatcccccttgccactccctggtttttcttctctggcagcaatgaagcagctgctgacccagctctagttttcgggaagtcagatgaccttttccctcccgcggctctctacctctcgccgcccctagggaggacaccatgggcccactgatggttcttttttgcctgctgttcctgtacccaggtctggcagactcggctccctcctgccctcagaacgtgaatatctcgggtggcaccttcaccctcagccatggctgggctcctgggagccttctcacctactcctgcccccagggcctgtacccatccccagcatcacggctgtgcaagagcagcggacagtggcagaccccaggagccacccggtctctgtctaaggcggtctgcaaacctgtgcgctgtccagcccctgtctcctttgagaatggcatttataccccacggctggggtcctatcccgtgggtggcaatgtgagcttcgagtgtgaggatggcttcatattgcggggctcgcctgtgcgtcagtgtcgccccaacggcatgtgggatggagaaacagctgtgtgtgataatggggctggccactgccccaacccaggcatttcactgggcgcagtgcggacaggcttccgctttggtcatggggacaaggtccgctatcgctgctcctcgaatcttgtgctcacggggtcttcggagcgggagtgccagggcaacggggtctggagtggaacggagcccatctgccgccaaccctactcttatgacttccctgaggacgtggcccctgccctgggcacttccttctcccacatgcttggggccaccaatcccacccagaagacaaaggaaagcctgggccgtaaaatccaaatccagcgctctggtcatctgaacctctacctgctcctggactgttcgcagagtgtgtcggaaaatgactttctcatcttcaaggagagcgcctccctcatggtggacaggatcttcagctttgagatcaatgtgagcgttgccattatcacctttgcctcagagcccaaagtcctcatgtctgtcctgaacgacaactcccgggatatgactgaggtgatcagcagcctggaaaatgccaactataaagatcatgaaaatggaactgggactaacacctatgcggccttaaacagtgtctatctcatgatgaacaaccaaatgcgactcctcggcatggaaacgatggcctggcaggaaatccgacatgccatcatccttctgacagatggaaagtccaatatgggtggctctcccaagacagctgttgaccatatcagagagatcctgaacatcaaccagaagaggaatgactatctggacatctatgccatcggggtgggcaagctggatgtggactggagagaactgaatgagctagggtccaagaaggatggtgagaggcatgccttcattctgcaggacacaaaggctctgcaccaggtctttgaacatatgctggatgtctccaagctcacagacaccatctgcggggtggggaacatgtcagcaaacgcctctgaccaggagaggacaccctggcatgtcactattaagcccaagagccaagagacctgccggggggccctcatctccgaccaatgggtcctgacagcagctcattgcttccgcgatggcaacgaccactccctgtggagggtcaatgtgggagaccccaaatcccagtggggcaaagaattccttattgagaaggcggtgatctccccagggtttgatgtctttgccaaaaagaaccagggaatcctggagttctatggtgatgacatagctctgctgaagctggcccagaaagtaaagatgtccacccatgccaggcccatctgccttccctgcacgatggaggccaatctggctctgcggagacctcaaggcagcacctgtagggaccatgagaatgaactgctgaacaaacagagtgttcctgctcattttgtcgccttgaatgggagcaaactgaacattaaccttaagatgggagtggagtggacaagctgtgccgaggttgtctcccaagaaaaaaccatgttccccaacttgacagatgtcagggaggtggtgacagaccagttcctatgcagtgggacccaggaggatgagagtccctgcaagggtgggtctggtgagctggggtctttacaacccctgccttggctctgctgacaaaaactcccgcaaaagggcccctcgtagcaaggtcccgccgccacgagactttcacatcaatctcttccgcatgcagccctggctgaggcagcacctgggggatgtcctgaattttttacccctctagccatggccactgagccctctgctgccctgccagaatctgccgcccctccatcttctacctctgaatggccacccttagaccctgtgatccatcctctctcctagctgagtaaatccgggtctctaggatgccagaggcagcgcacacaagctgggaaatcctcagggctcctaccagcaggactgcctcgctgccccacctcccgctccttggcctgtccccagattccttccctggttgacttgactcatgcttgtttcactttcacatggaatttcccagttatgaaattaataaaaatcaatggtttcc

SEQ ID NO: 1061 - DNA, 2835 bp, Artificial Sequence
  derived and/or modified sequence
acacaaagcctgtgggggagatctattgaccctatagatatattagcatcagggagacagggcaaaggtttcacccttcagttcagtccccaatccctgcttattatttccctaacagaagaccatcccccttgccactccctggtttttcttctctggcagcaatgaagcagctgctgacccagctctagttttcgggaagtcagatgaccttttccctcccgcggctctctacctctcgccgcccctagggaggacaccatgggcccactgatggttcttttttgcctgctgttcctgtacccaggtctggcagactcggctccctcctgccctcagaacgtgaatatctcgggtggcaccttcaccctcagccatggctgggctcctgggagccttctcacctactcctgcccccagggcctgtacccatccccagcatcacggctgtgcaagagcagcggacagtggcagaccccaggagccacccggtctctgtctaaggcggtctgcaaacctgtgcgctgtccagcccctgtctcctttgagaatggcatttataccccacggctggggtcctatcccgtgggtggcaatgtgagcttcgagtgtgaggatggcttcatattgcggggctcgcctgtgcgtcagtgtcgccccaacggcatgtgggatggagaaacagctgtgtgtgataatggggctggccactgccccaacccaggcatttcactgggcgcagtgcggacaggcttccgctttggtcatggggacaaggtccgctatcgctgctcctcgaatcttgtgctcacggggtcttcggagcgggagtgccagggcaacggggtctggagtggaacggagcccatctgccgccaaccctactcttatgacttccctgaggacgtggcccctgccctgggcacttccttctcccacatgcttggggccaccaatcccacccagaagacaaaggaaagcctgggccgtaaaatccaaatccagcgctctggtcatctgaacctctacctgctcctggactgttcgcagagtgtgtcggaaaatgactttctcatcttcaaggagagcgcctccctcatggtggacaggatcttcagctttgagatcaatgtgagcgttgccattatcacctttgcctcagagcccaaagtcctcatgtctgtcctgaacgacaactcccgggatatgactgaggtgatcagcagcctggaaaatgccaactataaagatcatgaaaatggaactgggactaacacctatgcagccttaaacagtgtctatctcatgatgaacaaccaaatgcgactcctcggcatggaaacgatggcctggcaggaaatccgacatgccatcatccttctgacagatggaaagtccaatatgggtggctctcccaagacagctgttgaccatatcagagagatcctgaacatcaaccagaagaggaatgactatctggacatctatgccatcggggtgggcaagctggatgtggactggagagaactgaatgagctagggtccaagaaggatggtgagaggcatgccttcattctgcaggacacaaaggctctgcaccaggtctttgaacatatgctggatgtctccaagctcacagacaccatctgcggggtggggaacatgtcagcaaacgcctctgaccaggagaggacaccctggcatgtcactattaagcccaagagccaagagacctgccggggggccctcatctccgaccaatgggtcctgacagcagctcattgcttccgcgatggcaacgaccactccctgtggagggtcaatgtgggagaccccaaatcccagtggggcaaagaattccttattgagaaggcggtgatctccccagggtttgatgtctttgccaaaaagaaccagggaatcctggagttctatggtgatgacatagctctgctgaagctggcccagaaagtaaagatgtccacccatgccaggcccatctgccttccctgcacgatggaggccaatctggctctgcggagacctcaaggcagcacctgtagggaccatgagaatgaactgctgaacaaacagagtgttcctgctcattttgtcgccttgaatgggagcaaactgaacattaaccttaagatgggagtggagtggacaagctgtgccgaggttgtctcccaagaaaaaaccatgttccccaacttgacagatgtcagggaggtggtgacagaccagttcctatgcagtgggacccaggaggatgagagtccctgcaagggagaatctgggggagcagttttccttgagcggagattcaggttttttcaggtgggtctggtgagctggggtctttacaacccctgccttggctctgctgacaaaaactcccgcaaaagggcccctcgtagcaaggtcccgccgccacgagactttcacatcaatctcttccgcatgcagccctggctgaggcagcacctgggggatgtcctgaattttttacccctctagccatggccactgagccctctgctgccctgccagaatctgccgcccctccatcttctacctctgaatggccacccttagaccctgtgatccatcctctctcctagctgagtaaatccgggtctctaggatgccagaggcagcgcacacaagctgggaaatcctcagggctcctaccagcaggactgcctcgctgccccacctcccgctccttggcctgtccccagattccttccctggttgacttgactcatgcttgtttcactttcacatggaatttcccagttatgaaattaataaaaatcaatggtttccaca

SEQ ID NO: 1062 - DNA, 2835 bp, Artificial Sequence
  derived and/or modified sequence
acacaaagcctgtgggggagatctattgaccctatagatatattagcatcagggagacagggcaaaggtttcacccttcagttcagtccccaatccctgcttattatttccctaacagaagaccatcccccttgccactccctggtttttcttctctggcagcaatgaagcagctgctgacccagctctagttttcgggaagtcagatgaccttttccctcccgcggctctctacctctcgccgcccctagggaggacaccatgggcccactgatggttcttttttgcctgctgttcctgtacccaggtctggcagactcggctccctcctgccctcagaacgtgaatatctcgggtggcaccttcaccctcagccatggctgggctcctgggagccttctcacctactcctgcccccagggcctgtacccatccccagcatcacggctgtgcaagagcagcggacagtggcagaccccaggagccacccggtctctgtctaaggcggtctgcaaacctgtgcgctgtccagcccctgtctcctttgagaatggcatttataccccacggctggggtcctatcccgtgggtggcaatgtgagcttcgagtgtgaggatggcttcatattgcggggctcgcctgtgcgtcagtgtcgccccaacggcatgtgggatggagaaacagctgtgtgtgataatggggctggccactgccccaacccaggcatttcactgggcgcagtgcggacaggcttccgctttggtcatggggacaaggtccgctatcgctgctcctcgaatcttgtgctcacggggtcttcggagcgggagtgccagggcaacggggtctggagtggaacggagcccatctgccgccaaccctactcttatgacttccctgaggacgtggcccctgccctgggcacttccttctcccacatgcttggggccaccaatcccacccagaagacaaaggaaagcctgggccgtaaaatccaaatccagcgctctggtcatctgaacctctacctgctcctggactgttcgcagagtgtgtcggaaaatgactttctcatcttcaaggagagcgcctccctcatggtggacaggatcttcagctttgagatcaatgtgagcgttgccattatcacctttgcctcagagcccaaagtcctcatgtctgtcctgaacgacaactcccgggatatgactgaggtgatcagcagcctggaaaatgccaactataaagatcatgaaaatggaactgggactaacacctatgcggccttaaacagtgtctatctcatgatgaacaaccaaatgcgactcctcggcatggaaacgatggcctggcaggaaatccgacatgccatcatccttctgacagatggaaagtccaatatgggtggctctcccaagacagctgttgaccatatcagagagatcctgaacatcaaccagaagaggaatgactatctggacatctatgccatcggggtgggcaagctggatgtggactggagagaactgaatgagctagggtccaagaaggatggtgagaggcatgccttcattctgcaggacacaaaggctctgcaccaggtctttgaacatatgctggatgtctccaagctcacagacaccatctgcggggtggggaacatgtcagcaaacgcctctgaccaggagaggacaccctggcatgtcactattaagcccaagagccaagagacctgccggggggccctcatctccgaccaatgggtcctgacagcagctcattgcttccgcgatggcaacgaccactccctgtggagggtcaatgtgggagaccccaaatcccagtggggcaaagaattccttattgagaaggcggtgatctccccagggtttgatgtctttgccaaaaagaaccagggaatcctggagttctatggtgatgacatagctctgctgaagctggcccagaaagtaaagatgtccacccatgccaggcccatctgccttccctgcacgatggaggccaatctggctctgcggagacctcaaggcagcacctgtagggaccatgagaatgaactgctgaacaaacagagtgttcctgctcattttgtcgccttgaatgggagcaaactgaacattaaccttaagatgggagtggagtggacaagctgtgccgaggttgtctcccaagaaaaaaccatgttccccaacttgacagatgtcagggaggtggtgacagaccagttcctatgcagtgggacccaggaggatgagagtccctgcaagggagaatctgggggagcagttttccttgagcggagattcaggttttttcaggtgggtctggtgagctggggtctttacaacccctgccttggctctgctgacaaaaactcccgcaaaagggcccctcgtagcaaggtcccgccgccacgagactttcacatcaatctcttccgcatgcagccctggctgaggcagcacctgggggatgtcctgaattttttacccctctagccatggccactgagccctctgctgccctgccagaatctgccgcccctccatcttctacctctgaatggccacccttagaccctgtgatccatcctctctcctagctgagtaaatccgggtctctaggatgccagaggcagcgcacacaagctgggaaatcctcagggctcctaccagcaggactgcctcgctgccccacctcccgctccttggcctgtccccagattccttccctggttgacttgactcatgcttgtttcactttcacatggaatttcccagttatgaaattaataaaaatcaatggtttccaca

SEQ ID NO: 1063 - DNA, 2785 bp, Artificial Sequence
  derived and/or modified sequence
agtacacaaagcctgtgggggagatctattgaccctatagatatattagcatcagggagacagggcaaaggtttcacccttcagttcagtccccaatccctgcttattatttccctaacagaagaccatcccccttgccactccctggtttttcttctctggcagcaatgaagcagctgctgacccagctctagttttcgggaagtcagatgaccttttccctcccgcggctctctacctctcgccgcccctagggaggacaccatgggcccactgatggttcttttttgcctgctgttcctgtacccaggtctggcagactcggctccctcctgccctcagaacgtgaatatctcgggtggcaccttcaccctcagccatggctgggctcctgggagccttctcacctactcctgcccccagggcctgtacccatccccagcatcacggctgtgcaagagcagcggacagtggcagaccccaggagccacccggtctctgtctaaggcggtctgcaaacctgtgcgctgtccagcccctgtctcctttgagaatggcatttataccccacggctggggtcctatcccgtgggtggcaatgtgagcttcgagtgtgaggatggcttcatattgcggggctcgcctgtgcgtcagtgtcgccccaacggcatgtgggatggagaaacagctgtgtgtgataatggggctggccactgccccaacccaggcatttcactgggcgcagtgcggacaggcttccgctttggtcatggggacaaggtccgctatcgctgctcctcgaatcttgtgctcacggggtcttcggagcgggagtgccagggcaacggggtctggagtggaacggagcccatctgccgccaaccctactcttatgacttccctgaggacgtggcccctgccctgggcacttccttctcccacatgcttggggccaccaatcccacccagaagacaaaggaaagcctgggccgtaaaatccaaatccagcgctctggtcatctgaacctctacctgctcctggactgttcgcagagtgtgtcggaaaatgactttctcatcttcaaggagagcgcctccctcatggtggacaggatcttcagctttgagatcaatgtgagcgttgccattatcacctttgcctcagagcccaaagtcctcatgtctgtcctgaacgacaactcccgggatatgactgaggtgatcagcagcctggaaaatgccaactataaagatcatgaaaatggaactgggactaacacctatgcagccttaaacagtgtctatctcatgatgaacaaccaaatgcgactcctcggcatggaaacgatggcctggcaggaaatccgacatgccatcatccttctgacagatggaaagtccaatatgggtggctctcccaagacagctgttgaccatatcagagagatcctgaacatcaaccagaagaggaatgactatctggacatctatgccatcggggtgggcaagctggatgtggactggagagaactgaatgagctagggtccaagaaggatggtgagaggcatgccttcattctgcaggacacaaaggctctgcaccaggtctttgaacatatgctggatgtctccaagctcacagacaccatctgcggggtggggaacatgtcagcaaacgcctctgaccaggagaggacaccctggcatgtcactattaagcccaagagccaagagacctgccggggggccctcatctccgaccaatgggtcctgacagcagctcattgcttccgcgatggcaacgaccactccctgtggagggtcaatgtgggagaccccaaatcccagtggggcaaagaattccttattgagaaggcggtgatctccccagggtttgatgtctttgccaaaaagaaccagggaatcctggagttctatggtgatgacatagctctgctgaagctggcccagaaagtaaagatgtccacccatgccaggcccatctgccttccctgcacgatggaggccaatctggctctgcggagacctcaaggcagcacctgtagggaccatgagaatgaactgctgaacaaacagagtgttcctgctcattttgtcgccttgaatgggagcaaactgaacattaaccttaagatgggagtggagtggacaagctgtgccgaggttgtctcccaagaaaaaaccatgttccccaacttgacagatgtcagggaggtggtgacagaccagttcctatgcagtgggacccaggaggatgagagtccctgcaagggtgggtctggtgagctggggtctttacaacccctgccttggctctgctgacaaaaactcccgcaaaagggcccctcgtagcaaggtcccgccgccacgagactttcacatcaatctcttccgcatgcagccctggctgaggcagcacctgggggatgtcctgaattttttacccctctagccatggccactgagccctctgctgccctgccagaatctgccgcccctccatcttctacctctgaatggccacccttagaccctgtgatccatcctctctcctagctgagtaaatccgggtctctaggatgccagaggcagcgcacacaagctgggaaatcctcagggctcctaccagcaggactgcctcgctgccccacctcccgctccttggcctgtccccagattccttccctggttgacttgactcatgcttgtttcactttcacatggaatttcccagttatgaaattaataaaaatcaatggtttcc

SEQ ID NO: 1064 - DNA, 2259 bp, Artificial Sequence
  derived and/or modified sequence
atgggccccctgatggtgctgttctgcctgctgttcctgtaccccggcctggccgacagcgcccccagctgcccccagaacgtgaacatcagcggcggcaccttcaccctgagccacggctgggcccccggcagcctgctgacctacagctgcccccagggcctgtaccccagccccgccagcagactgtgcaagagcagcggccagtggcagacccccggcgccaccagaagcctgagcaaggccgtgtgcaagcccgtgagatgccccgcccccgtgagcttcgagaacggcatctacacccccagactgggcagctaccccgtgggcggcaacgtgagcttcgagtgcgaggacggcttcatcctgagaggcagccccgtgagacagtgcagacccaacggcatgtgggacggcgagaccgccgtgtgcgacaacggcgccggccactgccccaaccccggcatcagcctgggcgccgtgagaaccggcttcagattcggccacggcgacaaggtgagatacagatgcagcagcaacctggtgctgaccggcagcagcgagagagagtgccagggcaacggcgtgtggagcggcaccgagcccatctgcagacagccctacagctacgacttccccgaggacgtggcccccgccctgggcaccagcttcagccacatgctgggcgccaccaaccccacccagaagaccaaggagagcctgggcagaaagatccagatccagagaagcggccacctgaacctgtacctgctgctggactgcagccagagcgtgagcgagaacgacttcctgatcttcaaggagagcgccagcctgatggtggacagaatcttcagcttcgagatcaacgtgagcgtggccatcatcaccttcgccagcgagcccaaggtgctgatgagcgtgctgaacgacaacagcagagacatgaccgaggtgatcagcagcctggagaacgccaactacaaggaccacgagaacggcaccggcaccaacacctacgccgccctgaacagcgtgtacctgatgatgaacaaccagatgagactgctgggcatggagaccatggcctggcaggagatcagacacgccatcatcctgctgaccgacggcaagagcaacatgggcggcagccccaagaccgccgtggaccacatcagagagatcctgaacatcaaccagaagagaaacgactacctggacatctacgccatcggcgtgggcaagctggacgtggactggagagagctgaacgagctgggcagcaagaaggacggcgagagacacgccttcatcctgcaggacaccaaggccctgcaccaggtgttcgagcacatgctggacgtgagcaagctgaccgacaccatctgcggcgtgggcaacatgagcgccaacgccagcgaccaggagagaaccccctggcacgtgaccatcaagcccaagagccaggagacctgcagaggcgccctgatcagcgaccagtgggtgctgaccgccgcccactgcttcagagacggcaacgaccacagcctgtggagagtgaacgtgggcgaccccaagagccagtggggcaaggagttcctgatcgagaaggccgtgatcagccccggcttcgacgtgttcgccaagaagaaccagggcatcctggagttctacggcgacgacatcgccctgctgaagctggcccagaaggtgaagatgagcacccacgccagacccatctgcctgccctgcaccatggaggccaacctggccctgagaagaccccagggcagcacctgcagagaccacgagaacgagctgctgaacaagcagagcgtgcccgcccacttcgtggccctgaacggcagcaagctgaacatcaacctgaagatgggcgtggagtggaccagctgcgccgaggtggtgagccaggagaagaccatgttccccaacctgaccgacgtgagagaggtggtgaccgaccagttcctgtgcagcggcacccaggaggacgagagcccctgcaagggcgagagcggcggcgccgtgttcctggagagaagattcagattcttccaggtgggcctggtgagctggggcctgtacaacccctgcctgggcagcgccgacaagaacagcagaaagagagcccccagaagcaaggtgcccccccccagagacttccacatcaacctgttcagaatgcagccctggctgagacagcacctgggcgacgtgctgaacttcctgcccctgtag

SEQ ID NO: 1065 - protein, 1663 aa, Artificial Sequence
  derived and/or modified sequence
MGPTSGPSLLLLLLTHLPLALGSPMYSIITPNILRLESEETMVLEAHDAQGDVPVTVTVHDFPGKKLVLSSEKTVLTPATNHMGNVTFTIPANREFKSEKGRNKFVTVQATFGTQVVEKVVLVSLQSGYLFIQTDKTIYTPGSTVLYRIFTVNHKLLPVGRTVMVNIENPEGIPVKQDSLSSQNQLGVLPLSWDIPELVNMGQWKIRAYYENSPQQVFSTEFEVKEYVLPSFEVIVEPTEKFYYIYNEKGLEVTITARFLYGKKVEGTAFVIFGIQDGEQRISLPESLKRIPIEDGSGEVVLSRKVLLDGVQNPRAEDLVGKSLYVSATVILHSGSDMVQAERSGIPIVTSPYQIHFTKTPKYFKPGMPFDLMVFVTNPDGSPAYRVPVAVQGEDTVQSLTQGDGVAKLSINTHPSQKPLSITVRTKKQELSEAEQATRTMQALPYSTVGNSNNYLHLSVLRTELRPGETLNVNFLLRMDRAHEAKIRYYTYLIMNKGRLLKAGRQVREPGQDLVVLPLSITTDFIPSFRLVAYYTLIGASGQREVVADSVWVDVKDSCVGSLVVKSGQSEDRQPVPGQQMTLKIEGDHGARVVLVAVDKGVFVLNKKNKLTQSKIWDVVEKADIGCTPGSGKDYAGVFSDAGLTFTSSSGQQTAQRAELQCPQPAARRRRSVQLTEKRMDKVGKYPKELRKCCEDGMRENPMRFSCQRRTRFISLGEACKKVFLDCCNYITELRRQHARASHLGLARSNLDEDIIAEENIVSRSEFPESWLWNVEDLKEPPKNGISTKLMNIFLKDSITTWEILAVSMSDKKGICVADPFEVTVMQDFFIDLRLPYSVVRNEQVEIRAVLYNYRQNQELKVRVELLHNPAFCSLATTKRRHQQTVTIPPKSSLSVPYVIVPLKTGLQEVEVKAAVYHHFISDGVRKSLKVVPEGIRMNKTVAVRTLDPERLGREGVQKEDIPPADLSDQVPDTESETRILLQGTPVAQMTEDAVDAERLKHLIVTPSGCGEQNMIGMTPTVIAVHYLDETEQWEKFGLEKRQGALELIKKGYTQQLAFRQPSSAFAAFVKRAPSTWLTAYVVKVFSLAVNLIAIDSQVLCGAVKWLILEKQKPDGVFQEDAPVIHQEMIGGLRNNNEKDMALTAFVLISLQEAKDICEEQVNSLPGSITKAGDFLEANYMNLQRSYTVAIAGYALAQMGRLKGPLLNKFLTTAKDKNRWEDPGKQLYNVEATSYALLALLQLKDFDFVPPVVRWLNEQRYYGGGYGSTQATFMVFQALAQYQKDAPDHQELNLDVSLQLPSRSSKITHRIHWESASLLRSEETKENEGFTVTAEGKGQGTLSVVTMYHAKAKDQLTCNKFDLKVTIKPAPETEKRPQDAKNTMILEICTRYRGDQDATMSILDISMMTGFAPDTDDLKQLANGVDRYISKYELDKAFSDRNTLIIYLDKVSHSEDDCLAFKVHQYFNVELIQPGAVKVYAYYNLEESCTRFYHPEKEDGKLNKLCRDELCRCAEENCFIQKSDDKVTLEERLDKACEPGVDYVYKTRLVKVQLSNDFDEYIMAIEQTIKSGSDEVQVGQQRTFISPIKCREALKLEEKKHYLMWGLSSDFWGEKPNLSYIIGKDTWVEHWPEEDECQDEENQKQCQDLGAFTESMVVFGCPN

SEQ ID NO: 1066 - DNA, 4992 bp, Artificial Sequence
  derived and/or modified sequence
atggggccgacatctggtcccagcctacttctgttattattgacacacctacccttggcacttggatcccctatgtactcaatcataaccccaaacatcttgagactggaatctgaggagactatggtgctggaagcccatgacgctcagggcgacgtacctgttactgtgacagtgcacgatttccctgggaagaaacttgtgctctcatccgaaaagacagtgctaacccccgccacgaatcatatgggtaatgtcacctttaccattccagcaaacagggaatttaagagtgaaaagggcaggaataagtttgtcaccgtgcaggctacatttgggacccaggtggtggaaaaagttgtattggttagtctgcaatccggctatctgttcatccagaccgacaagacgatttatacccccggatccactgtgctgtatcgtatctttacagtaaatcataagctacttcccgtgggccggacagtcatggtcaacatcgaaaatcctgaaggcattccagttaagcaggatagtttgtcctcacagaaccagttgggggtgctgcccctctcatgggacatcccagagctggtgaacatggggcagtggaagatccgcgcctactacgagaatagtccacagcaggttttcagcacagagttcgaggtcaaagagtatgtacttccctcattcgaggtgatcgtggaacccacagaaaaattctactacatctacaacgagaaaggcttagaggtaacaataaccgctcgcttcctgtatggcaaaaaagtggaaggcacagcctttgtgattttcgggatccaggatggcgagcagaggatctccctcccagagagcctgaagaggataccgatcgaagatggctccggggaagtggtactgagtcgtaaagttttactggacggcgtccagaatccacgggcagaggatctagttggcaagtccctttacgtatccgcaacggtgattctgcatagtgggtctgacatggtacaggctgaaaggtccggaattccaatcgtaacctccccctatcagatacacttcaccaaaacgcccaagtacttcaagccaggcatgccattcgacctaatggtgtttgtcaccaatccagatgggagccctgcttaccgcgttccggtggcagtgcaaggagaagacacggttcagagccttactcaaggcgacggagtcgctaagttgtcaatcaacactcacccttcccagaagcccctgagcatcaccgtgagaaccaaaaagcaggaactatctgaagccgaacaggctacacgcacaatgcaggcattgccgtactccacagtcggcaactctaacaactacctgcatctctccgtcctaagaaccgaactgcgccccggtgagactctgaatgtcaattttctccttcgcatggatcgagcccacgaggctaagataaggtattacacttacctaataatgaataagggccggttgcttaaggccggtaggcaagtgagggagcctgggcaggatctggtagttcttccactaagtattactactgacttcattccatcttttaggctggtggcttattatacactcatcggggcatccggccagcgagaggtggtcgcagattctgtatgggtggacgtcaaagatagctgtgtgggaagtctcgtggtgaagtcgggccagtctgaggacaggcaacctgtgcctggtcagcagatgaccctgaaaatcgaaggggatcatggagcgcgggtcgtcctcgtggccgtggacaagggagtctttgtcctgaacaagaagaacaagttgactcaatctaagatctgggatgtcgtcgaaaaggctgatattggatgcacaccaggcagcggaaaggactacgccggggtgttttctgacgcgggtctgacttttacttcgtcctctggtcaacaaactgcccagcgcgcggaactgcagtgtccgcagcctgccgctcggcgccgtagatccgtgcagttgaccgagaaaaggatggataaagtggggaaataccctaaggaacttcgcaagtgctgtgaagacggcatgagggagaaccctatgaggttttcatgccagcgtcgtacccggttcatttccctaggcgaggcatgtaagaaagtatttctggattgctgcaattacattacagagctaaggcggcagcacgcaagagcctctcatctcggcttagccaggagtaacctcgatgaggacatcatagccgaggaaaacatcgtatccaggtccgaattccccgaatcctggctgtggaacgtggaagatctcaaggagccccctaagaatggcattagtaccaagctcatgaatatcttcctgaaagacagcatcacgacatgggagatcctggcagtcagtatgtccgacaaaaaagggatctgcgtcgccgacccattcgaggtgactgtgatgcaggactttttcatagatctccggctgccttactccgtggtgaggaacgagcaggtcgagattcgggccgttctgtataactacaggcagaaccaggaactgaaggtgcgagttgaactactgcacaatcccgccttttgcagtcttgccaccaccaagcggcgccaccaacaaaccgtgaccatccctccaaagagcagtttgtccgtcccatacgtcatcgtgccgctgaagacgggcctgcaggaagtggaggtgaaggccgctgtttaccatcacttcatctcagatggtgtgaggaaaagcctaaaggtcgttcccgaggggattcgaatgaacaaaacagtagctgtcagaacgcttgatcctgagcggctcggacgagaaggggtgcagaaggaggacatcccccccgccgatctcagcgatcaagtgcctgacaccgaatctgagaccagaattctgctccaaggcacacctgtggcccagatgaccgaggatgcagtagacgctgaaaggctcaagcaccttatcgtgacccctagcgggtgcggcgagcagaatatgattggtatgactccaactgttatagcagtgcactatctggatgagacagagcaatgggaaaagttcggcctagaaaagaggcagggcgctttggaactgatcaagaaagggtacacacaacagctggcctttagacagccgtcctccgcctttgccgcatttgtgaagagggctccctcaacttggcttactgcttacgtggtcaaggtgttttcgttggccgtaaatttgatcgctattgactctcaggtgctatgcggcgcagtgaagtggttgatcctggagaagcagaagccagacggggtgtttcaagaggacgctcccgtcattcatcaggagatgatcggggggctccgcaataataatgaaaaggacatggcactgacagcctttgtcctgatatctctccaggaggcaaaagatatctgcgaggaacaggtgaacagcctcccaggctctattacaaaagcaggcgattttctggaggccaactatatgaacttgcaacgcagctacaccgtggccatcgcgggctacgccctcgcccagatgggcagattgaaaggcccgctgctgaacaagttcctgacaaccgctaaggacaaaaaccgatgggaggatcctgggaagcagctatacaatgtggaagccacaagttacgcgctgctggcacttttgcagctgaaggacttcgacttcgtgccccccgttgtccgatggctcaacgagcagcggtactacggcgggggatacggctccacccaggccacctttatggtgtttcaggccctcgctcagtatcaaaaggatgcacctgatcatcaggagctgaacctggacgttagcctgcagttgccttcccgctcctctaagatcacccataggatccactgggaatcggcttctctcctgcggagtgaagagaccaaagagaatgagggttttaccgtgactgccgagggtaaggggcaggggaccttaagcgtggtgaccatgtatcatgcaaaagccaaggaccagctgacatgtaataagtttgacctgaaagtgaccattaaaccggcccccgaaaccgagaaacgccctcaggatgcaaagaatacaatgatcctggaaatatgtacgcggtaccgcggagatcaagacgccacgatgagtatactggacatcagcatgatgacaggcttcgcaccagacactgatgatttaaagcagctagccaacggggtggaccgttacattagcaagtatgagctagataaggcattctcggaccgcaacacactgataatctacctcgacaaagtgagtcatagcgaggatgactgtctggcattcaaagtgcatcagtatttcaacgtcgaacttatacaaccaggggcggtcaaagtctacgcctattataacctggaggagtcatgtactcgtttctatcatccggagaaagaggatggaaaactgaacaaactgtgtcgcgatgagctgtgcagatgtgccgaggaaaactgctttatacaaaaaagcgatgacaaggtaacgctggaagaaaggctggataaggcctgtgagcccggcgtggactatgtgtacaagactagattggtgaaggtgcagctgtctaacgatttcgacgaatatataatggctatagagcaaaccattaaaagcgggtcggatgaagttcaggtggggcaacagcgcacatttatcagtccaataaagtgcagggaggcattaaagctggaggaaaagaagcattatcttatgtggggtctgagctcagatttttggggcgagaaacccaatcttagctacatcataggcaaagatacttgggtcgagcactggcctgaggaagacgagtgccaggatgaagagaatcagaagcagtgccaggacttgggcgcattcaccgagtcaatggtagtgttcggatgccctaattag

SEQ ID NO: 1067 - DNA, 4992 bp, Artificial Sequence
  derived and/or modified sequence
atgggccccaccagcggccccagcctgctgctgctgctgctgacccacctgcccctggccctgggcagccccatgtacagcatcatcacccccaacatcctgcggctggagagcgaggagaccatggtgctggaggcccatgatgcccagggagatgtgcctgtgacagtgacagtgcatgacttccctgggaagaagctggtgctgagcagcgagaagacagtgctgaccccagccaccaaccacatgggaaatgtgaccttcaccatcccagccaaccgggagttcaagtctgagaagggcaggaacaagtttgtgacagtgcaggccaccttcggcacccaggtggtggagaaggtggtgctggtgtccctgcagagcggctacctgttcatccagacagacaagaccatctacaccccaggcagcacagtgctgtaccgcatcttcaccgtgaaccacaagctgctgcctgtgggccgcacagtgatggtgaacatcgagaaccctgagggcatccctgtgaagcaggacagcctgagcagccagaaccagctgggcgtgctgcccctgtcctgggacatccctgagctggtgaacatgggccagtggaagatccgggcctactatgagaacagcccccagcaggtgttcagcacagaatttgaggtgaaggagtatgtgctgcccagctttgaggtgattgtggagcccacagagaagttctactacatctacaatgagaagggcctggaggtgaccatcacagcccgcttcctgtatggcaagaaggtggagggcacagccttcgtcatcttcggcatccaggatggagagcagaggatcagcctgcctgagagcctgaagaggatccccattgaagatggcagcggggaggtggtgctgagcaggaaggtgctgctggatggagtgcagaaccccagggctgaggacctggtgggcaagagcctgtatgtgtctgccaccgtcatcctgcacagcggcagtgacatggtgcaggccgagaggagcggcatccccatcgtgaccagcccctaccagatccacttcaccaagacccccaagtacttcaagccaggcatgccctttgacctgatggtgtttgtgaccaacccagatggcagccctgcctacagagtgcctgtggccgtgcagggcgaggacacagtgcagagcctgacccagggagatggagtggccaagctgagcatcaacacccaccccagccagaagcccctgagcatcaccgtgaggaccaagaagcaggagctgtctgaggccgagcaggccaccaggaccatgcaggccctgccctacagcacagtgggcaacagcaacaactacctgcacctgtctgtgctgaggacagagctgcggcctggagagaccctgaatgtgaacttcctgctgaggatggaccgggcccacgaggccaagatccgctactacacctacctgatcatgaacaagggccgcctgctgaaggccggccggcaggtgcgggagcccggccaggacctggtggtgctgcccctgagcatcaccacagacttcatccccagcttccggctggtggcctactacaccctcatcggggccagcggccagcgggaggtggtggccgacagcgtgtgggtggatgtgaaggacagctgtgtgggcagcctggtggtgaagagcggccagagtgaagatcggcagcctgtgcccggccagcagatgaccctgaagattgaaggagaccatggagcccgggtggtgctggtggccgtggacaagggcgtgtttgtgctgaacaagaagaacaagctgacccagagcaagatctgggatgtggtggagaaggctgacatcggctgcaccccaggcagcggcaaggactatgctggggtcttcagtgatgctggcctgaccttcaccagcagcagcggccagcagacagcccagagagctgagctgcagtgcccccagcctgctgccaggagaagaagatctgtgcagctgacagagaagaggatggacaaggtgggcaagtaccccaaggagctgaggaagtgctgtgaagatggcatgagggagaaccccatgaggttcagctgccagaggaggacccgcttcatcagcctgggggaggcctgcaagaaggtgttcctggactgctgcaactacatcacagagctgcggcggcagcacgcccgggccagccacctgggcctggcccggagcaacctggatgaggacatcatcgccgaggagaacatcgtgagccgctctgagttccctgagagctggctgtggaatgtggaggacctgaaggagccccccaagaatggcatcagcaccaagctgatgaacatcttcctgaaggacagcatcaccacctgggagatcctggccgtgtccatgtctgacaagaagggcatctgtgtggccgacccctttgaggtgacagtgatgcaggacttcttcatcgacctgcggctgccctacagcgtggtgagaaatgagcaggtggagatccgggctgtgctgtacaactaccggcagaaccaggagctgaaggtgcgggtggagctgctgcacaacccagccttctgcagcctggccaccaccaagaggaggcaccagcagacagtgaccatcccccccaagagcagcctgtctgtgccctacgtgattgtgcccctgaagacaggcctgcaggaggtggaggtgaaggctgctgtgtaccaccacttcatcagtgatggagtgaggaagagcctgaaggtggtgcctgagggcatccgcatgaacaagacagtggccgtgaggaccctggaccctgagcggctgggccgggagggcgtgcagaaggaggacatccccccagctgacctgagtgaccaggtgcctgacacagagagcgagacccgcatcctgctgcagggcacccctgtggcccagatgacagaagatgctgtggatgctgagcggctgaagcacctgattgtgacccccagcggctgtggggagcagaacatgattggcatgacccccaccgtgattgctgtgcactacctggatgaaacagagcagtgggagaagtttggcctggagaagaggcagggcgccctggagctgatcaagaagggctacacccagcagctggccttccggcagcccagcagcgcctttgctgcctttgtgaagagggcccccagcacctggctgacagcctacgtggtgaaggtgttcagcctggccgtgaacctgattgccatcgacagccaggtgctgtgtggggctgtgaagtggctgatcctggagaagcagaagccagatggagtcttccaggaggatgcccctgtgatccaccaggagatgattggaggcctgaggaacaacaatgagaaggacatggccctgacagcctttgtgctgatcagcctgcaggaggccaaggacatctgtgaggagcaggtgaacagcctgcccggcagcatcaccaaggccggggacttcctggaggccaactacatgaacctgcagaggagctacacagtggccatcgccggctacgccctggcccagatgggccgcctgaagggccccctgctgaacaagttcctgaccacagccaaggacaagaaccgctgggaggaccccgggaagcagctgtacaacgtggaggccaccagctatgccctgctggccctgctgcagctgaaggactttgattttgtgccccctgtggtgcgctggctgaatgagcagcgctactacggcggcggctacggcagcacccaggccaccttcatggtgttccaggccctggcccagtaccagaaggatgccccagaccaccaggagctgaacctggatgtgtccctgcagctgcccagccgcagcagcaagatcacccaccgcatccactgggagagcgccagcctgctgcggtctgaggagaccaaggaaaatgaaggcttcaccgtgacagctgagggcaagggccagggcaccctgtctgtggtgaccatgtaccacgccaaggccaaggaccagctgacctgcaacaagtttgacctgaaggtgaccatcaagccagcccctgagacagagaagaggccccaggatgccaagaacaccatgatcctggagatctgcacccgctacagaggagaccaggatgccaccatgagcatcctggacatctccatgatgactggatttgccccagacacagatgacctgaagcagctggccaatggagtggaccgctacatcagcaaatatgagctggacaaggccttcagtgacaggaacaccctcatcatctacctggacaaggtgagccacagtgaagatgactgcctggccttcaaggtgcaccagtacttcaacgtggagctgatccagcccggggctgtgaaggtgtatgcctactacaacctggaggagagctgcacccgcttctaccaccctgagaaggaggatggcaagctgaacaagctgtgcagagatgagctgtgccgctgtgccgaggagaactgcttcatccagaagagtgatgacaaggtgaccctggaggagcggctggacaaggcctgtgagcccggggtggactatgtgtacaagacccggctggtgaaggtgcagctgagcaatgactttgatgagtacatcatggccatcgagcagaccatcaagagcggcagtgatgaggtgcaggtgggccagcagaggaccttcatcagccccatcaagtgccgggaggccctgaagctggaggagaagaagcactacctgatgtggggcctgagcagtgacttctggggcgagaagcccaacctgagctacatcatcggcaaggacacctgggtggagcactggccagaggaggatgagtgccaggatgaggagaaccagaagcagtgccaggacctgggcgccttcacagagagcatggtggtgtttggctgccccaactag

SEQ ID NO: 1068 - DNA, 4992 bp, Artificial Sequence
  derived and/or modified sequence
atgggccccaccagcggccccagcctgctgctgctgctgctgacccacctccccttagcccttggttctcccatgtactctattattactcctaacatcctcagactggagtcggaggaaacaatggtcctggaagctcatgacgctcaaggagatgtgccagttacggtgacagtccatgattttcccggcaagaaattggtgcttagctcagaaaagactgttctgacacctgctacaaatcatatgggtaacgtgacgttcactataccggcaaatcgggagtttaagtcggaaaagggccggaacaagtttgtgaccgtccaagctactttcggcacacaagtggtggaaaaagtggtgctggtttcactgcagagcggctacctgttcatacagacggataagactatttacaccccaggctctacagtactatatcggatattcacagtcaaccacaagctgttaccagtgggacgcaccgtgatggtcaatattgagaacccagagggcatacctgttaagcaggattccttgtcttcccagaatcagctgggggttctccctttgagctgggatatcccggagctggtgaacatgggccagtggaagatcagagcatactatgaaaactccccacagcaggtgtttagcaccgagtttgaggtgaaggaatacgtgctcccctcattcgaagtcattgtggaacctactgagaaattctattatatttacaacgaaaaaggcctagaggttaccatcactgcgaggttcctgtatggtaaaaaggtggagggtactgcgtttgtgatttttggcattcaagatggggaacagcgtatatccctgccagagagcctgaaacggatacccatcgaggacggaagtggagaggttgtgctgtccaggaaagtacttttggacggtgtccagaatccaagggcagaagacctggtagggaagtcattgtatgtgagtgccaccgttatcctgcattctgggtctgacatggtccaagccgagaggtccggaatacctattgtgacgagtccatatcaaattcacttcaccaagaccccgaagtattttaaacccgggatgcccttcgatttaatggtatttgttacaaatcccgacggaagtcccgcctacagggtgccagtcgccgtgcaaggagaggacaccgtgcaatccctgacacagggcgacggcgtggccaaactgagcataaacacccacccttcccagaagcctctgtcgataacggtacggaccaagaagcaggagctaagcgaagccgagcaggcaacaaggacgatgcaagccctaccctactccactgtggggaactctaataactacctacacttatccgtcctgcggacagaactcaggcctggcgagactttgaacgtcaattttttgctccgtatggatcgggctcatgaagccaagattagatactacacatacctgataatgaataaggggagacttctaaaggctggcaggcaagtgagggaaccaggacaggacctcgtagtcctccctctgtcaataaccaccgactttatcccttcttttcgtctggtggcatactacaccctgataggggcctccggacagagggaagtggtggccgattctgtatgggttgatgtcaaggactcctgcgtggggtctcttgttgtgaaatccggccagtcagaggaccgtcagcctgtgcccggtcagcagatgactctcaaaatcgaaggcgaccacggggctcgggtggtgctggtggctgtggataagggagtttttgtgttaaacaaaaaaaacaaattgactcagtcaaagatttgggatgttgttgaaaaggccgacataggttgcacaccaggaagcggaaaagattacgccggcgttttcagtgatgcgggacttaccttcacctctagtagtgggcagcaaacggctcagagggccgagctgcagtgccctcagccagctgctcggaggaggagatccgtgcagctgacagaaaaacggatggataaggttggaaagtacccaaaggagttgcgaaagtgttgtgaggacggcatgcgggagaaccctatgcggttttcttgtcagcgcaggacccgctttatatcccttggcgaggcttgcaagaaagtgttcctggattgctgcaattatatcacagaactcaggcggcaacacgctcgtgccagtcatcttgggctagcccgatctaacttagacgaagacatcatcgctgaggaaaacatcgtctcccggagcgaattccctgagtcttggctgtggaacgtcgaggacctcaaggagccgccgaagaacggaattagcaccaagctgatgaatattttcctgaaggactctataactacttgggagatcctggccgtgtccatgtccgacaagaaaggcatctgtgtggccgacccctttgaagtgaccgttatgcaggatttttttatcgatctccggctgccatacagtgttgtcaggaacgagcaagttgagattcgcgcagtgctgtacaactatcgtcagaaccaggaactgaaagtccgcgtcgaactattgcataaccccgccttctgtagcctggctacgactaagagacgacaccagcagaccgttaccatacccccaaagtcctctctgtccgttccttatgtgatcgtgcctttaaaaactgggcttcaggaggtcgaagtgaaggccgccgtgtaccatcattttatatccgatggggtgaggaaatccttgaaggtcgttccggagggcatccggatgaacaagaccgtggccgtgcggaccctagaccctgaacggctgggccgcgagggtgtacaaaaggaggatatcccgccagcagatctgtcggatcaagttcctgacaccgagagtgagactcggatcctcctccaaggtacaccagtcgcccagatgactgaagacgctgtagacgccgagcgcctcaagcacctaatcgtcacaccaagcggttgcggggaacagaacatgattggtatgaccccaaccgtcattgctgtccattatctcgatgaaacagaacaatgggagaaattcggactggagaaaagacaaggagcactcgaactgataaaaaaaggctatacccagcaactggccttccggcagccttcctcagcctttgcagccttcgttaagcgagctccctccacttggctgacggcatacgtggtgaaggtcttctctttagctgtcaacctcatcgccatcgattctcaggtcttatgtggcgccgttaaatggctcatcctggaaaagcagaaaccagacggcgtctttcaggaggatgcccccgttattcaccaagagatgataggcggtctgcggaacaacaatgagaaggatatggctttgaccgccttcgttcttatctcattacaggaagccaaggatatctgtgaggagcaggtgaattcgctcccaggcagcataacgaaggccggcgatttcctcgaagcaaattacatgaaccttcaacgctcctacacagtcgccatcgccggctacgcactagcccagatgggcaggctgaaaggccccctgctcaacaagttcctgaccaccgctaaggataaaaatcggtgggaagaccccggaaaacagttatataatgtcgaagcgactagctatgcactcctcgctcttttgcagctgaaggacttcgacttcgtcccaccagttgtaaggtggttaaatgagcaacgatactatggcggaggctacggctccacacaagcaacatttatggtattccaagccttggcacagtaccagaaggatgctcctgaccaccaggagctgaacctggacgtcagtctgcagctcccatctagaagtagcaagattacacatagaatacactgggagagcgcatcactgcttcggagcgaagagacaaaggagaatgagggatttactgtcaccgccgagggaaaagggcaggggaccctgagtgtggtcacaatgtaccacgctaaggctaaggatcaattaacctgcaataagtttgaccttaaggtaacaatcaagcccgccccggaaaccgaaaagcgcccccaagatgccaagaacaccatgattctcgagatctgtacaagataccggggcgatcaggatgccactatgtccattcttgacatttccatgatgaccggttttgcacccgacacagacgatctgaagcagcttgcaaatggcgtggacaggtacatttctaagtacgagctggataaggcgttttctgacagaaacacgttgatcatctatcttgataaagtgagccactcggaagatgactgcctggcatttaaggtgcaccagtacttcaatgtggagcttatccaacccggagccgtcaaggtttacgcttactataatctggaagaaagctgcaccaggttttatcacccggaaaaggaagatggaaaactgaataagctgtgcagggacgaactgtgcagatgtgccgaagagaattgcttcatccaaaaaagtgatgataaggtgactctggaagagagattggacaaggcttgcgaaccgggggtggattacgtttataaaacccgactggtaaaagtgcaactgtcaaatgactttgacgagtatatcatggccatcgagcagactataaaatctgggtctgacgaggtacaggtggggcagcagcgcacatttattagccccatcaagtgtagggaagctcttaagctcgaagaaaagaagcactacctcatgtgggggctcagctcagacttttggggtgagaaaccaaatctgagttacatcatcggcaaagatacgtgggtggagcattggccagaagaggacgagtgtcaggatgaggagaatcagaaacaatgtcaggacctgggcgcatttactgagtctatggtggtgtttgggtgtccaaactag

SEQ ID NO: 1069 - DNA, 4992 bp, Artificial Sequence
  derived and/or modified sequence
atgggacccacttccgggccttcattattgctgctgctgctgactcacctccctctcgccctcggatctcccatgtactccatcattacccctaatattctgcggttggagagtgaagagaccatggtcctcgaggcacatgatgcacagggtgatgtgccagtcacagtgacagtgcacgactttccgggtaagaagttggtgctgtccagcgagaaaactgttctcacgcccgcaaccaaccacatgggaaatgttacctttacgatccctgctaatcgggagttcaagagcgaaaaggggaggaacaagtttgtgactgtgcaagcgacattcggaacccaggtcgtcgaaaaggtggtcctggtctctctccagtcgggatatctgttcattcagaccgacaagacaatttacacgccaggctcgacagtcctgtatcgcattttcaccgtcaaccataagttgctgcccgtggggcgaaccgtaatggtgaatattgaaaatcccgagggcatccctgtgaagcaggatagtctgagtagccagaaccagttaggagtactgcctctctcgtgggatatccctgaactggtcaatatgggccagtggaagataagagcctactacgagaattctccccaacaggtattttctactgaatttgaggtgaaggaatacgtactccccagcttcgaagtgatcgttgaaccaactgagaagttctactatatttacaatgagaagggtttagaagtcaccatcactgcaagatttctgtatggcaagaaagtggagggaaccgcattcgttatttttggcattcaggatggggagcaacgcatttccttgcccgagagtttgaaacggatccctatagaagacgggtctggagaggtcgtgctgagtcgtaaggttctcttggacggcgtccagaacccgagggctgaggacctggtgggaaaatctctctacgtgagcgccacggtcatattgcacagcggatcggatatggttcaggccgagaggagcggcatcccaattgtgacatccccttaccagatacactttacaaaaaccccaaagtactttaagccagggatgcccttcgacttgatggttttcgtcaccaatccagatggatcccccgcataccgggtcccagtggcagtgcagggcgaggacacggtgcagtccctgactcagggtgatggggtggccaaactgtccatcaatacccacccctctcaaaagcccctcagtatcacagtgaggactaaaaagcaggagttatccgaagctgagcaggctacccggactatgcaagccttgccatacagcacagtggggaatagcaataattacttgcacctgtcagtgctgcgaacggagctgcgtcccggagagactcttaacgtaaattttctcctccgcatggatcgcgcacatgaggccaagatccggtactatacttatttgatcatgaacaaagggcgtctgctgaaagcaggcagacaggtccgcgagcctggacaggatctggtggttctccctctatctattacaacagactttatcccatcatttagactcgtggcatactacactctgatcggggcttccgggcagagagaagtagttgctgactcggtttgggtagacgtcaaggactcatgcgtaggctctctggtcgtgaagtcagggcagtcagaagatcggcaacctgtccccggacagcagatgactttaaaaatagagggtgaccatggcgcaagggtggtgctggtagccgttgacaaaggagtatttgtgctgaataaaaagaataagttaactcagtcaaaaatctgggacgttgtggaaaaggccgatataggttgtactcccggttcaggcaaagactatgccggtgtgttctccgacgccggtctgacctttacctctagttccggacagcaaactgcccagcgcgctgagttacaatgccctcagcctgccgcaagacggagaagaagcgtgcagttgactgagaaacgaatggacaaggtgggcaagtaccctaaagagttacgcaaatgctgcgaagacggcatgagggagaacccgatgcgattcagctgccagcggcgaaccaggtttatatccctcggagaggcatgcaagaaggtctttctggattgttgcaactacataaccgaacttaggcgacaacatgcgagagcgtcacatcttgggttagcaaggagtaaccttgacgaggacattatcgcagaggaaaatatagtctctcggtcggagtttccagaaagctggctctggaatgttgaagaccttaaggagccgccaaagaacgggataagtaccaaactgatgaacatcttcctgaaggactctatcacgacctgggaaattcttgccgtgagcatgagcgataagaaggggatctgcgtggccgatccattcgaggttaccgttatgcaggattttttcatagatctgaggcttccgtactctgtcgtgaggaatgagcaagtcgaaattcgcgctgttctgtataactacaggcaaaaccaggaacttaaagtgagagtggagttactgcacaatcccgctttttgcagcctcgccaccactaaacgccgacatcagcagactgtaacaatccctcccaaaagttccctgtctgttccttacgtgattgtacccctgaaaacagggctgcaagaggtcgaagtgaaagcagctgtgtaccatcactttatctctgacggagtccgtaagtcacttaaggtcgtgcctgagggaattaggatgaataaaaccgtggcagtccgtaccttagaccctgagcggctgggccgagaaggtgttcagaaggaagatattccacccgcagatttgtctgatcaggttcccgacaccgagagcgagacccgcatacttctacagggaaccccagtcgcgcagatgaccgaggacgctgtcgatgcggaaaggctcaagcatctgatcgtcactccctcaggctgtggcgagcagaacatgataggcatgacccctactgtcatagccgtgcactatctggacgagacagagcaatgggagaagtttggactggagaagcgacagggagccttggagttaattaagaaagggtatacgcagcagctggccttccgtcagccctcatcagccttcgccgcatttgtaaaaagagccccaagcacctggctcactgcctatgtcgtcaaagtcttcagcctcgcggtcaacctaatcgccatcgactcccaggtgctttgcggtgctgtgaagtggctcatattggaaaaacagaagcctgacggcgtattccaggaagatgcgccagtcatacaccaagaaatgataggtggcctccggaataacaacgagaaggacatggcactgactgcttttgtgctcatctcgctgcaagaagcaaaggatatctgcgaggagcaagtgaacagcttgccgggaagtattaccaaggcaggtgattttctcgaggcaaactatatgaatctgcaaagatcctacacggtggccatcgccggatacgctttagcccagatgggacgtttgaaaggacctctactgaataaattcctaaccaccgccaaggacaaaaatcgctgggaagacccaggaaaacagctctacaacgtggaggctacgagctatgcactgcttgcgctgcttcagctcaaggactttgatttcgtaccaccagtcgtacgttggctgaatgaacagcgatattatggcggaggctacgggagcacgcaggccacgttcatggtctttcaggctctcgcacaataccagaaggacgctcccgatcaccaggagctcaacctggatgtctcattacagctcccttcccgttcgtcaaaaatcacgcacagaatccactgggaaagcgccagtctgctgagaagcgaggaaactaaggagaacgagggcttcacagttacagccgaaggcaagggtcagggcacactgagcgtggtgaccatgtatcacgccaaggcaaaggaccagctgacctgtaacaagttcgatttaaaggtgacaatcaagccagccccagaaaccgaaaagcgtccacaggatgcgaaaaacaccatgatcttggagatctgcacccggtataggggagaccaggacgcaaccatgagcatcctagatatcagtatgatgaccggatttgcccctgacacagacgacttaaaacagctggctaatggagtggaccggtatataagtaagtacgaactcgataaagccttcagtgatcggaacacgttgattatctatttggataaggtgtcccatagcgaagatgactgcctggcattcaaggtgcaccagtatttcaacgtagagctcatacagcctggcgcagtgaaggtctatgcatattataacttggaggaatcttgtaccagattttaccaccccgagaaggaggacggcaaactgaataagttgtgccgcgatgaactctgtcgctgcgccgaggagaactgttttattcagaagtcagatgacaaagtgacactggaagaaaggttggataaggcctgcgaaccaggcgtcgactatgtgtacaaaacgcgcctagtgaaggtgcagctcagcaacgatttcgatgagtacattatggctatagaacagactattaaatctggatccgatgaagtgcaggtgggacagcaaaggaccttcatcagccctatcaagtgcagagaagccctcaaacttgaagagaagaagcactatcttatgtggggcctgagctcagacttttggggagagaaaccgaaccttagttacatcatcggcaaggatacctgggtggagcattggcctgaagaggatgagtgtcaggacgaggaaaaccagaagcaatgccaggatctcggcgcatttacagaatctatggtggtgtttggttgcccaaactag

SEQ ID NO: 1070 - DNA, 5132 bp, Artificial Sequence
  derived and/or modified sequence
agataaaaagccagctccagcaggcgctgctcactcctccccatcctctccctctgtccctctgtccctctgaccctgcactgtcccagcaccatgggacccacctcaggtcccagcctgctgctcctgctactaacccacctccccctggctctggggagtcccatgtactctatcatcacccccaacatcttgcggctggagagcgaggagaccatggtgctggaggcccacgacgcgcaaggggatgttccagtcactgttactgtccacgacttcccaggcaaaaaactagtgctgtccagtgagaagactgtgctgacccctgccaccaaccacatgggcaacgtcaccttcacgatcccagccaacagggagttcaagtcagaaaaggggcgcaacaagttcgtgaccgtgcaggccaccttcgggacccaagtggtggagaaggtggtgctggtcagcctgcagagcgggtacctcttcatccagacagacaagaccatctacacccctggctccacagttctctatcggatcttcaccgtcaaccacaagctgctacccgtgggccggacggtcatggtcaacattgagaacccggaaggcatcccggtcaagcaggactccttgtcttctcagaaccagcttggcgtcttgcccttgtcttgggacattccggaactcgtcaacatgggccagtggaagatccgagcctactatgaaaactcaccacagcaggtcttctccactgagtttgaggtgaaggagtacgtgctgcccagtttcgaggtcatagtggagcctacagagaaattctactacatctataacgagaagggcctggaggtcaccatcaccgccaggttcctctacgggaagaaagtggagggaactgcctttgtcatcttcgggatccaggatggcgaacagaggatttccctgcctgaatccctcaagcgcattccgattgaggatggctcgggggaggttgtgctgagccggaaggtactgctggacggggtgcagaacccccgagcagaagacctggtggggaagtctttgtacgtgtctgccaccgtcatcttgcactcaggcagtgacatggtgcaggcagagcgcagcgggatccccatcgtgacctctccctaccagatccacttcaccaagacacccaagtacttcaaaccaggaatgccctttgacctcatggtgttcgtgacgaaccctgatggctctccagcctaccgagtccccgtggcagtccagggcgaggacactgtgcagtctctaacccagggagatggcgtggccaaactcagcatcaacacacaccccagccagaagcccttgagcatcacggtgcgcacgaagaagcaggagctctcggaggcagagcaggctaccaggaccatgcaggctctgccctacagcaccgtgggcaactccaacaattacctgcatctctcagtgctacgtacagagctcagacccggggagaccctcaacgtcaacttcctcctgcgaatggaccgcgcccacgaggccaagatccgctactacacctacctgatcatgaacaagggcaggctgttgaaggcgggacgccaggtgcgagagcccggccaggacctggtggtgctgcccctgtccatcaccaccgacttcatcccttccttccgcctggtggcgtactacacgctgatcggtgccagcggccagagggaggtggtggccgactccgtgtgggtggacgtcaaggactcctgcgtgggctcgctggtggtaaaaagcggccagtcagaagaccggcagcctgtacctgggcagcagatgaccctgaagatagagggtgaccacggggcccgggtggtactggtggccgtggacaagggcgtgttcgtgctgaataagaagaacaaactgacgcagagtaagatctgggacgtggtggagaaggcagacatcggctgcaccccgggcagtgggaaggattacgccggtgtcttctccgacgcagggctgaccttcacgagcagcagtggccagcagaccgcccagagggcagaacttcagtgcccgcagccagccgcccgccgacgccgttccgtgcagctcacggagaagcgaatggacaaagtcggcaagtaccccaaggagctgcgcaagtgctgcgaggacggcatgcgggagaaccccatgaggttctcgtgccagcgccggacccgtttcatctccctgggcgaggcgtgcaagaaggtcttcctggactgctgcaactacatcacagagctgcggcggcagcacgcgcgggccagccacctgggcctggccaggagtaacctggatgaggacatcattgcagaagagaacatcgtttcccgaagtgagttcccagagagctggctgtggaacgttgaggacttgaaagagccaccgaaaaatggaatctctacgaagctcatgaatatatttttgaaagactccatcaccacgtgggagattctggctgtgagcatgtcggacaagaaagggatctgtgtggcagaccccttcgaggtcacagtaatgcaggacttcttcatcgacctgcggctaccctactctgttgttcgaaacgagcaggtggaaatccgagccgttctctacaattaccggcagaaccaagagctcaaggtgagggtggaactactccacaatccagccttctgcagcctggccaccaccaagaggcgtcaccagcagaccgtaaccatcccccccaagtcctcgttgtccgttccatatgtcatcgtgccgctaaagaccggcctgcaggaagtggaagtcaaggctgctgtctaccatcatttcatcagtgacggtgtcaggaagtccctgaaggtcgtgccggaaggaatcagaatgaacaaaactgtggctgttcgcaccctggatccagaacgcctgggccgtgaaggagtgcagaaagaggacatcccacctgcagacctcagtgaccaagtcccggacaccgagtctgagaccagaattctcctgcaagggaccccagtggcccagatgacagaggatgccgtcgacgcggaacggctgaagcacctcattgtgaccccctcgggctgcggggaacagaacatgatcggcatgacgcccacggtcatcgctgtgcattacctggatgaaacggagcagtgggagaagttcggcctagagaagcggcagggggccttggagctcatcaagaaggggtacacccagcagctggccttcagacaacccagctctgcctttgcggccttcgtgaaacgggcacccagcacctggctgaccgcctacgtggtcaaggtcttctctctggctgtcaacctcatcgccatcgactcccaagtcctctgcggggctgttaaatggctgatcctggagaagcagaagcccgacggggtcttccaggaggatgcgcccgtgatacaccaagaaatgattggtggattacggaacaacaacgagaaagacatggccctcacggcctttgttctcatctcgctgcaggaggctaaagatatttgcgaggagcaggtcaacagcctgccaggcagcatcactaaagcaggagacttccttgaagccaactacatgaacctacagagatcctacactgtggccattgctggctatgctctggcccagatgggcaggctgaaggggcctcttcttaacaaatttctgaccacagccaaagataagaaccgctgggaggaccctggtaagcagctctacaacgtggaggccacatcctatgccctcttggccctactgcagctaaaagactttgactttgtgcctcccgtcgtgcgttggctcaatgaacagagatactacggtggtggctatggctctacccaggccaccttcatggtgttccaagccttggctcaataccaaaaggacgcccctgaccaccaggaactgaaccttgatgtgtccctccaactgcccagccgcagctccaagatcacccaccgtatccactgggaatctgccagcctcctgcgatcagaagagaccaaggaaaatgagggtttcacagtcacagctgaaggaaaaggccaaggcaccttgtcggtggtgacaatgtaccatgctaaggccaaagatcaactcacctgtaataaattcgacctcaaggtcaccataaaaccagcaccggaaacagaaaagaggcctcaggatgccaagaacactatgatccttgagatctgtaccaggtaccggggagaccaggatgccactatgtctatattggacatatccatgatgactggctttgctccagacacagatgacctgaagcagctggccaatggtgttgacagatacatctccaagtatgagctggacaaagccttctccgataggaacaccctcatcatctacctggacaaggtctcacactctgaggatgactgtctagctttcaaagttcaccaatactttaatgtagagcttatccagcctggagcagtcaaggtctacgcctattacaacctggaggaaagctgtacccggttctaccatccggaaaaggaggatggaaagctgaacaagctctgccgtgatgaactgtgccgctgtgctgaggagaattgcttcatacaaaagtcggatgacaaggtcaccctggaagaacggctggacaaggcctgtgagccaggagtggactatgtgtacaagacccgactggtcaaggttcagctgtccaatgactttgacgagtacatcatggccattgagcagaccatcaagtcaggctcggatgaggtgcaggttggacagcagcgcacgttcatcagccccatcaagtgcagagaagccctgaagctggaggagaagaaacactacctcatgtggggtctctcctccgatttctggggagagaagcccaacctcagctacatcatcgggaaggacacttgggtggagcactggcccgaggaggacgaatgccaagacgaagagaaccagaaacaatgccaggacctcggcgccttcaccgagagcatggttgtctttgggtgccccaactgaccacacccccattcccccactccagataaagcttcagttatatctca

SEQ ID NO: 1071 - DNA, 4992 bp, Artificial Sequence
  derived and/or modified sequence
atgggccccaccagcggccccagcctgctgctgctgctgctgacccacctgcccctggccctgggcagccccatgtacagcatcatcacccccaacatcctgagactggagagcgaggagaccatggtgctggaggcccacgacgcccagggcgacgtgcccgtgaccgtgaccgtgcacgacttccccggcaagaagctggtgctgagcagcgagaagaccgtgctgacccccgccaccaaccacatgggcaacgtgaccttcaccatccccgccaacagagagttcaagagcgagaagggcagaaacaagttcgtgaccgtgcaggccaccttcggcacccaggtggtggagaaggtggtgctggtgagcctgcagagcggctacctgttcatccagaccgacaagaccatctacacccccggcagcaccgtgctgtacagaatcttcaccgtgaaccacaagctgctgcccgtgggcagaaccgtgatggtgaacatcgagaaccccgagggcatccccgtgaagcaggacagcctgagcagccagaaccagctgggcgtgctgcccctgagctgggacatccccgagctggtgaacatgggccagtggaagatcagagcctactacgagaacagcccccagcaggtgttcagcaccgagttcgaggtgaaggagtacgtgctgcccagcttcgaggtgatcgtggagcccaccgagaagttctactacatctacaacgagaagggcctggaggtgaccatcaccgccagattcctgtacggcaagaaggtggagggcaccgccttcgtgatcttcggcatccaggacggcgagcagagaatcagcctgcccgagagcctgaagagaatccccatcgaggacggcagcggcgaggtggtgctgagcagaaaggtgctgctggacggcgtgcagaaccccagagccgaggacctggtgggcaagagcctgtacgtgagcgccaccgtgatcctgcacagcggcagcgacatggtgcaggccgagagaagcggcatccccatcgtgaccagcccctaccagatccacttcaccaagacccccaagtacttcaagcccggcatgcccttcgacctgatggtgttcgtgaccaaccccgacggcagccccgcctacagagtgcccgtggccgtgcagggcgaggacaccgtgcagagcctgacccagggcgacggcgtggccaagctgagcatcaacacccaccccagccagaagcccctgagcatcaccgtgagaaccaagaagcaggagctgagcgaggccgagcaggccaccagaaccatgcaggccctgccctacagcaccgtgggcaacagcaacaactacctgcacctgagcgtgctgagaaccgagctgagacccggcgagaccctgaacgtgaacttcctgctgagaatggacagagcccacgaggccaagatcagatactacacctacctgatcatgaacaagggcagactgctgaaggccggcagacaggtgagagagcccggccaggacctggtggtgctgcccctgagcatcaccaccgacttcatccccagcttcagactggtggcctactacaccctgatcggcgccagcggccagagagaggtggtggccgacagcgtgtgggtggacgtgaaggacagctgcgtgggcagcctggtggtgaagagcggccagagcgaggacagacagcccgtgcccggccagcagatgaccctgaagatcgagggcgaccacggcgccagagtggtgctggtggccgtggacaagggcgtgttcgtgctgaacaagaagaacaagctgacccagagcaagatctgggacgtggtggagaaggccgacatcggctgcacccccggcagcggcaaggactacgccggcgtgttcagcgacgccggcctgaccttcaccagcagcagcggccagcagaccgcccagagagccgagctgcagtgcccccagcccgccgccagaagaagaagaagcgtgcagctgaccgagaagagaatggacaaggtgggcaagtaccccaaggagctgagaaagtgctgcgaggacggcatgagagagaaccccatgagattcagctgccagagaagaaccagattcatcagcctgggcgaggcctgcaagaaggtgttcctggactgctgcaactacatcaccgagctgagaagacagcacgccagagccagccacctgggcctggccagaagcaacctggacgaggacatcatcgccgaggagaacatcgtgagcagaagcgagttccccgagagctggctgtggaacgtggaggacctgaaggagccccccaagaacggcatcagcaccaagctgatgaacatcttcctgaaggacagcatcaccacctgggagatcctggccgtgagcatgagcgacaagaagggcatctgcgtggccgaccccttcgaggtgaccgtgatgcaggacttcttcatcgacctgagactgccctacagcgtggtgagaaacgagcaggtggagatcagagccgtgctgtacaactacagacagaaccaggagctgaaggtgagagtggagctgctgcacaaccccgccttctgcagcctggccaccaccaagagaagacaccagcagaccgtgaccatcccccccaagagcagcctgagcgtgccctacgtgatcgtgcccctgaagaccggcctgcaggaggtggaggtgaaggccgccgtgtaccaccacttcatcagcgacggcgtgagaaagagcctgaaggtggtgcccgagggcatcagaatgaacaagaccgtggccgtgagaaccctggaccccgagagactgggcagagagggcgtgcagaaggaggacatcccccccgccgacctgagcgaccaggtgcccgacaccgagagcgagaccagaatcctgctgcagggcacccccgtggcccagatgaccgaggacgccgtggacgccgagagactgaagcacctgatcgtgacccccagcggctgcggcgagcagaacatgatcggcatgacccccaccgtgatcgccgtgcactacctggacgagaccgagcagtgggagaagttcggcctggagaagagacagggcgccctggagctgatcaagaagggctacacccagcagctggccttcagacagcccagcagcgccttcgccgccttcgtgaagagagcccccagcacctggctgaccgcctacgtggtgaaggtgttcagcctggccgtgaacctgatcgccatcgacagccaggtgctgtgcggcgccgtgaagtggctgatcctggagaagcagaagcccgacggcgtgttccaggaggacgcccccgtgatccaccaggagatgatcggcggcctgagaaacaacaacgagaaggacatggccctgaccgccttcgtgctgatcagcctgcaggaggccaaggacatctgcgaggagcaggtgaacagcctgcccggcagcatcaccaaggccggcgacttcctggaggccaactacatgaacctgcagagaagctacaccgtggccatcgccggctacgccctggcccagatgggcagactgaagggccccctgctgaacaagttcctgaccaccgccaaggacaagaacagatgggaggaccccggcaagcagctgtacaacgtggaggccaccagctacgccctgctggccctgctgcagctgaaggacttcgacttcgtgccccccgtggtgagatggctgaacgagcagagatactacggcggcggctacggcagcacccaggccaccttcatggtgttccaggccctggcccagtaccagaaggacgcccccgaccaccaggagctgaacctggacgtgagcctgcagctgcccagcagaagcagcaagatcacccacagaatccactgggagagcgccagcctgctgagaagcgaggagaccaaggagaacgagggcttcaccgtgaccgccgagggcaagggccagggcaccctgagcgtggtgaccatgtaccacgccaaggccaaggaccagctgacctgcaacaagttcgacctgaaggtgaccatcaagcccgcccccgagaccgagaagagaccccaggacgccaagaacaccatgatcctggagatctgcaccagatacagaggcgaccaggacgccaccatgagcatcctggacatcagcatgatgaccggcttcgcccccgacaccgacgacctgaagcagctggccaacggcgtggacagatacatcagcaagtacgagctggacaaggccttcagcgacagaaacaccctgatcatctacctggacaaggtgagccacagcgaggacgactgcctggccttcaaggtgcaccagtacttcaacgtggagctgatccagcccggcgccgtgaaggtgtacgcctactacaacctggaggagagctgcaccagattctaccaccccgagaaggaggacggcaagctgaacaagctgtgcagagacgagctgtgcagatgcgccgaggagaactgcttcatccagaagagcgacgacaaggtgaccctggaggagagactggacaaggcctgcgagcccggcgtggactacgtgtacaagaccagactggtgaaggtgcagctgagcaacgacttcgacgagtacatcatggccatcgagcagaccatcaagagcggcagcgacgaggtgcaggtgggccagcagagaaccttcatcagccccatcaagtgcagagaggccctgaagctggaggagaagaagcactacctgatgtggggcctgagcagcgacttctggggcgagaagcccaacctgagctacatcatcggcaaggacacctgggtggagcactggcccgaggaggacgagtgccaggacgaggagaaccagaagcagtgccaggacctgggcgccttcaccgagagcatggtggtgttcggctgccccaactag

SEQ ID NO: 1072 - protein, 934 aa, Artificial Sequence
  derived and/or modified sequence
MARRSVLYFILLNALINKGQACFCDHYAWTQWTSCSKTCNSGTQSRHRQIVVDKYYQENFCEQICSKQETRECNWQRCPINCLLGDFGPWSDCDPCIEKQSKVRSVLRPSQFGGQPCTAPLVAFQPCIPSKLCKIEEADCKNKFRCDSGRCIARKLECNGENDCGDNSDERDCGRTKAVCTRKYNPIPSVQLMGNGFHFLAGEPRGEVLDNSFTGGICKTVKSSRTSNPYRVPANLENVGFEVQTAEDDLKTDFYKDLTSLGHNENQQGSFSSQGGSSFSVPIFYSSKRSENINHNSAFKQAIQASHKKDSSFIRIHKVMKVLNFTTKAKDLHLSDVFLKALNHLPLEYNSALYSRIFDDFGTHYFTSGSLGGVYDLLYQFSSEELKNSGLTEEEAKHCVRIETKKRVLFAKKTKVEHRCTTNKLSEKHEGSFIQGAEKSISLIRGGRSEYGAALAWEKGSSGLEEKTFSEWLESVKENPAVIDFELAPIVDLVRNIPCAVTKRNNLRKALQEYAAKFDPCQCAPCPNNGRPTLSGTECLCVCQSGTYGENCEKQSPDYKSNAVDGQWGCWSSWSTCDATYKRSRTRECNNPAPQRGGKRCEGEKRQEEDCTFSIMENNGQPCINDDEEMKEVDLPEIEADSGCPQPVPPENGFIRNEKQLYLVGEDVEISCLTGFETVGYQYFRCLPDGTWRQGDVECQRTECIKPVVQEVLTITPFQRLYRIGESIELTCPKGFVVAGPSRYTCQGNSWTPPISNSLTCEKDTLTKLKGHCQLGQKQSGSECICMSPEEDCSHHSEDLCVFDTDSNDYFTSPACKFLAEKCLNNQQLHFLHIGSCQDGRQLEWGLERTRLSSNSTKKESCGYDTCYDWEKCSASTSKCVCLLPPQCFKGGNQLYCVKMGSSTSEKTLNICEVGTIRCANRKMEILHPGKCLA

SEQ ID NO: 1073 - protein, 260 aa, Artificial Sequence
  derived and/or modified sequence
MSHHWGYGKHNGPEHWHKDFPIAKGERQSPVDIDTHTAKYDPSLKPLSVSYDQATSLRILNNGHAFNVEFDDSQDKAVLKGGPLDGTYRLIQFHFHWGSLDGQGSEHTVDKKKYAAELHLVHWNTKYGDFGKAVQQPDGLAVLGIFLKVGSAKPGLQKVVDVLDSIKTKGKSADFTNFDPRGLLPESLDYWTYPGSLTTPPLLECVTWIVLKEPISVSSEQVLKFRKLNFNGEGEPEELMVDNWRPAQPLKNRQIKASFK

SEQ ID NO: 1074 - DNA, 783 bp, Artificial Sequence
  derived and/or modified sequence
atgtctcaccactgggggtatgggaagcacaatggccctgagcactggcataaagatttcccgattgcaaaaggcgagcggcagagcccggtcgatattgacacccatacagccaagtacgaccctagcctgaagccgctctctgtgtcgtacgatcaggcaacttctttacgcatcctaaataatggacacgcatttaacgtggagtttgatgattcccaggataaggccgtgctgaagggcgggcctctagacggtacctatcgactcattcaatttcattttcattggggcagcttagacgggcagggttccgaacacacagtggacaaaaaaaagtacgccgctgaattgcatctggttcattggaacacgaagtacggtgacttcggcaaagctgtgcagcagccagatggactggcagtgctgggcatcttcttaaaagtcggctctgccaagccaggcctacagaaagtggttgatgttctcgattctattaagaccaagggtaaaagcgccgactttaccaacttcgatcctaggggtctactccctgaatccctggactactggacgtacccaggatctctgactactcccccactgctcgaatgcgtgacctggattgtcctgaaggagcctatttcagtgtcatctgaacaggtgctgaagttcaggaaactgaattttaatggcgaaggcgagcctgaggagttgatggtggataattggaggcccgcacagccgctgaagaatcgacagataaaggcttctttcaagtag

SEQ ID NO: 1075 - DNA, 783 bp, Artificial Sequence
  derived and/or modified sequence
atgagccaccactggggctacggcaagcacaatggacctgagcactggcacaaggacttccccatcgccaagggggagcggcagagccctgtggacatcgacacccacacagccaagtatgaccccagcctgaagcccctgtctgtgtcctatgaccaggccaccagcctgcgcatcctgaacaacggccacgccttcaacgtggagtttgatgacagccaggacaaggctgtgctgaagggcggccccctggatggcacctaccgcctcatccagttccacttccactggggcagcctggatggccagggcagcgagcacacagtggacaagaagaagtatgctgctgagctgcacctggtgcactggaacaccaagtatggagactttgggaaggctgtgcagcagccagatggcctggccgtgctgggcatcttcctgaaggtgggcagcgccaagccaggcctgcagaaggtggtggatgtgctggacagcatcaagaccaagggcaagtctgctgacttcaccaactttgacccccggggcctgctgcctgagagcctggactactggacctacccaggcagcctgaccaccccacccctgctggagtgtgtgacctggatcgtgctgaaggagcccatctctgtgtcctctgagcaggtgctgaagttcaggaagctgaacttcaatggagagggggagcctgaggagctgatggtggacaactggaggcctgcccagcccctgaagaaccggcagatcaaggccagcttcaagtag

SEQ ID NO: 1076 - DNA, 783 bp, Artificial Sequence
  derived and/or modified sequence
atgagccaccactggggctacggcaagcacaacggccccgagcactggcacaaggacttccccatcgcgaagggagagcggcagtcccccgtcgacattgatacccacaccgccaaatacgacccgtcccttaaacctctaagtgtatcctacgaccaagcaacctcgctacgaatcctgaataacggccatgcgtttaacgtcgaattcgacgattcgcaggataaagccgtgttaaagggtggtcccttagatggaacttacaggttgatccagtttcattttcactgggggagcctagacggccaggggagcgagcatactgtggacaagaaaaagtacgcggctgagctgcacctcgttcactggaatactaagtatggcgatttcgggaaagcggtccagcagccagatgggctggctgtcctaggcatcttcttaaaagttggtagcgccaagccaggcctccaaaaggtggtggatgttttagactctattaagaccaaaggaaagagcgctgacttcaccaatttcgacccccggggcctgcttcctgaatctttggattactggacgtacccaggctcacttacaacaccccctcttctcgagtgtgtgacgtggatcgtcttaaaggaaccaatctcagtgtccagcgaacaggtgcttaaatttcggaagttgaactttaacggggagggcgaacctgaagagctaatggtggacaactggcgcccggcccaaccactgaaaaaccgacaaataaaagcctcctttaaatag

SEQ ID NO: 1077 - DNA, 783 bp, Artificial Sequence
  derived and/or modified sequence
atgagccaccactggggctatggcaaacacaatggcccagagcactggcataaagacttccctatagcaaaaggagaacggcagagcccagtggatatcgacacgcacaccgccaaatacgatccttctctgaagcccctgagcgttagttacgatcaggctacttccctccgtattttaaacaatgggcacgcttttaacgtggaattcgacgacagtcaggacaaggccgtgcttaagggcggaccactggatggcacttatcgcttgatacagttccactttcactggggaagcctggatggccagggttctgagcataccgtcgacaagaagaaatatgccgcagagctccacttggtacattggaacacaaagtacggtgacttcggtaaagccgtccaacaacccgacggtcttgccgtactgggaattttcctgaaagtgggaagtgcaaaacccggactgcagaaggtggttgatgtgttagattcgatcaaaaccaagggcaaaagcgcggacttcactaacttcgatcccagaggactgttgcccgagtcactggattattggacctaccctgggagccttacaacccctcctttgcttgagtgtgtaacctggattgtgctgaaagaacctattagcgtttcttccgaacaagttcttaaattccgtaaactgaactttaacggggagggcgagccggaggaactaatggtagataattggcggcctgcacagccgcttaagaaccgccagatcaaagcaagttttaaatag

SEQ ID NO: 1078 - DNA, 1688 bp, Artificial Sequence
  derived and/or modified sequence
cccggcccgccccgccccgagcgcggggagttcacctccgcccgtcaccacctccccttgtcgcctaggtccacccgagccccctcccccgggccgcccccgagcacgaagttggcgggagcctataaaagctggtgccggcgcgacccgcggacacacagtgcaggcgcccaagccgccgccgccagatcggtgccgattcctgccctgccccgaccgccagcgcgaccatgtcccatcactgggggtacggcaaacacaacggacctgagcactggcataaggacttccccattgccaagggagagcgccagtcccctgttgacatcgacactcatacagccaagtatgacccttccctgaagcccctgtctgtttcctatgatcaagcaacttccctgaggatcctcaacaatggtcatgctttcaacgtggagtttgatgactctcaggacaaagcagtgctcaagggaggacccctggatggcacttacagattgattcagtttcactttcactggggttcacttgatggacaaggttcagagcatactgtggataaaaagaaatatgctgcagaacttcacttggttcactggaacaccaaatatggggattttgggaaagctgtgcagcaacctgatggactggccgttctaggtatttttttgaaggttggcagcgctaaaccgggccttcagaaagttgttgatgtgctggattccattaaaacaaagggcaagagtgctgacttcactaacttcgatcctcgtggcctccttcctgaatccttggattactggacctacccaggctcactgaccacccctcctcttctggaatgtgtgacctggattgtgctcaaggaacccatcagcgtcagcagcgagcaggtgttgaaattccgtaaacttaacttcaatggggagggtgaacccgaagaactgatggtggacaactggcgcccagctcagccactgaagaacaggcaaatcaaagcttccttcaaataagatggtcccatagtctgtatccaaataatgaatcttcgggtgtttccctttagctaagcacagatctaccttggtgatttggaccctggttgctttgtgtctagttttctagacccttcatctcttacttgatagacttactaataaaatgtgaagactagaccaattgtcatgcttgacacaactgctgtggctggttggtgctttgtttatggtagtagtttttctgtaacacagaatataggataagaaataagaataaagtaccttgactttgttcacagcatgtagggtgatgagcactcacaattgttgactaaaatgctgcttttaaaacataggaaagtagaatggttgagtgcaaatccatagcacaagataaattgagctagttaaggcaaatcaggtaaaatagtcatgattctatgtaatgtaaaccagaaaaaataaatgttcatgatttcaagatgttatattaaagaaaaactttaaaaattattatatatttatagcaaagttatcttaaatatgaattctgttgtaatttaatgacttttgaattacagagatataaatgaagtattatctgtaaaaattgttataattagagttgtgatacagagtatatttccattcagacaatatatcataacttaataaatattgtattttaga

SEQ ID NO: 1079 - DNA, 783 bp, Artificial Sequence
  derived and/or modified sequence
atgagccaccactggggctacggcaagcacaacggccccgagcactggcacaaggacttccccatcgccaagggcgagagacagagccccgtggacatcgacacccacaccgccaagtacgaccccagcctgaagcccctgagcgtgagctacgaccaggccaccagcctgagaatcctgaacaacggccacgccttcaacgtggagttcgacgacagccaggacaaggccgtgctgaagggcggccccctggacggcacctacagactgatccagttccacttccactggggcagcctggacggccagggcagcgagcacaccgtggacaagaagaagtacgccgccgagctgcacctggtgcactggaacaccaagtacggcgacttcggcaaggccgtgcagcagcccgacggcctggccgtgctgggcatcttcctgaaggtgggcagcgccaagcccggcctgcagaaggtggtggacgtgctggacagcatcaagaccaagggcaagagcgccgacttcaccaacttcgaccccagaggcctgctgcccgagagcctggactactggacctaccccggcagcctgaccaccccccccctgctggagtgcgtgacctggatcgtgctgaaggagcccatcagcgtgagcagcgagcaggtgctgaagttcagaaagctgaacttcaacggcgagggcgagcccgaggagctgatggtggacaactggagacccgcccagcccctgaagaacagacagatcaaggccagcttcaagtag

SEQ ID NO: 1080 - protein, 1873 aa, Artificial Sequence
  derived and/or modified sequence
MEPSSPQDEGLRKKQPKKPVPEILPRPPRALFCLTLENPLRKACISIVEWKPFETIILLTIFANCVALAVYLPMPEDDNNSLNLGLEKLEYFFLIVFSIEAAMKIIAYGFLFHQDAYLRSGWNVLDFTIVFLGVFTVILEQVNVIQSHTAPMSSKGAGLDVKALRAFRVLRPLRLVSGVPSLQVVLNSIFKAMLPLFHIALLVLFMVIIYAIIGLELFKGKMHKTCYFIGTDIVATVENEEPSPCARTGSGRRCTINGSECRGGWPGPNHGITHFDNFGFSMLTVYQCITMEGWTDVLYWVNDAIGNEWPWIYFVTLILLGSFFILNLVLGVLSGEFTKEREKAKSRGTFQKLREKQQLDEDLRGYMSWITQGEVMDVEDFREGKLSLDEGGSDTESLYEIAGLNKIIQFIRHWRQWNRIFRWKCHDIVKSKVFYWLVILIVALNTLSIASEHHNQPLWLTRLQDIANRVLLSLFTTEMLMKMYGLGLRQYFMSIFNRFDCFVVCSGILEILLVESGAMTPLGISVLRCIRLLRIFKITKYWTSLSNLVASLLNSIRSIASLLLLLFLFIVIFALLGMQLFGGRYDFEDTEVRRSNFDNFPQALISVFQVLTGEDWTSMMYNGIMAYGGPSYPGMLVCIYFIILFVCGNYILLNVFLAIAVDNLAEAESLTSAQKAKAEEKKRRKMSKGLPDKSEEEKSTMAKKLEQKPKGEGIPTTAKLKIDEFESNVNEVKDPYPSADFPGDDEEDEPEIPLSPRPRPLAELQLKEKAVPIPEASSFFIFSPTNKIRVLCHRIVNATWFTNFILLFILLSSAALAAEDPIRADSMRNQILKHFDIGFTSVFTVEIVLKMTTYGAFLHKGSFCRNYFNMLDLLVVAVSLISMGLESSAISVVKILRVLRVLRPLRAINRAKGLKHVVQCMFVAISTIGNIVLVTTLLQFMFACIGVQLFKGKFFRCTDLSKMTEEECRGYYYVYKDGDPMQIELRHREWVHSDFHFDNVLSAMMSLFTVSTFEGWPQLLYKAIDSNAEDVGPIYNNRVEMAIFFIIYIILIAFFMMNIFVGFVIVTFQEQGETEYKNCELDKNQRQCVQYALKARPLRCYIPKNPYQYQVWYIVTSSYFEYLMFALIMLNTICLGMQHYNQSEQMNHISDILNVAFTIIFTLEMILKLMAFKARGYFGDPWNVFDFLIVIGSIIDVILSEIDTFLASSGGLYCLGGGCGNVDPDESARISSAFFRLFRVMRLIKLLSRAEGVRTLLWTFIKSFQALPYVALLIVMLFFIYAVIGMQMFGKIALVDGTQINRNNNFQTFPQAVLLLFRCATGEAWQEILLACSYGKLCDPESDYAPGEEYTCGTNFAYYYFISFYMLCAFLVINLFVAVIMDNFDYLTRDWSILGPHHLDEFKAIWAEYDPEAKGRIKHLDVVTLLRRIQPPLGFGKFCPHRVACKRLVGMNMPLNSDGTVTFNATLFALVRTALKIKTEGNFEQANEELRAIIKKIWKRTSMKLLDQVIPPIGDDEVTVGKFYATFLIQEHFRKFMKRQEEYYGYRPKKDIVQIQAGLRTIEEEAAPEICRTVSGDLAAEEELERAMVEAAMEEGIFRRTGGLFGQVDNFLERTNSLPPVMANQRPLQFAEIEMEEMESPVFLEDFPQDPRTNPLARANTNNANANVAYGNSNHSNSHVFSSVHYEREFPEETETPATRGRALGQPCRVLGPHSKPCVEMLKGLLTQRAMPRGQAPPAPCQCPRVESSMPEDRKSSTPGSLHEETPHSRSTRENTSRCSAPATALLIQKALVRGGLGTLAADANFIMATGQALADACQMEPEEVEIMATELLKGREAPEGMASSLGCLNLGSSLGSLDQHQGSQETLIPPRL

SEQ ID NO: 1081 - DNA, 5622 bp, Artificial Sequence
  derived and/or modified sequence
atggagccctcctcccctcaggacgagggactcaggaagaagcagcctaagaagcctgtgccagaaatcctgccccggccaccacgggctcttttctgtctcacattggagaaccccctgagaaaagcctgtatcagcattgttgagtggaagccgttcgagaccattatattattgactatttttgcaaactgtgtagctctagcagtgtaccttcctatgccggaagatgacaacaatagtctgaaccttggtctggaaaagctggagtacttcttcctgattgtcttctccatagaggcagcaatgaagatcattgcatatggattcctgtttcaccaggacgcttatctcagatctggttggaatgtgttggatttcacgatagtgtttctcggcgtgttcaccgttatcctggagcaggtcaatgtgatccagtctcacactgctcctatgtctagtaaaggagccgggttagacgtgaaagccctgagggcctttagggtgcttcgtcccctccggcttgtgagtggcgtcccgagccttcaggtcgtgttgaattccatctttaaagcgatgttgcctctgtttcacattgcccttctggtactcttcatggttattatttacgcaattatcgggttggagttatttaaagggaaaatgcataaaacctgctatttcattgggacagatatcgtcgcgaccgtcgagaatgaggagccctccccgtgcgcccgcactgggtccggccgtagatgtacaataaacggaagcgagtgtcggggcggctggccgggacccaaccacggaatcacacatttcgataactttggattttccatgctgaccgtgtatcagtgtattacgatggagggctggaccgatgtgctttactgggtgaacgatgcgatcggcaatgaatggccttggatttattttgtcaccctaatacttcttggcagtttctttatcctcaacctcgtgctgggcgtcctttcaggtgaatttaccaaggaacgagaaaaggcaaaatctagggggacttttcagaagctgcgggaaaagcaacagctagacgaggacctgaggggatacatgagttggatcacacagggtgaggtgatggacgtagaggacttccgggagggaaaactgagcttagacgaggggggatcagatacggaatctctttacgagatcgcaggcctgaataagatcattcagtttattcgacattggagacagtggaatcgaatatttcggtggaaatgccatgacattgtcaaaagtaaggttttttactggctcgtgatcttgattgttgcactgaatacgcttagtatcgcctccgagcaccacaatcagcccttgtggcttacacgcctccaggatatagcaaaccgcgtgttactcagcttgtttacgacagagatgctcatgaagatgtacggtttgggactgagacagtactttatgtctattttcaataggttcgactgcttcgtggtgtgtagcggtatcctcgaaattctcctggtagagtctggagcgatgactccgcttggaatctccgtgctgcgatgcatcaggctcctgcgcatctttaagatcactaaatactggacttcactgtccaacctcgtggcctccctcttgaactccattagatctattgcctctctgcttctgctgctgtttttattcatcgtgatcttcgccctgcttggaatgcagctttttggcggccggtacgattttgaggacaccgaggttcgacgaagtaacttcgacaacttcccacaggctctcatatccgtgttccaggtcctcacaggagaagattggacatctatgatgtataacggtatcatggcctatggtggtccatcttaccctggtatgcttgtgtgtatttattttatcatcctctttgtttgcggcaattatatactcctgaatgtcttcctcgccattgctgtagacaatttggccgaggccgaaagtctgacctctgcacaaaaggcaaaggctgaggaaaaaaaacgaagaaagatgtctaaggggctcccggataaatcagaagaagaaaaatctactatggcgaaaaaactggaacagaagcccaaaggggaaggcatccccacgactgccaaacttaagattgacgagttcgaatccaatgtgaacgaagtaaaggacccttacccgtccgctgattttccaggggatgacgaagaggatgagcctgagattcccctctctcctcgaccaaggccacttgctgagctccagctcaaggaaaaggcagtgcctatccccgaagcctcgtctttttttatattcagtcccaccaacaaaattagggtgctctgtcacaggattgtaaacgccacctggttcactaacttcatactgttatttattcttctctcttccgctgctttggccgctgaagatcctatcagagccgactccatgagaaatcagattctaaagcatttcgatatcggattcaccagtgtatttactgtagagattgtcttaaagatgaccacatacggagcattcttgcacaagggcagtttctgcagaaactactttaatatgctcgacttgctggtggtggccgtttccctcatctctatgggcctggagtcctctgcgatcagcgttgtaaaaatcctgcgagtgcttcgtgtcctgcgcccattacgcgccataaacagagctaagggactcaagcacgtggttcagtgcatgttcgtggccatttcgacaatcgggaacatcgtcctcgttaccactcttttacaattcatgttcgcctgtatcggagtgcagctatttaagggaaagttctttaggtgtacggatctaagcaagatgactgaggaagaatgcagagggtactactacgtttacaaagatggggatcctatgcaaatcgaactgcgccacagagaatgggtgcactcagatttccacttcgacaatgtgctctccgccatgatgagcctgtttaccgttagcacatttgaagggtggcctcagcttctctataaagccatagatagcaatgccgaggacgttggcccaatctacaacaaccgcgtcgagatggcaatattttttataatctacatcatcttgattgcctttttcatgatgaacatttttgtcggatttgtgatcgtcactttccaagagcagggcgaaactgagtacaagaactgtgaactcgacaaaaatcagaggcagtgtgtccagtatgccctcaaagcacgtcctttgagatgttatatccctaagaacccctaccagtatcaggtctggtatattgtgaccagttcgtatttcgaatatctgatgtttgccttaataatgctgaacacaatttgtctgggaatgcagcattacaaccagtccgagcagatgaatcatatcagcgacatactgaatgtggcctttacaattattttcacactcgaaatgatcttgaagttgatggctttcaaagcgcggggctattttggtgatccgtggaatgttttcgactttctgattgtcatcggaagcataatcgatgtaatcctgtcagagattgatacgtttctcgcaagctcaggcggtttatactgtctcggcggaggttgcgggaacgtggatcctgacgaaagcgcccgcattagcagtgcgttcttcagactcttccgagtgatgcgactgattaaactgctgtcccgcgccgaaggtgtcagaacactgctctggactttcatcaagagcttccaggcattaccatacgttgccctgctgatagtcatgctgttctttatatatgctgtcattggaatgcagatgttcggcaaaatcgccttagtggacggcactcagatcaatagaaataacaacttccaaacctttccgcaggcagttctcttactgtttagatgtgctacaggggaggcctggcaggaaattctgctggcatgtagctatgggaaactatgtgaccccgaatccgactatgctcccggggaggaatacacgtgtggcaccaacttcgcctactattacttcatttccttttacatgttatgtgcgtttttggtaatcaatttgttcgtggccgtgatcatggataactttgattacctgaccagggattggagtatcttgggccctcaccacttagacgaatttaaggccatatgggcagagtacgatcctgaggccaagggcaggataaagcacttagatgtggtaacactactccgacggattcagcctccactaggcttcggaaagttttgtccgcaccgcgtcgcatgcaaaaggctcgtgggaatgaatatgcccttaaattcagatggcaccgtaacgttcaatgcaactctgttcgctcttgttcggaccgcactcaaaatcaaaaccgaggggaattttgaacaagccaacgaggagctgagagctatcattaagaagatctggaagcgaacgtctatgaagctcctggaccaggttatccctccaataggggacgacgaggttacagtcggcaaattttatgccacgttcctgattcaggagcactttaggaaattcatgaaaagacaggaagaatactacggatacaggcccaaaaaagatatcgtgcagatccaagctggcctgaggactattgaggaagaagccgctccggagatttgtcgaactgtcagcggagacttggcagccgaagaagaattggaacgggccatggttgaggccgcaatggaggaaggaatctttcgtcgtacaggggggctgtttggacaggtggataacttcctcgaacggacgaactcactgccacctgtgatggcaaatcagcgcccgcttcagtttgctgaaatcgagatggaggaaatggagtcccccgttttcttggaagatttcccgcaagatccccgcacaaacccacttgcgcgtgcaaacacaaataacgcaaatgctaatgttgcttacggtaatagcaatcactccaactcccacgtattcagctccgtgcattacgagcgggaattccctgaggagaccgaaacacccgccaccaggggtcgggccttgggtcagccatgtagggttctgggtccacacagtaaaccctgcgtggagatgctcaagggtttgctcacacaaagggcaatgcccagaggccaggcccctccagcaccgtgtcaatgtccccgggtggaatctagcatgcccgaagatcgcaaaagcagcacccctggttctctgcatgaggagactccacactccagatctacgagagaaaacacgtctcggtgtagcgcccccgccaccgctctcctgatccagaaagcgctagtccggggagggctcggcactctggctgctgacgctaatttcattatggctaccggacaggccctggctgacgcctgccagatggaaccagaagaagtcgagataatggctaccgagcttcttaagggcagagaggccccggagggaatggcaagcagcttgggatgcctgaatctggggtcttctttgggttccctggatcagcaccagggttctcaggagaccctcatcccccctagactgtag

SEQ ID NO: 1082 - DNA, 5622 bp, Artificial Sequence
  derived and/or modified sequence
atggagcccagcagcccccaggatgagggcctgaggaagaagcagcccaagaagcctgtgcctgagatcctgcccaggcctccccgggccctcttctgcctgaccctggagaaccccctgaggaaggcctgcatcagcatcgtggagtggaagccctttgagaccatcatcctgctgaccatctttgccaactgtgtggccctggccgtgtacctgcccatgccagaagatgacaacaacagcctgaacctgggcctggagaagctggagtacttcttcctgattgtgttcagcattgaagctgccatgaagatcatcgcctacggcttcctgttccaccaggatgcctacctgcggagcggctggaatgtgctggacttcaccatcgtgttcctgggcgtcttcaccgtcatcctggagcaggtgaatgtcatccagagccacacagcccccatgagcagcaaaggagctggcctggatgtgaaggccctgcgggccttccgggtgctgcggcccctgcggctggtgtctggagtgcccagcctgcaggtggtgctgaacagcatcttcaaggccatgctgcccctcttccacatcgccctgctggtgctcttcatggtgatcatctatgccatcatcggcctggagctgttcaagggcaagatgcacaagacctgctacttcatcggcacagacatcgtggccaccgtggagaatgaggagcccagcccctgtgccaggacaggcagcggccgccgctgcaccatcaatggaagtgagtgccggggcggctggccaggccccaaccacggcatcacccactttgacaactttggcttctccatgctgactgtgtaccagtgcatcaccatggagggctggacagatgtgctgtactgggtgaatgatgccatcggaaatgagtggccctggatctactttgtgaccctcatcctgctgggcagcttcttcatcctgaacctggtgctgggcgtgctgagcggggagttcaccaaggagcgggagaaggccaagagccggggcaccttccagaagctgcgggagaagcagcagctggatgaggacctgcggggctacatgtcctggatcacccagggcgaggtgatggatgtggaggacttccgggagggcaagctgagcctggatgaaggaggcagtgacacagagagcctgtatgaaattgctggcctgaacaagatcatccagttcatccgccactggaggcagtggaaccgcatcttccgctggaagtgccacgacatcgtgaagagcaaggtgttctactggctggtgatcctgattgtggccctgaacaccctgagcatcgccagcgagcaccacaaccagcccctgtggctgacccggctgcaggacatcgccaacagagtgctgctgagcctcttcaccacagagatgctgatgaagatgtatggcctgggcctgcggcagtacttcatgagcatcttcaacagatttgactgctttgtggtgtgcagcggcatcctggagatcctgctggtggagagcggggccatgacccccctgggcatctctgtgctgcgctgcatccggctgctgcgcatcttcaagatcaccaagtactggaccagcctgagcaacctggtggccagcctgctgaacagcatccgcagcatcgccagcctgctgctgctgctcttcctgttcatcgtcatctttgccctgctgggcatgcagctgtttggaggccgctatgactttgaggacacagaggtgagaagaagcaactttgacaacttcccccaggccctgatcagcgtcttccaggtgctgaccggggaggactggacctccatgatgtacaacggcatcatggcctatggaggccccagctacccaggcatgctggtgtgcatctacttcatcatcctgtttgtgtgtggcaactacatcctgctgaatgtgttcctggccatcgctgtggacaacctggccgaggccgagagcctgaccagcgcccagaaggccaaggccgaggagaagaagaggaggaagatgagcaagggcctgcctgacaagtctgaggaggagaagagcaccatggccaagaagctggagcagaagcccaagggggagggcatccccaccacagccaagctgaagattgatgaatttgagagcaatgtgaatgaggtgaaggacccctaccccagcgctgacttccctggagatgatgaagaagatgagcctgagatccccctgagcccccggccccggcccctggccgagctgcagctgaaggagaaggctgtgcccatccctgaggccagcagcttcttcatcttcagccccaccaacaagatccgggtgctgtgccacagaattgtgaatgccacctggttcaccaacttcatcctgctcttcatcctgctgagcagcgctgccctggccgctgaggaccccatccgggctgacagcatgaggaaccagatcctgaagcactttgatattggcttcacctctgtgttcaccgtggagatcgtgctgaagatgaccacctacggggccttcctgcacaagggcagcttctgcaggaactacttcaacatgctggacctgctggtggtggccgtgtccctcatctccatgggcctggagagcagcgccatctctgtggtgaagatcctgcgggtgctgcgggtgctgcggcccctgcgggccatcaacagagccaagggcctgaagcacgtggtgcagtgcatgtttgtggccatcagcaccatcggcaacatcgtgctggtgaccaccctgctgcagttcatgtttgcctgcattggagtgcagctgttcaagggcaagttcttccgctgcacagacctgagcaagatgacagaggaggagtgccggggctactactacgtgtacaaggatggagaccccatgcagatcgagctgcggcaccgggagtgggtgcacagcgacttccactttgacaacgtgctgagcgccatgatgagcctcttcaccgtgtccacctttgagggctggccccagctgctgtacaaggccatcgacagcaatgcagaagatgtgggccccatctacaacaacagagtggagatggccatcttcttcatcatctacatcatcctgattgccttcttcatgatgaacatctttgtgggctttgtgattgtgaccttccaggagcagggcgagacagagtacaagaactgtgagctggacaagaaccagaggcagtgtgtgcagtatgccctgaaggcccggcccctgcgctgctacatccccaagaacccctaccagtaccaggtgtggtacatcgtgaccagcagctactttgagtacctgatgtttgccctgatcatgctgaacaccatctgcctgggcatgcagcactacaaccagagcgagcagatgaaccacatcagtgacatcctgaatgtggccttcaccatcatcttcaccctggagatgatcctgaagctgatggccttcaaggcccggggctactttggagacccctggaatgtgtttgacttcctgattgtgattggcagcatcattgatgtgatcctgtctgaaattgacaccttcctggccagcagcggcggcctgtactgcctgggcggcggctgtggaaatgtggaccctgatgaaagtgcccgcatcagcagcgccttcttccgcctcttccgggtgatgaggctcatcaagctgctgagcagagctgagggcgtgaggaccctgctgtggaccttcatcaagagcttccaggccctgccctacgtggccctgctgattgtgatgctgttcttcatctatgctgtgattggcatgcagatgtttgggaagatcgccctggtggatggcacccagatcaacagaaacaacaacttccagaccttcccccaggccgtgctgctgctcttccgctgtgccactggagaggcctggcaggagatcctgctggcctgcagctatggcaagctgtgtgaccctgagagtgactatgcccctggagaggagtacacctgtggcaccaactttgcctactactacttcatctccttctacatgctgtgtgccttcctggtgatcaacctgtttgtggccgtcatcatggacaactttgactacctgacccgggactggagcatcctgggcccccaccacctggatgagttcaaggccatctgggccgagtatgaccctgaggccaagggccgcatcaagcacctggatgtggtgaccctgctgcggcgcatccagccccccctgggctttgggaagttctgcccccaccgggtggcctgcaagaggctggtgggcatgaacatgcccctgaacagtgatggcaccgtgaccttcaatgccaccctgtttgccctggtgaggacagccctgaagatcaagacagagggcaactttgagcaggccaatgaggagctgcgggccatcatcaagaagatctggaagaggacctccatgaagctgctggaccaggtgattcctcccatcggagatgatgaggtgacagtgggcaagttctacgccaccttcctgatccaggagcacttcaggaagttcatgaagaggcaggaggagtactacggctaccggcccaagaaggacatcgtgcagatccaggccggcctgcggaccatcgaggaggaggccgcccctgagatctgcaggacagtgtctggggacctggccgctgaggaggagctggagcgggccatggtggaggccgccatggaggagggcatcttcagaagaactggaggcctgtttggccaggtggacaacttcctggagaggaccaacagcctgccccctgtgatggccaaccagaggcccctgcagtttgctgagattgagatggaggagatggagagccctgtgttcctggaggacttcccccaggaccccaggaccaaccccctggcccgggccaacaccaacaatgccaatgccaacgtggcctacggcaacagcaaccacagcaacagccacgtgttcagctctgtgcactatgaaagagagttccctgaggagacagagaccccagccacccggggccgggccctgggccagccctgccgggtgctgggcccccacagcaagccctgtgtggagatgctgaagggcctgctgacccagagggccatgccccggggccaggcccccccagccccctgccagtgcccccgggtggagagctccatgcctgaggacaggaagagcagcaccccaggcagcctgcacgaggagaccccccacagccgcagcacccgggagaacaccagccgctgcagcgccccagccacagccctgctgatccagaaggccctggtgcggggcggcctgggcaccctggccgcagatgccaacttcatcatggccaccggccaggccctggctgatgcctgccagatggagcctgaggaggtggagatcatggccacagagctgctgaagggccgggaggcccctgagggcatggccagcagcctgggctgcctgaacctgggcagcagcctgggcagcctggaccagcaccagggcagccaggagaccctcatccccccccggctgtag

SEQ ID NO: 1083 - DNA, 5622 bp, Artificial Sequence
  derived and/or modified sequence
atggagcccagcagcccccaggacgagggcctgcggaagaagcagccaaagaaacctgtaccagagatcctgccccgaccacccagggctctcttctgtctcaccttggaaaaccctcttcgcaaagcctgcatcagcatagtggagtggaagcccttcgaaacaatcatcctgttaaccattttcgccaactgtgtcgcactggccgtgtacctgccgatgccagaagacgataacaattcactgaacctaggactagagaaactggaatattttttccttatcgtgttctccatcgaggccgcgatgaagattattgcatatgggtttctcttccaccaagacgcctatcttcggtcagggtggaacgttctggatttcactatcgtgttcctgggagttttcactgttatcctcgagcaagtcaacgtgattcagtcacatactgctccgatgtccagtaagggggccgggcttgacgtaaaggctctgcgcgcctttcgagtgctgagacctctgcgattggtcagtggtgtgcctagtttgcaagtggttttaaacagtatcttcaaggctatgctgccattgtttcacattgctctgctggttctttttatggtgattatatacgccattattgggctggaactctttaaaggaaaaatgcacaaaacctgctacttcatcggcaccgatatcgtggctacagtcgagaatgaagagccctcaccatgcgcccgtacgggcagcggccggcggtgcactatcaacggctcagagtgccgcggcggatggcctgggcccaatcatgggattactcacttcgataatttcggttttagcatgttaacggtgtaccagtgtatcaccatggaaggctggaccgacgtcctgtactgggtgaacgatgcaatcgggaatgagtggccatggatttactttgtgacattaatactactgggctcgttcttcattctgaacctggttctgggcgtgctgtcaggggaatttaccaaagaaagagaaaaggctaagagtagaggtactttccaaaagctgagagagaaacagcagctggacgaagacttaagaggctatatgtcctggatcacacagggcgaggtgatggacgtggaggactttcgagagggcaaactgagtctcgacgaggggggcagtgataccgagtctctgtacgaaattgccgggctgaacaaaattattcagtttataagacactggcgccagtggaaccgaattttccgatggaagtgccatgacatagtgaagagcaaagtgttttattggctagtcattctgatcgtggcccttaacacactgtcaatcgcgagcgagcaccataaccaacccctttggctgaccagactgcaggatattgcgaaccgggtgctgctctctctcttcacaacagagatgctgatgaagatgtacgggctcggcctgaggcaatatttcatgtccatttttaacagatttgactgcttcgttgtgtgtagcggcatcctcgagatactcctggtcgaaagtggtgccatgacccccctgggcatctctgtcctgagatgtatcaggctcctgcggatttttaagatcacaaagtactggacatcgctgtccaacctagtggctagcctgttgaattctatccgcagcattgcatcccttttgctgctactgtttttgtttatagtcatttttgcactcctggggatgcaactattcggcggtcggtacgacttcgaggacacagaagtgaggagaagcaactttgacaactttcctcaagcactaatttctgtctttcaagtcctgaccggcgaggattggacaagtatgatgtacaatgggatcatggcttatggggggcccagctaccctggcatgctggtgtgcatctacttcatcattctcttcgtgtgtgggaattacatcctgctaaatgtgtttcttgcgatagcagtcgacaacctcgccgaagctgagagcctaacttctgcgcagaaagccaaggccgaggagaaaaagcgcaggaaaatgtctaagggactccctgacaaatctgaagaagagaagagcacgatggccaagaagctggagcaaaagcccaagggagaggggatccccacaaccgctaaattgaaaatcgacgaattcgaatcaaacgtaaacgaggtgaaagatccctacccttctgccgattttcctggggatgacgaagaggacgagccagaaatcccactgtcaccacgcccacggcccctggctgaactacagctgaaagaaaaggctgttccaatacctgaggcttcttccttctttatctttagcccgaccaacaagatacgggtgctgtgtcatcgaatcgtcaatgcaacgtggttcaccaattttatactcctgtttatcctgttatctagcgccgccctcgccgccgaagatcccatcagagcagactctatgaggaatcagatcttgaagcacttcgatattggattcacatcagtatttacggtagaaattgtgctaaagatgactacttacggcgccttcctccataaaggatcattctgtcgaaattactttaacatgctcgaccttctggtagtggctgttagtctgatttctatgggcctggaatcctctgccatctcggttgtgaagattctgcgtgttttgagagtgttgaggccactccgggctatcaatcgggccaagggactgaaacatgtggtacagtgcatgttcgtggcaatcagcaccatcgggaacatcgtcctcgttacgacattactgcagtttatgtttgcctgtataggcgttcagttatttaagggaaagtttttccgatgcaccgatctctccaagatgactgaggaggaatgcaggggttattactacgtctacaaggacggggatcccatgcagatcgaactgcgacaccgtgagtgggtccatagtgattttcacttcgataatgtgttaagcgcaatgatgagccttttcacggtgtcaacctttgagggctggccacaacttttgtataaagcaattgattccaacgccgaggatgtagggcctatttacaataaccgcgtggaaatggcaatatttttcatcatttacatcattttgattgccttttttatgatgaatatttttgtgggatttgtcattgtcacctttcaggagcagggggagacagagtataaaaactgtgagctggataaaaaccagcgccagtgcgtccagtatgcgcttaaagctcgaccactgagatgctatattcctaagaacccttatcagtatcaggtttggtacatcgtgacaagctcatactttgaatacctgatgttcgctctgatcatgctgaatacaatttgtctaggaatgcagcactacaatcaatcagaacaaatgaatcacatctccgacattctgaatgtggccttcacgattattttcacgctggagatgatactaaaactcatggctttcaaagctaggggctacttcggggacccttggaatgtgttcgactttcttattgtgattgggagcattattgatgtaatcttgagcgaaatcgatacattcctagcttctagcgggggcctgtactgtcttggaggtgggtgcgggaatgttgatcccgatgagtccgccagaatcagttctgccttctttaggctctttcgcgttatgagacttatcaaactcctgagccgcgcggaaggcgtaaggacactcctgtggaccttcataaagagctttcaagccctgccctatgttgcgctgttgatagtcatgctctttttcatttacgctgtaattggaatgcagatgtttggaaaaatagcattagtggacgggacacagatcaacagaaataataatttccagactttccctcaagcagttttattgttattcagatgcgccactggagaggcctggcaggaaattcttctcgcctgttcttacgggaaactctgtgatcccgagtccgactatgcacctggagaggagtatacttgtgggacaaattttgcttattactactttatcagcttctacatgttatgcgcctttctggtcattaatctctttgtcgccgtgatcatggacaatttcgattatcttacgagagactggtccatactcggacctcatcacttagatgagttcaaagcgatctgggctgaatacgatccagaagccaaggggaggattaaacacctcgacgtcgtgacattactaaggcgcatccagccccccctgggctttggcaagttttgtccccatcgtgtagcatgtaagaggttagtgggaatgaacatgcccctgaacagtgacggcacagtgacgttcaacgccacactgttcgcgctggtgcggaccgctctgaaaattaagactgagggcaacttcgagcaggctaatgaggaactgagagctattataaagaagatctggaaacggacatcaatgaagttgctcgaccaggtgattccccctattggtgatgacgaggtgacggtgggcaagttttatgctacttttttgattcaggaacacttccggaaattcatgaaacgccaggaagaatattacggatacaggcctaagaaggatatagtgcagattcaggccggtttacgaaccattgaggaagaagcagctcccgaaatttgtcgcaccgtgagcggggatctggctgctgaggaagagctcgaaagagccatggtggaggcagctatggaagagggcatcttccggcgcacgggcgggcttttcggacaggttgacaacttcttggaaaggacgaattcgctgcccccagttatggctaaccagaggccactccaattcgcagagatcgagatggaagagatggagtcaccagttttcttagaggacttcccacaagatcctcggaccaaccccctcgcccgggccaacaccaataatgccaatgccaatgtagcttacgggaatagtaatcacagtaatagtcatgtgttctcttccgttcactatgagagggagtttcctgaagagaccgaaacaccggccacacgaggccgtgccctggggcagccatgtcgcgttcttggaccacactctaagccctgcgtggagatgttgaaaggactcctgacacagagagccatgcctcgtgggcaggctccaccagccccctgccagtgcccccgagttgagagttctatgccagaggatcgaaagtcctccactcctggctctctccatgaagagaccccccactccaggtcaactcgcgagaacacttcccggtgctccgcccctgccacagcactcttgattcagaaagcgctcgtgaggggcgggctagggactctggcagcagacgccaattttatcatggctaccgggcaggctttggccgatgcctgccagatggagccggaggaggtcgaaattatggccaccgagctcttaaagggacgggaggcgcccgagggaatggccagttcccttggctgcctgaacctcggttcctctctggggtcgctggaccagcaccaaggtagccaagaaacactcattccacccaggctgtag

SEQ ID NO: 1084 - DNA, 5621 bp, Artificial Sequence
  derived and/or modified sequence
atggagccaagctctcctcaagatgaggggctgcgtaaaaagcagccgaagaagccagtgcctgagatattgccgaggccaccccgagccctgttctgcctgaccttagagaaccctcttagaaaggcctgtattagcattgtggagtggaagcccttcgaaaccatcatcctgctaacgatctttgcaaattgcgtcgctctcgcggtttatctgcctatgcctgaggatgacaacaacagcctgaatctcggcctggagaaactcgaatactttttcctcattgtcttttcaatcgaggccgctatgaagatcattgcctacggcttcctattccaccaggatgcatacctgcgatccggttggaacgtgcttgattttacgattgtatttctgggcgtattcaccgtaattctcgagcaggtgaacgtgattcagagccacactgcccctatgtcatcaaagggggctgggttggacgttaaagctctgagagcatttagggtgctacggcctctgaggctagtctctggcgtgccttcattgcaggtggtgcttaactctatattcaaggcgatgctgcccttatttcacatcgcactactagtcctgtttatggtcattatttacgccattattgggctggagctgttcaaaggcaagatgcataaaacatgctattttatcggcacagacatagttgccaccgtggagaacgaggagccatctccctgtgccagaactgggtccggaagacggtgcacaattaatggctccgagtgccgcggtggttggccgggtcccaatcacggcatcacccacttcgacaattttggtttctccatgctcacagtgtatcagtgtattactatggaggggtggacagacgtcctttactgggtaaatgacgccattgggaatgagtggccttggatttacttcgtcactcttattctgttgggctccttctttattttgaatctcgtgctgggtgtactctctggtgaattcacaaaagagcgcgaaaaggcaaagagtaggggaactttccagaagctcagagaaaagcagcagcttgatgaggatttgagagggtatatgtcttggatcactcagggcgaagtcatggacgtggaggactttcgtgaagggaaactctctctcgatgaaggtggttccgacacagaaagtctttatgagatcgccggactaaataaaataatccagttcatccgtcactggaggcagtggaataggatttttcgatggaaatgtcacgatatagtcaagtcaaaggtgttttactggctcgtgatcctcatcgttgccttaaatacactgtctatcgccagtgagcaccacaaccaacccctgtggctaacccgtctacaagatatcgccaaccgcgtgcttctttctctttttactaccgaaatgctgatgaagatgtacggtcttgggctgagacagtacttcatgtctatctttaaccgttttgactgctttgtggtttgctcagggattctcgagatattgttggtggagtccggagctatgacacctctgggaatctctgtcctacggtgtatcaggttgcttagaatctttaaaatcaccaaatattggacctctctcagcaatctagtcgcatcactgctgaattctatcagatctatagcgtctcttttattgctcttattcttatttatcgtgatcttcgccctcctgggcatgcagctgttcgggggacgatacgacttcgaggacactgaagtgcggaggtctaatttcgataattttcctcaggcacttatttctgtttttcaggtgctgacgggagaagattggacttcaatgatgtataacgggatcatggcttatggcggaccctcttatcctggaatgctggtatgcatttacttcattattctgtttgtgtgcgggaattatattttgctgaatgtgttcctggctatcgcggttgataacctggctgaagcagaatccctgacatccgctcagaaagctaaagccgaagaaaaaaaacgcagaaaaatgagcaaaggactgccagacaaatcagaagaggagaagtcaacgatggccaagaaactcgagcagaaacccaagggcgagggtatcccaactacagcaaaactaaagatcgatgagtttgagagcaacgtgaatgaggtgaaggatccctatccgagtgccgattttcccggagacgatgaggaggatgagcctgagattcctctgagccctcgccctcggcctctggctgagttgcaattaaaggaaaaagccgtgccgataccagaggccagctcattttttattttcagccctaccaacaagattagggtactgtgccaccgcatcgttaacgccacttggttcacgaatttcattttgctgttcatcctgctgtcgagtgccgctctggccgctgaggaccccatcagagccgactcaatgagaaaccagattctgaaacattttgacatcgggtttacaagcgtattcaccgtggaaattgttttgaaaatgactacatatggagcctttctgcacaaaggctcgttctgtagaaactacttcaacatgctggatctcctcgtggtagccgtgtccctaatatctatgggcctggagtcctctgcgatatccgtggtaaagattctaagagttctaagggtattgcggcctctaagggccattaatcgagcaaaaggcctcaagcacgtggtgcagtgcatgttcgtcgccataagtactatcgggaacatagtgttagtcacaaccctattacaattcatgttcgcttgcattggtgtgcagttgtttaaaggcaaattcttccgctgtactgatctttcaaagatgacggaagaggaatgccgcggatactactacgtttataaggatggagatcccatgcagatcgagctgcgacatagggaatgggttcattcagacttccacttcgataacgtgctctcagccatgatgtccctgtttacagtcagcaccttcgaaggctggccgcagcttctttataaggctattgattctaatgctgaagatgttggccctatctacaataatagggtcgagatggccatcttcttcattatctatattatcctcatcgccttcttcatgatgaacatattcgtggggttcgttattgtgacctttcaagaacagggcgagaccgaatataaaaactgtgagttagataaaaaccagaggcaatgcgttcagtacgccctcaaagcacgcccactccggtgctacataccgaagaacccttatcaataccaggtatggtacatcgtcacaagctcttatttcgagtacctgatgttcgccctgatcatgttgaatacaatatgtttgggtatgcaacactataaccagtctgagcagatgaaccacatctcagatatccttaacgttgcctttacaataatcttcacacttgagatgatcctgaagctgatggctttcaaggcccgagggtattttggcgatccatggaatgtattcgacttcctgatcgtgattgggtctattatcgacgtcatcctgagcgaaatcgacactttcttggcttctagcgggggtctttactgcctgggtggcggatgcggcaatgtagatccagatgaatcagcaagaatatcctctgctttctttcgactgtttagagtgatgaggctcatcaaacttctaagtcgggctgagggcgtgcgtacattgctgtggacatttatcaaatcattccaggctctcccatatgtggctctactgatcgtgatgctcttctttatatacgccgttatcggtatgcagatgtttggaaagatagcactggttgatggtacacagattaatcgaaataataattttcagaccttcccacaggctgtgctattgttgttccgctgtgcaaccggagaggcgtggcaggagattctgctggcctgctcatatgggaagctttgtgatcccgaatcagattacgctccgggtgaagagtacacttgcggcactaactttgcatattactattttatctcattttacatgttgtgtgccttcctggtcatcaacctcttcgtcgccgtcatcatggacaactttgactacctcaccagagactggagcattcttggcccacaccatctagacgaatttaaggcgatatgggcagaatacgaccccgaggcaaagggtcgtattaaacacctggacgtggtgactctcctgaggcgtatccagcctcccctgggcttcggcaagttttgcccccaccgtgtcgcctgcaaaaggctggttggaatgaatatgccactaaactctgatggtactgtgaccttcaacgccactctgtttgccttggtacggacagctctaaaaatcaagacagaaggcaatttcgaacaggccaacgaggagttgcgagctatcattaaaaaaatctggaaacggacatctatgaagttgctggaccaggtcatacccccaataggagacgacgaggtgacagtgggcaagttttacgccaccttcctgatacaggaacattttaggaagtttatgaaaagacaggaggagtattacggatatagaccgaaaaaggacatcgtgcagattcaggccggactcagaacgatagaagaggaggcagcgccagaaatctgtcgtaccgtaagcggggatctggccgcagaggaggaactggagagggcaatggtcgaagccgctatggaagagggtatcttccggaggacaggagggctgtttggacaggtggataattttttagagcgcaccaactcgcttcctcctgttatggcaaatcagcgtccattgcaatttgccgaaattgagatggaggagatggagtcacccgtgtttctggaagactttccccaggacccccgtacaaatccattggcgagagctaacacaaacaacgccaatgctaatgtggcctatgggaatagcaatcactcaaacagtcacgtgttttcctctgtgcattatgagagagagttccctgaggaaaccgaaacccccgcaacacggggacgtgcgctgggccagccatgccgggttcttggtccccacagtaaaccctgcgtagagatgctaaagggactcctgactcagagggctatgcctcggggacaagcccctcccgcaccgtgtcagtgcccgagagtcgaatccagcatgcctgaggatagaaaatcatctaccccaggttccctccatgaggaaacccctcattcaagatccacgcgggagaataccagtagatgctctgctcccgcaactgccctgttaattcagaaagctctggtgcggggaggtctcggaacccttgcagccgacgcaaattttattatggccaccggtcaagccctcgccgatgcttgccagatggaaccggaagaagttgagatcatggcaactgaacttctgaaaggtagagaagctccggaaggtatggccagctctctgggctgcctgaatctaggaagtagcctgggaagtctggatcaacaccagggctcccaagaaaccctcatacctccgaggctgta

SEQ ID NO: 1085 - DNA, 6166 bp, Artificial Sequence
  derived and/or modified sequence
tcaggcccggcagcggggagccgagtggaggctaattttacttgctgggagcgaggagagtaatcctcctgcccccactcctgcccccgccccctggctggctcagcagggcaggctcagccgacagcctcagccagcctagtccccaaggcgggggcattggggacacagggaagggaaagcactggggtgggggagcaggagaaagccagattcccagggaagccatggagccatcctcaccccaggatgaaggcctgaggaagaaacagcccaagaagccagttcctgagattctgccaaggccaccccgggccttgttctgcctgaccctggagaaccccctgaggaaggcctgcatcagcattgtagaatggaagcccttcgagacgatcatcttgctcaccatctttgccaattgtgtggccctggccgtgtacctgcccatgccggaagatgacaacaactctctgaacctcggcctggagaagctggagtatttcttcctcattgtcttctcgattgaagccgccatgaagatcattgcctacggcttcttattccaccaggacgcttacctgcgcagtggctggaatgtgctggacttcaccattgtcttcctgggggtcttcaccgtgattctggaacaggttaacgtcatccaaagccacacagccccaatgagcagcaaaggagccggcttggatgtcaaggccctcagagccttccgagtgctcagacccctccggctggtgtcgggggtgcctagcctgcaggtggtcctgaactccatcttcaaggccatgctccccctctttcacatcgccctgctggtcctctttatggtcatcatctatgccatcatcgggctggagctcttcaagggcaagatgcacaagacctgctacttcattggtacagatatcgtggccacggtggagaatgaagagccatcgccctgcgccaggacgggctcagggcgccggtgcaccatcaatggcagtgagtgccggggcggctggccagggcccaaccatggcatcacccacttcgacaacttcggcttctccatgctcaccgtgtaccagtgcattaccatggagggatggactgacgtcctttactgggtcaatgatgccatcgggaatgagtggccctggatctattttgtcaccctcattttgctgggatccttcttcatcctcaacctggtgctgggtgtcctgagtggggaattcaccaaggagcgggagaaggccaagtccaggggaaccttccagaagctccgggagaagcagcaactagatgaggaccttcggggctacatgagctggatcacgcagggcgaggtcatggatgttgaggacttcagagaaggaaaactgtctttggatgaaggtggctctgacacagagagcctgtatgaaattgcaggcttgaacaaaatcatccagttcatccgacattggaggcagtggaaccgcatctttcgctggaagtgccatgacatcgtgaagtccaaggtcttctattggctggtgattctcatcgttgccctcaacaccctgtctatcgcctcagagcaccacaaccagcctctctggctgacccgtttgcaagacattgccaaccgggtgctgctgtccctcttcaccactgagatgctgatgaagatgtacgggctgggcctgcgccagtacttcatgtctatcttcaaccgcttcgactgcttcgtggtgtgtagcggtatcctggagatcctgctggtggagtcgggtgccatgacacccctgggcatctccgtgctccgctgcatccgcctcctgaggatcttcaagatcaccaaatattggacgtcgctgagcaacctggtggcatccctgctcaactccatccgctccatcgcctccctgctgctgctgctcttcctcttcatcgtcatcttcgccctcctgggcatgcagctctttggggggaggtatgactttgaagacacagaagtacggcgcagcaactttgacaactttccccaagccctcatcagcgtcttccaggtactgacaggggaagactggacctcaatgatgtacaatgggatcatggcctacggcgggccgtcctaccctggcatgcttgtgtgcatttacttcatcatccttttcgtctgtggcaactacatcctgctcaatgtcttcctggccattgccgtggacaacctggccgaggcggagagcctgacttctgcccagaaggccaaggctgaggagaaaaaacgcaggaagatgtccaagggtctcccagacaagtcagaagaggagaagtcaacgatggccaagaagctggagcagaaacccaagggtgagggcatccccaccactgccaagctgaaaatcgatgagtttgaatctaatgtcaatgaggtgaaggatccctacccctcagccgacttcccaggggatgacgaggaagatgagcctgagatcccgctgagcccccgaccacgtcccctggctgagctgcagctgaaagagaaggccgtgcccattccagaagccagctccttcttcatcttcagccccaccaataagatccgtgtcctgtgtcaccgcatcgtcaatgccacctggtttaccaacttcatcctgctcttcatcctgctcagcagcgctgcactggctgcggaagaccccatccgggctgattccatgagaaatcagatccttaaacactttgacatcgggttcacctctgtcttcactgtggagattgtcctcaagatgacgacctacggagccttcctgcacaagggttccttctgccgcaattacttcaacatgctggacctgctggtggtggccgtgtccctcatctccatgggacttgagtccagtgccatctccgtggtgaagatcctgagggtgctgagggtgctccgaccactcagagccatcaacagagccaaggggttgaagcacgtggtgcagtgcatgttcgtggccatcagcaccatcgggaacatcgtgctggtcactaccctcctacagttcatgtttgcctgcatcggcgtccagctcttcaaggggaagttcttcaggtgcaccgacttgtccaagatgacagaggaggagtgcaggggctactactacgtgtacaaggacggggaccccatgcagatagagctgcgtcaccgcgagtgggtacacagcgacttccacttcgacaatgtgctctcagccatgatgtccctcttcacggtctccaccttcgagggatggcctcagctgctgtacaaggccatagactccaatgcggaggacgtgggtcccatctacaacaaccgtgtggagatggccatcttcttcatcatctacatcatcctcattgccttcttcatgatgaacatctttgtgggcttcgtcattgtcaccttccaggagcagggagagactgagtacaagaactgtgagctggacaagaaccagcgccaatgtgtacagtatgccctgaaggcccgcccactgaggtgctacattcccaaaaacccataccagtaccaggtgtggtacattgtcacctcctcctactttgaatacctgatgtttgccctcatcatgctcaacaccatctgcctcggcatgcagcactacaaccagtcggagcagatgaaccacatctcagacatcctcaatgtggccttcactatcatcttcaccctggagatgatcctcaagctcatggccttcaaggccaggggctactttggagacccctggaatgtgtttgacttcctgattgtcattggcagcatcattgatgtcatcctcagtgagatcgacactttcctggcctccagcgggggactgtattgcctgggtggaggctgcgggaacgttgacccagatgagagtgcccgcatctccagcgccttcttccgcctgttccgtgtcatgaggctgatcaagctgctgagccgggcagaaggagtgcgaaccctcctgtggacgttcatcaagtccttccaggccctaccctacgtggctctgctcatcgtcatgctcttcttcatctacgctgtcatcggcatgcagatgtttgggaagatcgccttggtggatgggacccaaataaaccggaacaacaacttccagaccttcccacaagctgtgctactgctcttcaggtgtgcaacaggtgaggcctggcaggagatcctactggcctgcagctatgggaagctgtgtgacccagagtcggactatgccccaggggaggagtacacatgtggcaccaactttgcatactactacttcatcagcttctacatgctctgtgccttcctggtcatcaacctctttgtggctgtcatcatggacaattttgactacctcacccgggactggtccatcctgggccctcatcacctggatgagttcaaggccatctgggcagagtatgacccagaggctaaggggagaatcaaacacctggacgtggtgaccctgctgagaaggattcagccccctctgggctttgggaagttctgcccacatcgggtagcttgtaagcggctggtgggcatgaacatgcccctgaacagcgacggcacagtcaccttcaatgccacactctttgccctggtccgcacggcactcaagatcaagacggaaggtaactttgagcaggccaacgaggagctgagggccatcatcaagaagatctggaagagaaccagcatgaagctcttggaccaggtcatccctccaataggagatgatgaggtgacagtggggaagttctacgccacattcctcatccaggagcacttccggaagttcatgaaacgccaagaggagtattatggctatcggcccaagaaggacattgtacagatccaggcagggctgcggaccattgaggaagaggcagcccccgagatctgtcgcacggtctcaggagacctggctgctgaggaggagctggagagagccatggtggaggctgcgatggaggagggaatattccggaggactggaggcctgtttggccaggtggacaacttcctggaaaggaccaactccctgccccccgtcatggccaatcagagacccctccagtttgctgagatagagatggaagagatggagtcacctgtcttcttggaggacttcccacaagatccacgcaccaaccccctggctcgtgccaataccaacaatgccaacgccaatgtcgcctatggcaacagcaaccatagcaacagccatgtgttttccagtgtccactatgaaagggagttcccagaagagacagagacgcctgctaccagaggacgagcccttggccaaccctgcagggtcctgggaccccacagcaaaccctgtgtggagatgctgaagggactgctgacccagagggcaatgcccagaggccaggcacctcctgccccctgccagtgccccagggtggagtcctccatgcctgaggacagaaagagctccacaccagggtctcttcatgaggagacaccccacagcaggagcaccagggagaatacttccaggtgctcagcaccagctacagccctgctgatccaaaaggctctggttcgagggggcctgggcaccttggcagctgatgcaaacttcatcatggcaacaggccaggccctggcagatgcctgccaaatggaaccagaggaagtggagatcatggcaacagagctactgaaaggacgagaggccccagagggcatggccagctccctgggatgcctgaacctcgggtcctccctgggcagcctcgaccaacaccagggctcccaggagacccttattcctccaaggctgtgatgcccacacagcatcagcatgggcttagagctggcatgaccaatgggggtggggaagttgctggggtggagaagggctagcccaccgcagcagcctccctccctctcagcagctagatgcatggcctgaggcagggtggtcaggaaccacctcaaaaagtgcggaggaagtagctggacaggccctgcccctcaccagcaagaggcatgattggatggagcttctaatgtcattcaaaaaggcctggtcagtgcctgtctggcctagggccactcccacctgcaggacattaaaatctccaggcctgtgacactggc

SEQ ID NO: 1086 - DNA, 5622 bp, Artificial Sequence
  derived and/or modified sequence
atggagcccagcagcccccaggacgagggcctgagaaagaagcagcccaagaagcccgtgcccgagatcctgcccagaccccccagagccctgttctgcctgaccctggagaaccccctgagaaaggcctgcatcagcatcgtggagtggaagcccttcgagaccatcatcctgctgaccatcttcgccaactgcgtggccctggccgtgtacctgcccatgcccgaggacgacaacaacagcctgaacctgggcctggagaagctggagtacttcttcctgatcgtgttcagcatcgaggccgccatgaagatcatcgcctacggcttcctgttccaccaggacgcctacctgagaagcggctggaacgtgctggacttcaccatcgtgttcctgggcgtgttcaccgtgatcctggagcaggtgaacgtgatccagagccacaccgcccccatgagcagcaagggcgccggcctggacgtgaaggccctgagagccttcagagtgctgagacccctgagactggtgagcggcgtgcccagcctgcaggtggtgctgaacagcatcttcaaggccatgctgcccctgttccacatcgccctgctggtgctgttcatggtgatcatctacgccatcatcggcctggagctgttcaagggcaagatgcacaagacctgctacttcatcggcaccgacatcgtggccaccgtggagaacgaggagcccagcccctgcgccagaaccggcagcggcagaagatgcaccatcaacggcagcgagtgcagaggcggctggcccggccccaaccacggcatcacccacttcgacaacttcggcttcagcatgctgaccgtgtaccagtgcatcaccatggagggctggaccgacgtgctgtactgggtgaacgacgccatcggcaacgagtggccctggatctacttcgtgaccctgatcctgctgggcagcttcttcatcctgaacctggtgctgggcgtgctgagcggcgagttcaccaaggagagagagaaggccaagagcagaggcaccttccagaagctgagagagaagcagcagctggacgaggacctgagaggctacatgagctggatcacccagggcgaggtgatggacgtggaggacttcagagagggcaagctgagcctggacgagggcggcagcgacaccgagagcctgtacgagatcgccggcctgaacaagatcatccagttcatcagacactggagacagtggaacagaatcttcagatggaagtgccacgacatcgtgaagagcaaggtgttctactggctggtgatcctgatcgtggccctgaacaccctgagcatcgccagcgagcaccacaaccagcccctgtggctgaccagactgcaggacatcgccaacagagtgctgctgagcctgttcaccaccgagatgctgatgaagatgtacggcctgggcctgagacagtacttcatgagcatcttcaacagattcgactgcttcgtggtgtgcagcggcatcctggagatcctgctggtggagagcggcgccatgacccccctgggcatcagcgtgctgagatgcatcagactgctgagaatcttcaagatcaccaagtactggaccagcctgagcaacctggtggccagcctgctgaacagcatcagaagcatcgccagcctgctgctgctgctgttcctgttcatcgtgatcttcgccctgctgggcatgcagctgttcggcggcagatacgacttcgaggacaccgaggtgagaagaagcaacttcgacaacttcccccaggccctgatcagcgtgttccaggtgctgaccggcgaggactggaccagcatgatgtacaacggcatcatggcctacggcggccccagctaccccggcatgctggtgtgcatctacttcatcatcctgttcgtgtgcggcaactacatcctgctgaacgtgttcctggccatcgccgtggacaacctggccgaggccgagagcctgaccagcgcccagaaggccaaggccgaggagaagaagagaagaaagatgagcaagggcctgcccgacaagagcgaggaggagaagagcaccatggccaagaagctggagcagaagcccaagggcgagggcatccccaccaccgccaagctgaagatcgacgagttcgagagcaacgtgaacgaggtgaaggacccctaccccagcgccgacttccccggcgacgacgaggaggacgagcccgagatccccctgagccccagacccagacccctggccgagctgcagctgaaggagaaggccgtgcccatccccgaggccagcagcttcttcatcttcagccccaccaacaagatcagagtgctgtgccacagaatcgtgaacgccacctggttcaccaacttcatcctgctgttcatcctgctgagcagcgccgccctggccgccgaggaccccatcagagccgacagcatgagaaaccagatcctgaagcacttcgacatcggcttcaccagcgtgttcaccgtggagatcgtgctgaagatgaccacctacggcgccttcctgcacaagggcagcttctgcagaaactacttcaacatgctggacctgctggtggtggccgtgagcctgatcagcatgggcctggagagcagcgccatcagcgtggtgaagatcctgagagtgctgagagtgctgagacccctgagagccatcaacagagccaagggcctgaagcacgtggtgcagtgcatgttcgtggccatcagcaccatcggcaacatcgtgctggtgaccaccctgctgcagttcatgttcgcctgcatcggcgtgcagctgttcaagggcaagttcttcagatgcaccgacctgagcaagatgaccgaggaggagtgcagaggctactactacgtgtacaaggacggcgaccccatgcagatcgagctgagacacagagagtgggtgcacagcgacttccacttcgacaacgtgctgagcgccatgatgagcctgttcaccgtgagcaccttcgagggctggccccagctgctgtacaaggccatcgacagcaacgccgaggacgtgggccccatctacaacaacagagtggagatggccatcttcttcatcatctacatcatcctgatcgccttcttcatgatgaacatcttcgtgggcttcgtgatcgtgaccttccaggagcagggcgagaccgagtacaagaactgcgagctggacaagaaccagagacagtgcgtgcagtacgccctgaaggccagacccctgagatgctacatccccaagaacccctaccagtaccaggtgtggtacatcgtgaccagcagctacttcgagtacctgatgttcgccctgatcatgctgaacaccatctgcctgggcatgcagcactacaaccagagcgagcagatgaaccacatcagcgacatcctgaacgtggccttcaccatcatcttcaccctggagatgatcctgaagctgatggccttcaaggccagaggctacttcggcgacccctggaacgtgttcgacttcctgatcgtgatcggcagcatcatcgacgtgatcctgagcgagatcgacaccttcctggccagcagcggcggcctgtactgcctgggcggcggctgcggcaacgtggaccccgacgagagcgccagaatcagcagcgccttcttcagactgttcagagtgatgagactgatcaagctgctgagcagagccgagggcgtgagaaccctgctgtggaccttcatcaagagcttccaggccctgccctacgtggccctgctgatcgtgatgctgttcttcatctacgccgtgatcggcatgcagatgttcggcaagatcgccctggtggacggcacccagatcaacagaaacaacaacttccagaccttcccccaggccgtgctgctgctgttcagatgcgccaccggcgaggcctggcaggagatcctgctggcctgcagctacggcaagctgtgcgaccccgagagcgactacgcccccggcgaggagtacacctgcggcaccaacttcgcctactactacttcatcagcttctacatgctgtgcgccttcctggtgatcaacctgttcgtggccgtgatcatggacaacttcgactacctgaccagagactggagcatcctgggcccccaccacctggacgagttcaaggccatctgggccgagtacgaccccgaggccaagggcagaatcaagcacctggacgtggtgaccctgctgagaagaatccagccccccctgggcttcggcaagttctgcccccacagagtggcctgcaagagactggtgggcatgaacatgcccctgaacagcgacggcaccgtgaccttcaacgccaccctgttcgccctggtgagaaccgccctgaagatcaagaccgagggcaacttcgagcaggccaacgaggagctgagagccatcatcaagaagatctggaagagaaccagcatgaagctgctggaccaggtgatcccccccatcggcgacgacgaggtgaccgtgggcaagttctacgccaccttcctgatccaggagcacttcagaaagttcatgaagagacaggaggagtactacggctacagacccaagaaggacatcgtgcagatccaggccggcctgagaaccatcgaggaggaggccgcccccgagatctgcagaaccgtgagcggcgacctggccgccgaggaggagctggagagagccatggtggaggccgccatggaggagggcatcttcagaagaaccggcggcctgttcggccaggtggacaacttcctggagagaaccaacagcctgccccccgtgatggccaaccagagacccctgcagttcgccgagatcgagatggaggagatggagagccccgtgttcctggaggacttcccccaggaccccagaaccaaccccctggccagagccaacaccaacaacgccaacgccaacgtggcctacggcaacagcaaccacagcaacagccacgtgttcagcagcgtgcactacgagagagagttccccgaggagaccgagacccccgccaccagaggcagagccctgggccagccctgcagagtgctgggcccccacagcaagccctgcgtggagatgctgaagggcctgctgacccagagagccatgcccagaggccaggccccccccgccccctgccagtgccccagagtggagagcagcatgcccgaggacagaaagagcagcacccccggcagcctgcacgaggagaccccccacagcagaagcaccagagagaacaccagcagatgcagcgcccccgccaccgccctgctgatccagaaggccctggtgagaggcggcctgggcaccctggccgccgacgccaacttcatcatggccaccggccaggccctggccgacgcctgccagatggagcccgaggaggtggagatcatggccaccgagctgctgaagggcagagaggcccccgagggcatggccagcagcctgggctgcctgaacctgggcagcagcctgggcagcctggaccagcaccagggcagccaggagaccctgatcccccccagactgtag

SEQ ID NO: 1087 - protein, 821 aa, Artificial Sequence
  derived and/or modified sequence
MPTVISASVAPRTAAEPRSPGPVPHPAQSKATEAGGGNPSGIYSAIISRNFPIIGVKEKTFEQLHKKCLEKKVLYVDPEFPPDETSLFYSQKFPIQFVWKRPPEICENPRFIIDGANRTDICQGELGDCWFLAAIACLTLNQHLLFRVIPHDQSFIENYAGIFHFQFWRYGEWVDVVIDDCLPTYNNQLVFTKSNHRNEFWSALLEKAYAKLHGSYEALKGGNTTEAMEDFTGGVAEFFEIRDAPSDMYKIMKKAIERGSLMGCSIDDGTNMTYGTSPSGLNMGELIARMVRNMDNSLLQDSDLDPRGSDERPTRTIIPVQYETRMACGLVRGHAYSVTGLDEVPFKGEKVKLVRLRNPWGQVEWNGSWSDRWKDWSFVDKDEKARLQHQVTEDGEFWMSYEDFIYHFTKLEICNLTADALQSDKLQTWTVSVNEGRWVRGCSAGGCRNFPDTFWTNPQYRLKLLEEDDDPDDSEVICSFLVALMQKNRRKDRKLGASLFTIGFAIYEVPKEMHGNKQHLQKDFFLYNASKARSKTYINMREVSQRFRLPPSEYVIVPSTYEPHQEGEFILRVFSEKRNLSEEVENTISVDRPVKKKKTKPIIFVSDRANSNKELGVDQESEEGKGKTSPDKQKQSPQPQPGSSDQESEEQQQFRNIFKQIAGDDMEICADELKKVLNTVVNKHKDLKTHGFTLESCRSMIALMDTDGSGKLNLQEFHHLWNKIKAWQKIFKHYDTDQSGTINSYEMRNAVNDAGFHLNNQLYDIITMRYADKHMNIDFDSFICCFVRLEGMFRAFHAFDKDGDGIIKLNVLEWLQLTMYA

SEQ ID NO: 1088 - DNA, 2466 bp, Artificial Sequence
  derived and/or modified sequence
atgcccacggtgatctcagcgagtgtggcccctcggacggccgcagaacctagatcacctggcccagtgccgcatccagcacaatccaaggcgacagaagcaggcggcggcaacccttccggaatatatagtgccatcatcagccggaatttccccattatcggggtaaaggagaaaacctttgagcagttgcacaaaaagtgcttagaaaagaaagtgctgtatgtcgacccagaatttccaccagacgagacctcactgttctatagccaaaaatttcccatccagtttgtgtggaagcggcccccggagatctgtgaaaatcctcggttcattatcgacggggccaataggactgacatctgtcaaggcgaactgggcgattgctggttcctggccgctatagcgtgcctgacgctgaatcagcacctactgttcagagtcatcccacacgaccagtcgtttatcgaaaactacgcgggtatcttccacttccaattctggcgctacggagaatgggttgacgtcgtgattgacgactgtctgcccacttataacaatcagctcgtttttaccaaaagcaaccatagaaacgagttctggtccgctctcttagagaaggcttatgctaaactgcatggaagctatgaggccctcaaaggcggcaataccaccgaggcgatggaagattttactggtggcgttgctgagttcttcgagattcgggacgccccctctgatatgtataagattatgaagaaggccatcgagaggggaagcttaatgggttgttccatcgacgatgggacaaacatgacatacggcactagtccctctggtctgaatatgggagagctgatcgctcgtatggttcgcaatatggataactcactactacaggactccgacctcgacccacgtgggagcgatgagcggcccacacggaccatcatccctgtgcaatacgaaacgcgaatggcttgtgggctggtccgcggccatgcttactcagtcaccgggcttgacgaagtgccttttaaaggagaaaaggtgaaattggttaggttacgcaatccctggggccaagtggaatggaacggttcatggtctgaccgttggaaggattggagttttgtggacaaggatgagaaggctaggctgcagcaccaagtcacagaggatggcgagttctggatgtcttacgaggatttcatttatcacttcacaaagctcgaaatctgtaacctgactgcagacgcgctgcagtcggacaaactccagacttggacagtcagtgtgaatgaaggtagatgggtgagaggctgctctgccggcgggtgtaggaacttcccagatactttttggaccaacccccagtatagacttaaattgctggaggaggacgacgatcccgacgatagtgaagtcatctgttcattcttggtggctttgatgcagaagaacaggcgcaaagatcggaaactgggtgctagcttgttcaccatcggattcgccatttacgaggttcccaaggagatgcacggtaataaacagcacttgcagaaggacttcttcctttacaatgcatcaaaggcgcgcagcaagacttacattaatatgcgtgaggtgtcacagcgatttcggttgcctccatctgagtatgtgatcgttcccagcacatatgagcctcatcaggagggagagttcatccttcgggtttttagcgagaagcgcaacctctcggaggaagtggagaacactatcagtgtggatagacctgttaaaaagaaaaagaccaaaccaattatcttcgtgagcgatcgtgcaaacagcaacaaagaactcggcgtggaccaggagtctgaggagggcaaaggcaagacatcccccgataagcagaagcagtcaccacagccacaacctggaagctctgaccaagagagtgaagagcagcagcagtttaggaatatctttaaacagattgccggcgatgatatggagatatgtgctgacgagcttaagaaagttctaaatacggtcgtgaataaacacaaagacctcaaaacacatggtttcactctcgagagttgtcgtagcatgatcgcattaatggacaccgacgggagcggtaaacttaacctccaggagtttcaccacctgtggaataaaattaaagcgtggcagaagatctttaaacactacgacacagaccagtccgggaccatcaattcctacgagatgcggaacgccgtcaacgatgccggctttcacttgaataatcagctctacgacatcatcacaatgcggtacgccgacaaacacatgaacattgactttgactcattcatttgctgttttgtcaggctagagggcatgtttagagctttccacgcctttgacaaggacggtgacgggattatcaaactgaatgtgctggagtggcttcagcttaccatgtacgcatag

SEQ ID NO: 1089 - DNA, 2466 bp, Artificial Sequence
  derived and/or modified sequence
atgcccaccgtcatcagcgcctctgtggcccccaggacagctgctgagcccaggagccctggccctgtgccccacccagcccagagcaaggccacagaggccggcggcggcaaccccagcggcatctacagcgccatcatcagcaggaacttccccatcatcggcgtgaaggagaagacctttgagcagctgcacaagaagtgcctggagaagaaggtgctgtatgtggaccctgagttccccccagatgagaccagcctcttctacagccagaagttccccatccagtttgtgtggaagaggcctcctgagatctgtgagaacccccgcttcatcattgatggagccaacagaacagacatctgccagggcgagctgggggactgctggttcctggccgccatcgcctgcctgaccctgaaccagcacctgctcttccgggtcatcccccatgaccagagcttcattgaaaattatgccggcatcttccacttccagttctggaggtatggagagtgggtggatgtggtgattgatgactgcctgcccacctacaacaaccagctggtgttcaccaagagcaaccacagaaatgagttctggagcgccctgctggagaaggcctatgccaagctgcacggcagctatgaggccctgaagggcggcaacaccacagaggccatggaggacttcaccggcggcgtggccgagttctttgagatcagagatgcccccagcgacatgtacaagatcatgaagaaggccatcgagcggggcagcctgatgggctgcagcattgatgatggcaccaacatgacctacggcaccagccccagcggcctgaacatgggagagctgattgccaggatggtgaggaacatggacaacagcctgctgcaggacagcgacctggacccccggggcagtgatgagcggcccaccaggaccatcatccctgtgcagtatgagaccaggatggcctgtggcctggtgcggggccacgcctacagcgtgacaggcctggatgaggtgcccttcaagggggagaaggtgaagctggtgcggctgaggaacccctggggccaggtggagtggaatggctcctggagcgaccgctggaaggactggagctttgtggacaaggatgagaaggcccggctgcagcaccaggtgacagaagatggagagttctggatgtcctatgaggacttcatctaccacttcaccaagctggagatctgcaacctgacagcagatgccctgcagagcgacaagctgcagacctggacagtgtctgtgaatgaaggccgctgggtgcggggctgcagcgctgggggctgcaggaacttcccagacaccttctggaccaacccccagtaccgcctgaagctgctggaggaggatgatgatcctgatgacagcgaggtgatctgcagcttcctggtggccctgatgcagaagaacagaaggaaggacaggaagctgggcgccagcctcttcaccatcggctttgccatctatgaggtgcccaaggagatgcacggcaacaagcagcacctgcagaaggacttcttcctgtacaatgccagcaaggcccggagcaagacctacatcaacatgagggaggtgtcccagcgcttccggctgcccccatctgaatatgtgattgtgcccagcacctatgagccccaccaggagggggagttcatcctgcgggtcttcagcgagaagaggaacctgtctgaggaggtggagaacaccatctctgtggacaggcctgtgaagaagaagaagaccaagcccatcatctttgtgtctgaccgggccaacagcaacaaggagctgggcgtggaccaggagagcgaggagggcaagggcaagaccagcccagacaagcagaagcagagcccccagccccagcccggcagcagtgaccaggagagcgaggagcagcagcagttcaggaacatcttcaagcagattgctggagatgacatggagatctgtgctgatgagctgaagaaggtgctgaacacagtggtgaacaagcacaaggacctgaagacccacggcttcaccctggagagctgccgctccatgattgccctgatggacacagatggcagcggcaagctgaacctgcaggagttccaccacctgtggaacaagatcaaggcctggcagaagatcttcaagcactatgacacagaccagagcggcaccatcaacagctatgagatgagaaatgctgtgaatgatgctggcttccacctgaacaaccagctgtatgacatcatcaccatgagatatgctgacaagcacatgaacatcgactttgacagcttcatctgctgctttgtgcggctggagggcatgttccgggccttccacgcctttgacaaggatggagatggcatcatcaagctgaatgtgctggagtggctgcagctgaccatgtatgcctag

SEQ ID NO: 1090 - DNA, 2466 bp, Artificial Sequence
  derived and/or modified sequence
atgcccaccgtgatcagcgccagcgtggccccccggaccgccgccgaacccaggtcgcctggccccgtgcctcaccccgcccagagtaaagcgaccgaggcaggcggcggcaaccccagtggaatttatagcgccataattagcagaaattttcctataattggggttaaggaaaagacatttgagcagctgcataaaaagtgcctagagaaaaaagtgctatatgttgaccctgagtttcctccagatgaaacctcactgttttattcccagaaattccccatacagttcgtatggaaacgaccacccgagatctgcgagaatcccagattcattatcgacggggccaatcggaccgatatttgccaaggagaactaggagattgttggtttcttgccgctattgcctgcctgacgcttaaccaacacctattatttcgggtgattcctcatgaccaatcttttattgagaattacgctgggatctttcactttcagttttggcggtacggtgaatgggtcgacgtggtgatcgacgactgccttccaacttataacaatcagctggtcttcaccaagtccaatcaccggaatgaattttggagcgcgctcctcgaaaaggcctatgccaagctccatggctcttatgaggccctcaaggggggcaacaccactgaggctatggaagatttcacaggaggggttgccgagttttttgagatccgcgacgctccctctgatatgtacaagatcatgaagaaagccattgagcgaggttccctgatgggttgttcaattgatgacgggaccaatatgacctacggaacctcacccagcggcttgaacatgggagaacttattgcgagaatggtccggaacatggacaatagcttgctgcaggattccgatcttgaccctagggggtcagacgaaaggccaacaagaaccattatccctgtccagtatgaaacgagaatggcatgtggtttggtgaggggtcacgcttattctgtgacgggcctagacgaagtgcccttcaaaggcgagaaggtgaagctggttaggcttaggaatccttggggacaggtggagtggaatggctcatggtccgacagatggaaggactggtctttcgttgataaggacgaaaaagccagactgcagcaccaagtcaccgaagacggagagttttggatgtcctacgaagacttcatctaccactttacaaagctcgaaatctgcaacctgaccgccgatgctctgcagtctgataagcttcagacgtggaccgtaagcgtgaatgaaggccgctgggtccgtggctgctcggccggcgggtgccggaactttcccgacaccttctggaccaatcctcagtacaggctgaaattgctggaagaagatgacgatcccgacgattcagaggttatttgtagttttctggtggccctgatgcaaaagaacagacggaaagatagaaagctgggcgcttctctctttacaatcgggtttgccatctatgaggtccctaaggagatgcatggtaataagcagcacctgcagaaggattttttcctatataatgcttctaaagccagatcaaagacatacatcaatatgcgagaggtgtcgcaacgtttccggctaccccccagtgagtacgtgattgtcccttcaacatacgagcctcatcaagagggagagtttatcctgcgagtgtttagtgagaaacggaacctctctgaggaggtggaaaacaccatcagcgtggaccgccctgtgaagaagaagaagacaaagcctataatctttgtgagtgacagggcaaattcaaacaaggaactgggagtcgatcaggagtctgaggagggcaaaggtaaaacctcgcctgacaagcagaagcagtcaccacaaccacagcctggctcttccgaccaggagagcgaggagcagcagcagttccgtaatatctttaaacaaatcgctggcgacgatatggagatttgtgctgacgagctaaagaaggtgctgaataccgtggtgaacaagcacaaggacctgaaaacccacgggtttactctcgagtcttgtaggagcatgatcgcgctcatggacacggatggatctggcaaactgaacctccaggagttccaccatttgtggaacaagataaaagcctggcagaagatttttaaacactacgacactgaccaatctggcacaatcaactcctacgaaatgcgcaacgctgtcaatgatgcaggctttcacctgaacaaccagttgtacgacatcatcaccatgcgatatgccgacaagcacatgaacatagacttcgactcctttatttgttgttttgtaagactcgagggcatgtttcgcgcttttcatgcattcgataaggacggggacggcattatcaaattaaacgtcctcgaatggctacagctgaccatgtatgcttag

SEQ ID NO: 1091 - DNA, 2466 bp, Artificial Sequence
  derived and/or modified sequence
atgcctactgtaataagcgcatcagtggcgccaagaacagctgcggagcccaggtctccaggccctgtccctcaccctgcccaatcaaaggctaccgaggcgggtggaggaaacccatccggtatttacagcgctattattagccgcaacttccccattattggtgtcaaagagaaaacatttgaacagcttcacaaaaaatgcctggaaaagaaagttctatatgtggatcccgagttcccccctgatgagacatccttgttttattcgcaaaagtttccgatccagttcgtgtggaaacgacccccagagatatgcgaaaacccaaggttcatcattgatggggcaaaccggacagatatttgtcaaggagagctcggcgactgttggtttctagccgcaatcgcctgcttaaccttgaatcaacacctgttgttccgagttatcccgcacgaccagtcttttatcgaaaattacgccggaatatttcattttcagttctggaggtatggcgaatgggtggatgtggtcatcgacgattgcctgcccacctataacaaccagcttgtcttcaccaaatccaaccatcggaacgagttctggtctgccctactggagaaggcttatgccaagctgcatggatcctatgaagctctgaagggcggaaacactacggaagctatggaagatttcaccggcggagtcgccgaatttttcgagattagggacgcgccatcggacatgtacaaaattatgaagaaggcaatcgagcgtggcagcttgatgggttgttctatcgacgacggtacaaatatgacttacgggactagtccgtcaggacttaacatgggcgaacttattgcacgtatggtgcgcaatatggacaatagtctactgcaggacagcgatctcgacccccgtggcagtgacgagagacctacgagaacaataattccggttcagtacgagacgagaatggcgtgtggccttgtgaggggccacgcttatagtgtcactggcttggacgaggtgccgtttaagggcgagaaggtgaaactggtgcggctgcggaacccatggggacaagtggaatggaacggttcatggtctgataggtggaaggattggtcattcgtggataaggacgagaaggcccgacttcagcaccaggtgaccgaggacggcgaattttggatgagttacgaggacttcatttatcattttaccaagcttgagatctgcaacctgactgccgatgctttgcagtccgataagctgcagacctggactgtcagcgtgaatgaggggaggtgggtgaggggctgcagcgccggtggctgtcgaaactttcctgatactttctggaccaatccccagtacagactgaagttgttggaggaggatgatgatccggacgatagcgaggtgatctgcagcttccttgttgccttaatgcagaagaacaggcggaaagatcgcaaactgggggcttccctcttcacaattgggtttgccatctacgaggtgccaaaggagatgcacgggaacaaacaacacctgcagaaggacttttttctgtataacgcctccaaggcacgctctaagacttacattaatatgagagaggtgtcccagaggtttaggcttccgccaagcgaatacgtgattgtcccttctacttacgagccccaccaggaaggagagttcatcctgagggtattcagcgaaaagaggaatttaagcgaagaggtcgaaaacactatctctgtggaccggccagttaagaagaaaaagactaagccgattatcttcgtaagcgatagagctaactctaataaggaactgggggtggatcaggagtcagaagaaggcaaaggcaagacgagcccagataagcaaaagcagagcccacagccgcagcctgggtcctccgatcaagaaagcgaggagcagcagcaatttcgcaatatctttaaacaaatcgccggagacgatatggaaatctgtgcagatgaattgaagaaggtactcaacaccgttgtgaacaagcataaagatctcaaaactcatggttttaccttggagtcatgccgcagcatgatcgcactgatggacaccgacgggagtggtaagctcaacctccaggagttccaccacctgtggaacaaaattaaagcctggcagaaaattttcaagcattacgatactgaccagtccgggaccatcaacagttatgaaatgaggaatgcagtaaatgacgcgggattccacctaaataaccagttatatgacattattactatgagatacgctgacaagcacatgaatatcgattttgactctttcatttgctgctttgtacggttggaggggatgttccgcgctttccacgcttttgacaaggatggagacggcatcattaagctgaacgttttggaatggctgcagttaaccatgtacgcgtag

SEQ ID NO: 1092 - DNA, 2463 bp, Artificial Sequence
  derived and/or modified sequence
atgcccaccgtgatcagcgccagcgtggccccccgcaccgccgccgagccccgcagccccggccccgtgccccaccccgcccagagcaaggccaccgaggccggcggcggcaaccccagcggcatctacagcgccatcatcagccgcaacttccccatcatcggcgtgaaggagaagaccttcgagcagctgcacaagaagtgcctggagaagaaggtgctgtacgtggaccccgagttcccccccgacgagaccagcctgttctacagccagaagttccccatccagttcgtgtggaagcgcccccccgagatctgcgagaacccccgcttcatcatcgacggcgccaaccgcaccgacatctgccagggcgagctgggcgactgctggttcctggccgccatcgcctgcctgaccctgaaccagcacctgctgttccgcgtgatcccccacgaccagagcttcatcgagaactacgccggcatcttccacttccagttctggcgctacggcgagtgggtggacgtggtgatcgacgactgcctgcccacctacaacaaccagctggtgttcaccaagagcaaccaccgcaacgagttctggagcgccctgctggagaaggcctacgccaagctgcacggcagctacgaggccctgaagggcggcaacaccaccgaggccatggaggacttcaccggcggcgtggccgagttcttcgagatccgcgacgcccccagcgacatgtacaagatcatgaagaaggccatcgagcgcggcagcctgatgggctgcagcatcgacgacggcaccaacatgacctacggcaccagccccagcggcctgaacatgggcgagctgatcgcccgcatggtgcgcaacatggacaacagcctgctgcaggacagcgacctggacccccgcggcagcgacgagcgccccacccgcaccatcatccccgtgcagtacgagacccgcatggcctgcggcctggtgcgcggccacgcctacagcgtgaccggcctggacgaggtgcccttcaagggcgagaaggtgaagctggtgcgcctgcgcaacccctggggccaggtggagtggaacggcagctggagcgaccgctggaaggactggagcttcgtggacaaggacgagaaggcccgcctgcagcaccaggtgaccgaggacggcgagttctggatgagctacgaggacttcatctaccacttcaccaagctggagatctgcaacctgaccgccgacgccctgcagagcgacaagctgcagacctggaccgtgagcgtgaacgagggccgctgggtgcgcggctgcagcgccggcggctgccgcaacttccccgacaccttctggaccaacccccagtaccgcctgaagctgctggaggaggacgacgaccccgacgacagcgaggtgatctgcagcttcctggtggccctgatgcagaagaaccgccgcaaggaccgcaagctgggcgccagcctgttcaccatcggcttcgccatctacgaggtgcccaaggagatgcacggcaacaagcagcacctgcagaaggacttcttcctgtacaacgccagcaaggcccgcagcaagacctacatcaacatgcgcgaggtgagccagcgcttccgcctgccccccagcgagtacgtgatcgtgcccagcacctacgagccccaccaggagggcgagttcatcctgcgcgtgttcagcgagaagcgcaacctgagcgaggaggtggagaacaccatcagcgtggaccgccccgtgaagaagaagaagaccaagcccatcatcttcgtgagcgaccgcgccaacagcaacaaggagctgggcgtggaccaggagagcgaggagggcaagggcaagaccagccccgacaagcagaagcagagcccccagccccagcccggcagcagcgaccaggagagcgaggagcagcagcagttccgcaacatcttcaagcagatcgccggcgacgacatggagatctgcgccgacgagctgaagaaggtgctgaacaccgtggtgaacaagcacaaggacctgaagacccacggcttcaccctggagagctgccgcagcatgatcgccctgatggacaccgacggcagcggcaagctgaacctgcaggagttccaccacctgtggaacaagatcaaggcctggcagaagatcttcaagcactacgacaccgaccagagcggcaccatcaacagctacgagatgcgcaacgccgtgaacgacgccggcttccacctgaacaaccagctgtacgacatcatcaccatgcgctacgccgacaagcacatgaacatcgacttcgacagcttcatctgctgcttcgtgcgcctggagggcatgttccgcgccttccacgccttcgacaaggacggcgacggcatcatcaagctgaacgtgctggagtggctgcagctgaccatgtacgcc

SEQ ID NO: 1093 - DNA, 3241 bp, Artificial Sequence
  derived and/or modified sequence
attccagtgtttcagcgaggtggaagtgtgataccaataaagacaactgtaggaaaatccacaggctggatgactgaatcctcctatggactccgggttgctctaagcactaagggttcttcagtgggtgagttatatcttgatgatggccattcattccaatacctccaccagaagcaatttttgcacaggaagttttcattctgttccagtgttctgatcaatagttttgctgaccagaggggtcattatcccagcaagtgtgtggtggagaagatcttggtcttaggcttcaggaaggagccatcttctgtgactacccactcatctgatggtaaagatcagcctgtggcttttacgtattgtgccaaaacatccatcctgagcctggagaagctctcactcaacattgccactgactgggagggttcctaaaaaagctctaaaatgaatgcatagtgtgtctttccttcaagatgtaaatgtcaaggaatgagttggcaaatcagtttaaaaacacaaactacccaacagaaaaatgaaatttgcgagaatccccgatttatcattgatggagccaacagaactgacatctgtcaaggagagctaggggactgctggtttctcgcagccattgcctgcctgaccctgaaccagcaccttcttttccgagtcataccccatgatcaaagtttcatcgaaaactacgcagggatcttccacttccagttctggcgctatggagagtgggtggacgtggttatagatgactgcctgccaacgtacaacaatcaactggttttcaccaagtccaaccaccgcaatgagttctggagtgctctgctggagaaggcttatgctaagctccatggttcctacgaagctctgaaaggtgggaacaccacagaggccatggaggacttcacaggaggggtggcagagttttttgagatcagggatgctcctagtgacatgtacaagatcatgaagaaagccatcgagagaggctccctcatgggctgctccattgatgatggcacgaacatgacctatggaacctctccttctggtctgaacatgggggagttgattgcacggatggtaaggaatatggataactcactgctccaggactcagacctcgaccccagaggctcagatgaaagaccgacccggacaatcattccggttcagtatgagacaagaatggcctgcgggctggtcagaggtcacgcctactctgtcacggggctggatgaggtcccgttcaaaggtgagaaagtgaagctggtgcggctgcggaatccgtggggccaggtggagtggaacggttcttggagtgatagatggaaggactggagctttgtggacaaagatgagaaggcccgtctgcagcaccaggtcactgaggatggagagttctggatgtcctatgaggatttcatctaccatttcacaaagttggagatctgcaacctcacggccgatgctctgcagtctgacaagcttcagacctggacagtgtctgtgaacgagggccgctgggtacggggttgctctgccggaggctgccgcaacttcccagatactttctggaccaaccctcagtaccgtctgaagctcctggaggaggacgatgaccctgatgactcggaggtgatttgcagcttcctggtggccctgatgcagaagaaccggcggaaggaccggaagctaggggccagtctcttcaccattggcttcgccatctacgaggttcccaaagagatgcacgggaacaagcagcacctgcagaaggacttcttcctgtacaacgcctccaaggccaggagcaaaacctacatcaacatgcgggaggtgtcccagcgcttccgcctgcctcccagcgagtacgtcatcgtgccctccacctacgagccccaccaggagggggaattcatcctccgggtcttctctgaaaagaggaacctctctgaggaagttgaaaataccatctccgtggatcggccagtgagaaaagaaacttacaagcccatcatcttcgtttcggacagagcaaacagcaacaaggagctgggtgtggaccaggagtcagaggagggcaaaggcaaaacaagccctgataagcaaaagcagtccccacagccacagcctggcagctctgatcaggaaagtgaggaacagcaacaattccggaacattttcaagcagatagcaggagatgacatggagatctgtgcagatgagctcaagaaggtccttaacacagtcgtgaacaaacacaaggacctgaagacacacgggttcacactggagtcctgccgtagcatgattgcgctcatggatacagatggctctggaaagctcaacctgcaggagttccaccacctctggaacaagattaaggcctggcagaaaattttcaaacactatgacacagaccagtccggcaccatcaacagctacgagatgcgaaatgcagtcaacgacgcaggattccacctcaacaaccagctctatgacatcattaccatgcggtacgcagacaaacacatgaacatcgactttgacagtttcatctgctgcttcgttaggctggagggcatgttcagagcttttcatgcatttgacaaggatggagatggtatcatcaagctcaacgttctggagtggctgcagctcaccatgtatgcctgaaccaggctggcctcatccaaagccatgcaggatcactcaggatttcagtttcaccctctatttccaaagccatttacctcaaaggacccagcagctacacccctacaggcttccaggcacctcatcagtcatgctcctcctccattttaccccctacccatccttgatcggtcatgcctagcctgaccctttagtaaagcaatgaggtaggaagaacaaacccttgtccctttgccatgtggaggaaagtgcctgcctctggtccgagccgcctcggttctgaagcgagtgctcctgcttaccttgctctaggctgtctgcagaagcacctgccggtggcactcagcacctccttgtgctagagccctccatcaccttcacgctgtcccaccatgggccaggaaccaaaccagcactgggttctactgctgtggggtaaactaactcagtggaatagggctggttactttgggctgtccaactcataagtttggctgcattttgaaaaaagctgatctaaataaaggcatgtgtatggctggtc

SEQ ID NO: 1094 - DNA, 3316 bp, Artificial Sequence
  derived and/or modified sequence
cactctctttctctctccctctggcatgcatgctgctggtaggagacccccaagtcaacattgcttcagaaatcctttagcactcatttctcaggagaacttatggcttcagaatcacagctcggtttttaagatggacataacctgtacgaccttctgatgggctttcaactttgaactggatgtggacacttttctctcagatgacagaattactccaacttcccctttgcagttgcttcctttccttgaaggtagctgtatcttattttctttaaaaagctttttcttccaaagccacttgccatgccgaccgtcattagcgcatctgtggctccaaggacagcggctgagccccggtccccagggccagttcctcacccggcccagagcaaggccactgaggctgggggtggaaacccaagtggcatctattcagccatcatcagccgcaattttcctattatcggagtgaaagagaagacattcgagcaacttcacaagaaatgtctagaaaagaaagttctttatgtggaccctgagttcccaccggatgagacctctctcttttatagccagaagttccccatccagttcgtctggaagagacctccggaaatttgcgagaatccccgatttatcattgatggagccaacagaactgacatctgtcaaggagagctaggggactgctggtttctcgcagccattgcctgcctgaccctgaaccagcaccttcttttccgagtcataccccatgatcaaagtttcatcgaaaactacgcagggatcttccacttccagttctggcgctatggagagtgggtggacgtggttatagatgactgcctgccaacgtacaacaatcaactggttttcaccaagtccaaccaccgcaatgagttctggagtgctctgctggagaaggcttatgctaagctccatggttcctacgaagctctgaaaggtgggaacaccacagaggccatggaggacttcacaggaggggtggcagagttttttgagatcagggatgctcctagtgacatgtacaagatcatgaagaaagccatcgagagaggctccctcatgggctgctccattgatgatggcacgaacatgacctatggaacctctccttctggtctgaacatgggggagttgattgcacggatggtaaggaatatggataactcactgctccaggactcagacctcgaccccagaggctcagatgaaagaccgacccggacaatcattccggttcagtatgagacaagaatggcctgcgggctggtcagaggtcacgcctactctgtcacggggctggatgaggtcccgttcaaaggtgagaaagtgaagctggtgcggctgcggaatccgtggggccaggtggagtggaacggttcttggagtgatagatggaaggactggagctttgtggacaaagatgagaaggcccgtctgcagcaccaggtcactgaggatggagagttctggatgtcctatgaggatttcatctaccatttcacaaagttggagatctgcaacctcacggccgatgctctgcagtctgacaagcttcagacctggacagtgtctgtgaacgagggccgctgggtacggggttgctctgccggaggctgccgcaacttcccagatactttctggaccaaccctcagtaccgtctgaagctcctggaggaggacgatgaccctgatgactcggaggtgatttgcagcttcctggtggccctgatgcagaagaaccggcggaaggaccggaagctaggggccagtctcttcaccattggcttcgccatctacgaggttcccaaagagatgcacgggaacaagcagcacctgcagaaggacttcttcctgtacaacgcctccaaggccaggagcaaaacctacatcaacatgcgggaggtgtcccagcgcttccgcctgcctcccagcgagtacgtcatcgtgccctccacctacgagccccaccaggagggggaattcatcctccgggtcttctctgaaaagaggaacctctctgaggaagttgaaaataccatctccgtggatcggccagtgaaaaagaaaaaaaccaagcccatcatcttcgtttcggacagagcaaacagcaacaaggagctgggtgtggaccaggagtcagaggagggcaaaggcaaaacaagccctgataagcaaaagcagtccccacagccacagcctggcagctctgatcaggaaagtgaggaacagcaacaattccggaacattttcaagcagatagcaggagatgacatggagatctgtgcagatgagctcaagaaggtccttaacacagtcgtgaacaaacacaaggacctgaagacacacgggttcacactggagtcctgccgtagcatgattgcgctcatggatacagatggctctggaaagctcaacctgcaggagttccaccacctctggaacaagattaaggcctggcagaaaattttcaaacactatgacacagaccagtccggcaccatcaacagctacgagatgcgaaatgcagtcaacgacgcaggattccacctcaacaaccagctctatgacatcattaccatgcggtacgcagacaaacacatgaacatcgactttgacagtttcatctgctgcttcgttaggctggagggcatgttcagagcttttcatgcatttgacaaggatggagatggtatcatcaagctcaacgttctggagtggctgcagctcaccatgtatgcctgaaccaggctggcctcatccaaagccatgcaggatcactcaggatttcagtttcaccctctatttccaaagccatttacctcaaaggacccagcagctacacccctacaggcttccaggcacctcatcagtcatgctcctcctccattttaccccctacccatccttgatcggtcatgcctagcctgaccctttagtaaagcaatgaggtaggaagaacaaacccttgtccctttgccatgtggaggaaagtgcctgcctctggtccgagccgcctcggttctgaagcgagtgctcctgcttaccttgctctaggctgtctgcagaagcacctgccggtggcactcagcacctccttgtgctagagccctccatcaccttcacgctgtcccaccatgggccaggaaccaaaccagcactgggttctactgctgtggggtaaactaactcagtggaatagggctggttactttgggctgtccaactcataagtttggctgcattttgaaaaaagctgatctaaataaaggcatgtgtatggctggtc

SEQ ID NO: 1095 - DNA, 2466 bp, Artificial Sequence
  derived and/or modified sequence
atgcccaccgtgatcagcgccagcgtggcccccagaaccgccgccgagcccagaagccccggccccgtgccccaccccgcccagagcaaggccaccgaggccggcggcggcaaccccagcggcatctacagcgccatcatcagcagaaacttccccatcatcggcgtgaaggagaagaccttcgagcagctgcacaagaagtgcctggagaagaaggtgctgtacgtggaccccgagttcccccccgacgagaccagcctgttctacagccagaagttccccatccagttcgtgtggaagagaccccccgagatctgcgagaaccccagattcatcatcgacggcgccaacagaaccgacatctgccagggcgagctgggcgactgctggttcctggccgccatcgcctgcctgaccctgaaccagcacctgctgttcagagtgatcccccacgaccagagcttcatcgagaactacgccggcatcttccacttccagttctggagatacggcgagtgggtggacgtggtgatcgacgactgcctgcccacctacaacaaccagctggtgttcaccaagagcaaccacagaaacgagttctggagcgccctgctggagaaggcctacgccaagctgcacggcagctacgaggccctgaagggcggcaacaccaccgaggccatggaggacttcaccggcggcgtggccgagttcttcgagatcagagacgcccccagcgacatgtacaagatcatgaagaaggccatcgagagaggcagcctgatgggctgcagcatcgacgacggcaccaacatgacctacggcaccagccccagcggcctgaacatgggcgagctgatcgccagaatggtgagaaacatggacaacagcctgctgcaggacagcgacctggaccccagaggcagcgacgagagacccaccagaaccatcatccccgtgcagtacgagaccagaatggcctgcggcctggtgagaggccacgcctacagcgtgaccggcctggacgaggtgcccttcaagggcgagaaggtgaagctggtgagactgagaaacccctggggccaggtggagtggaacggcagctggagcgacagatggaaggactggagcttcgtggacaaggacgagaaggccagactgcagcaccaggtgaccgaggacggcgagttctggatgagctacgaggacttcatctaccacttcaccaagctggagatctgcaacctgaccgccgacgccctgcagagcgacaagctgcagacctggaccgtgagcgtgaacgagggcagatgggtgagaggctgcagcgccggcggctgcagaaacttccccgacaccttctggaccaacccccagtacagactgaagctgctggaggaggacgacgaccccgacgacagcgaggtgatctgcagcttcctggtggccctgatgcagaagaacagaagaaaggacagaaagctgggcgccagcctgttcaccatcggcttcgccatctacgaggtgcccaaggagatgcacggcaacaagcagcacctgcagaaggacttcttcctgtacaacgccagcaaggccagaagcaagacctacatcaacatgagagaggtgagccagagattcagactgccccccagcgagtacgtgatcgtgcccagcacctacgagccccaccaggagggcgagttcatcctgagagtgttcagcgagaagagaaacctgagcgaggaggtggagaacaccatcagcgtggacagacccgtgaagaagaagaagaccaagcccatcatcttcgtgagcgacagagccaacagcaacaaggagctgggcgtggaccaggagagcgaggagggcaagggcaagaccagccccgacaagcagaagcagagcccccagccccagcccggcagcagcgaccaggagagcgaggagcagcagcagttcagaaacatcttcaagcagatcgccggcgacgacatggagatctgcgccgacgagctgaagaaggtgctgaacaccgtggtgaacaagcacaaggacctgaagacccacggcttcaccctggagagctgcagaagcatgatcgccctgatggacaccgacggcagcggcaagctgaacctgcaggagttccaccacctgtggaacaagatcaaggcctggcagaagatcttcaagcactacgacaccgaccagagcggcaccatcaacagctacgagatgagaaacgccgtgaacgacgccggcttccacctgaacaaccagctgtacgacatcatcaccatgagatacgccgacaagcacatgaacatcgacttcgacagcttcatctgctgcttcgtgagactggagggcatgttcagagccttccacgccttcgacaaggacggcgacggcatcatcaagctgaacgtgctggagtggctgcagctgaccatgtacgcctag

SEQ ID NO: 1096 - protein, 78 aa, Artificial Sequence
  derived and/or modified sequence
MIGFLTEDKKKWNLGSNAKDPRGMYQCKGSQNKSKPLQVYYRTSDKQTLLPNDQLYQPLKDREDDQYSHLQGNQLRRN

SEQ ID NO: 1097 - protein, 182 aa, Artificial Sequence
  derived and/or modified sequence
MEQGKGLAVLILAIILLQGTLAQSIKGNHLVKVYDYQEDGSVLLTCDAEAKNITWFKDGKMIGFLTEDKKKWNLGSNAKDPRGMYQCKGSQNKSKPLQVYYRMCQNCIELNAATISGFLFAEIVSIFVLAVGVYFIAGQDGVRQSRASDKQTLLPNDQLYQPLKDREDDQYSHLQGNQLRRN

SEQ ID NO: 1098 - DNA, 237 bp, Artificial Sequence
  derived and/or modified sequence
atgatcggttttcttacagaggataagaagaagtggaacttggggagtaacgcaaaagatccccgtgggatgtaccaatgcaagggcagtcagaataaatctaagccccttcaagtctactataggacctctgacaaacaaacactgctgcccaatgatcagctctatcagcccctaaaggaccgggaggatgatcaatactctcacctgcagggcaaccagctcaggaggaattag

SEQ ID NO: 1099 - DNA, 549 bp, Artificial Sequence
  derived and/or modified sequence
atggagcagggaaagggacttgctgtgctgattctggcaatcatcctgctccaaggaaccttggctcagagcattaaaggaaaccacttagtgaaggtgtatgactatcaagaggacgggtccgtcctattgacgtgtgatgccgaggcaaagaacataacatggtttaaggacggtaaaatgattgggttccttacagaagacaaaaaaaaatggaatcttggtagtaacgcaaaagatcctaggggtatgtaccagtgcaaaggctcacagaataaatctaagcccctgcaagtgtattatcgaatgtgccagaactgtatcgaattgaatgctgcgacaattagtgggtttctctttgctgagatcgtctccattttcgtgctcgccgtcggtgtgtattttattgcaggacaggacggggtgagacagtctagggccagcgacaaacagacactattgcctaatgatcaactttatcagcccttgaaagatcgcgaagacgatcagtattcacatttgcaggggaatcaactcagacgcaattag

SEQ ID NO: 1100 - DNA, 237 bp, Artificial Sequence
  derived and/or modified sequence
atgattggcttcctgacagaggacaagaagaagtggaacctgggcagcaatgccaaggacccccggggcatgtaccagtgcaagggcagccagaacaagagcaagcccctgcaggtgtactaccgcaccagtgacaagcagaccctgctgcccaatgaccagctgtaccagcccctgaaggacagagaagatgaccagtacagccacctgcagggcaaccagctgcggagaaattag

SEQ ID NO: 1101 - DNA, 549 bp, Artificial Sequence
  derived and/or modified sequence
atggagcagggcaagggcctggccgtgctgatcctggccatcatcctgctgcagggcaccctggcccagagcatcaagggcaaccacctggtgaaggtgtatgactaccaggaggatggctctgtgctgctgacctgtgatgctgaggccaagaacatcacctggttcaaggatggcaagatgattggcttcctgacagaggacaagaagaagtggaacctgggcagcaatgccaaggacccccggggcatgtaccagtgcaagggcagccagaacaagagcaagcccctgcaggtgtactacaggatgtgccagaactgcatcgagctgaatgctgccaccatcagcggcttcctgtttgctgagatcgtgtccatctttgtgctggccgtgggcgtgtacttcatcgccggccaggatggagtgcggcagagccgggccagtgacaagcagaccctgctgcccaatgaccagctgtaccagcccctgaaggacagagaagatgaccagtacagccacctgcagggcaaccagctgcggagaaattag

SEQ ID NO: 1102 - DNA, 237 bp, Artificial Sequence
  derived and/or modified sequence
atgatcggcttcctgaccgaggacaagaagaagtggaacctgggctcaaatgcaaaagatccacgcggtatgtaccagtgcaagggctctcagaataagagcaagcctctgcaggtgtactaccgaacgtctgataagcaaaccctgcttccaaatgaccagctctaccagcctttgaaagacagagaagatgatcagtactcccacttgcagggaaaccaactccgcaggaattag

SEQ ID NO: 1103 - DNA, 549 bp, Artificial Sequence
  derived and/or modified sequence
atggagcagggcaagggcctggccgtgctgatcctggccatcatcctattgcagggaaccctggctcaatctattaaaggcaatcacctcgtgaaggtctatgattatcaagaagatggaagtgtcctgctgacttgtgatgcagaggctaagaacattacctggttcaaggacggcaagatgatcggttttctcacagaggataagaaaaaatggaatctgggcagcaatgctaaagatccgcgaggcatgtaccagtgtaaaggcagccagaacaaatctaaaccactgcaggtgtattaccgtatgtgtcagaattgcatcgaactgaacgccgctacaatcagtggattcttatttgcagaaatcgtatcaatttttgtcctcgccgtaggagtctacttcatcgccggccaggacggggtgaggcagtctagagccagcgacaaacaaacactcttgcctaacgatcagctctatcaacccctcaaggatagggaggacgatcagtactctcatctacaaggcaaccagttgcgaaggaactag

SEQ ID NO: 1104 - DNA, 237 bp, Artificial Sequence
  derived and/or modified sequence
atgatcggttttcttaccgaggacaaaaagaagtggaatcttgggtcaaacgccaaggatcctcggggaatgtaccaatgtaagggctctcaaaataagtccaagcctttacaggtctattacagaacttcggacaaacaaactttgctgcccaatgaccagctctatcagccactgaaggatcgagaggatgaccagtactctcaccttcaggggaaccagttgcgacggaactag

SEQ ID NO: 1105 - DNA, 549 bp, Artificial Sequence
  derived and/or modified sequence
atggagcaagggaagggcttagcagtgctcatcctggccatcattctgctacagggaacattagctcagtcgattaaagggaaccatctagtcaaggtctatgactatcaggaagatggttctgttctattgacttgtgacgcagaggcgaaaaacatcacttggtttaaggacggtaagatgatcggatttcttacggaggacaagaagaagtggaatctaggaagcaatgccaaggatcctagaggaatgtaccagtgcaaagggtcgcaaaataagtccaagcctttgcaggtatactacagaatgtgtcaaaactgtatcgaattaaacgctgctaccatcagtgggttcctgtttgccgagatcgtgagcatctttgtgctagctgtgggagtttactttatagcaggacaggacggcgtgcgccaatctcgcgctagcgacaagcagacactgttgccgaatgatcagttgtatcagccgctgaaagacagagaagatgatcagtatagccacctgcagggtaatcagctgagacgaaattag

SEQ ID NO: 1106 - DNA, 1179 bp, Artificial Sequence
  derived and/or modified sequence
agtctagctgctgcacaggctggctggctggctggctgctaagggctgctccacgcttttgccggaggacagagactgacatggaacaggggaagggcctggctgtcctcatcctggctatcattcttcttcaaggtactttggcccagtcaatcaaaggaaaccacttggttaaggtgtatgactatcaagaagatggttcggtacttctgacttgtgatgcagaagccaaaaatatcacatggtttaaagatgggaagatgatcggcttcctaactgaagataaaaaaaaatggaatctgggaagtaatgccaaggaccctcgagggatgtatcagtgtaaaggatcacagaacaagtcaaaaccactccaagtgtattacagaacttcagacaagcagactctgttgcccaatgaccagctctaccagcccctcaaggatcgagaagatgaccagtacagccaccttcaaggaaaccagttgaggaggaattgaactcaggactcagagtagtccaggtgttctcctcctattcagttcccagaatcaaagcaatgcattttggaaagctcctagcagagagactttcagccctaaatctagactcaaggttcccagagatgacaaatggagaagaaaggccatcagagcaaatttgggggtttctcaaataaaataaaaataaaaacaaatactgtgtttcagaagcgccacctattggggaaaattgtaaaagaaaaatgaaaagatcaaataaccccctggatttgaatataattttttgtgttgtaatttttatttcgtttttgtataggttataattcacatggctcaaatattcagtgaaagctctccctccaccgccatcccctgctacccagtgaccctgttgccctcttcagagacaaattagtttctcttttttttttttttttttttttttttgagacagtctggctctgtcacccaggctgaaatgcagtggcaccatctcggctcactgcaacctctgcctcctgggttcaagcgattctcctgcctcagcctcccgggcagctgggattacaggcacacactaccacacctggctaatttttgtatttttagtagagacagggttttgctctgttggccaagctggtctcgaactcctgacctcaagtgatccgcccgcctc

SEQ ID NO: 1107 - DNA, 2678 bp, Artificial Sequence
  derived and/or modified sequence
gcacaggctggctggctggctggctgctaagggctgctccacgcttttgccggaggacagagactgacatggaacaggggaagggcctggctgtcctcatcctggctatcattcttcttcaaggtactttggcccagtcaatcaaaggaaaccacttggttaaggtgtatgactatcaagaagatggttcggtacttctgacttgtgatgcagaagccaaaaatatcacatggtttaaagatgggaagatgatcggcttcctaactgaagataaaaaaaaatggaatctgggaagtaatgccaaggaccctcgagggatgtatcagtgtaaaggatcacagaacaagtcaaaaccactccaagtgtattacagaatgtgtcagaactgcattgaactaaatgcagccaccatatctggctttctctttgctgaaatcgtcagcattttcgtccttgctgttggggtctacttcattgctggacaggatggagttcgccagtcgagagcttcagacaagcagactctgttgcccaatgaccagctctaccagcccctcaaggatcgagaagatgaccagtacagccaccttcaaggaaaccagttgaggaggaattgaactcaggactcagagtagtccaggtgttctcctcctattcagttcccagaatcaaagcaatgcattttggaaagctcctagcagagagactttcagccctaaatctagactcaaggttcccagagatgacaaatggagaagaaaggccatcagagcaaatttgggggtttctcaaataaaataaaaataaaaacaaatactgtgtttcagaagcgccacctattggggaaaattgtaaaagaaaaatgaaaagatcaaataaccccctggatttgaatataattttttgtgttgtaatttttatttcgtttttgtataggttataattcacatggctcaaatattcagtgaaagctctccctccaccgccatcccctgctacccagtgaccctgttgccctcttcagagacaaattagtttctcttttttttttttttttttttttttttgagacagtctggctctgtcacccaggctgaaatgcagtggcaccatctcggctcactgcaacctctgcctcctgggttcaagcgattctcctgcctcagcctcccgggcagctgggattacaggcacacactaccacacctggctaatttttgtatttttagtagagacagggttttgctctgttggccaagctggtctcgaactcctgacctcaagtgatccgcccgcctcagcctcccaaagtgctgggattacaggtgtgagccaccatgcctggtcttaaaaccagtttcttatatatctctctggaggtattctaggcatatatgagcacattctcaagtacatattatcctcccttcccctatcttttagacaaatgatatcaaactatacatcttgtgagattattgcataccattatatgaagataccattatatcctttttaatgcaaccatattgtacaaatagactatgatttatttaacctgttatctatcagtggatatttaagttggtagttggttccaatcttttgctcttacaacaattctgcaatgactaacattgtataaatatcatttttaaaaataattgcattgaagcataatgtacatgccataaaatccacccatcttaagtgatttcacctgttctcagaaatttttagtaaatttaactaattgtacagccattaccataatccagctttaggacattttcttttttttcttttcttttcttttttttcttttttttttttttttgaagtggaatcttgctctgtggcccaggctggagtgcagtggcgcgatctcagctcactgcaacctccacctcctgggttcaagcgattctcttgccttggcctcccgagtagctgagactacaggcacatgccaccacgcccagctcattttttgtgtatttagtatttgtgtatctagtatttgtgtacttagtagagacagggtttcaccatgttggccaggctggtctccaattcctgacctcaggcgatccacccgccttgacctcccaaagtgctgggattacaggtgtgagccaccgcgccaggcccgtaactgtattttaatatagccattctatggatttaatatggtattttattatggccttaatttgcatttccctagatactaaccatgctgagtgtcctgtcttgtgtttattaaccattcatatatttttagtgaaatgtgtatcaaatcttttgcccatttttaagttgacttatttgtttgtcttcttactattgggttgcatatgtttttgatataagtcctttatcagatatatgatttggaaatattttctaccaatctgtggtttgtttttcttaatggtgtcttttgaagtgcaaaaggtttgaattttgaagtacattttattgattttttcttctatatattgtgcttttggtatcatgtctaataaatctttaccaaacccacagttacaaagattttctcctgtcttctttttatactttttacagctttatggttttagctctaacaataaatgtgattttgaacatacataagactatttgtaacaaacacaaataaattgaattgttgggca

SEQ ID NO: 1108 - DNA, 237 bp, Artificial Sequence
  derived and/or modified sequence
atgatcggcttcctgaccgaggacaagaagaagtggaacctgggcagcaacgccaaggaccccagaggcatgtaccagtgcaagggcagccagaacaagagcaagcccctgcaggtgtactacagaaccagcgacaagcagaccctgctgcccaacgaccagctgtaccagcccctgaaggacagagaggacgaccagtacagccacctgcagggcaaccagctgagaagaaactag

SEQ ID NO: 1109 - DNA, 549 bp, Artificial Sequence
  derived and/or modified sequence
atggagcagggcaagggcctggccgtgctgatcctggccatcatcctgctgcagggcaccctggcccagagcatcaagggcaaccacctggtgaaggtgtacgactaccaggaggacggcagcgtgctgctgacctgcgacgccgaggccaagaacatcacctggttcaaggacggcaagatgatcggcttcctgaccgaggacaagaagaagtggaacctgggcagcaacgccaaggaccccagaggcatgtaccagtgcaagggcagccagaacaagagcaagcccctgcaggtgtactacagaatgtgccagaactgcatcgagctgaacgccgccaccatcagcggcttcctgttcgccgagatcgtgagcatcttcgtgctggccgtgggcgtgtacttcatcgccggccaggacggcgtgagacagagcagagccagcgacaagcagaccctgctgcccaacgaccagctgtaccagcccctgaaggacagagaggacgaccagtacagccacctgcagggcaaccagctgagaagaaactag

SEQ ID NO: 1110 - protein, 240 aa, Artificial Sequence
  derived and/or modified sequence
MIETYNQTSPRSAATGLPISMKIFMYLLTVFLITQMIGSALFAVYLHRRLDKIEDERNLHEDFVFMKTIQRCNTGERSLSLLNCEEIKSQFEGFVKDIMLNKEETKKENSFEMQKVLQWAEKGYYTMSNNLVTLENGKQLTVKRQGLYYIYAQVTFCSNREASSQAPFIASLCLKSPGRFERILLRAANTHSSAKPCGQQSIHLGGVFELQPGASVFVNVTDPSQVSHGTGFTSFGLLKL

SEQ ID NO: 1111 - protein, 261 aa, Artificial Sequence
  derived and/or modified sequence
MIETYNQTSPRSAATGLPISMKIFMYLLTVFLITQMIGSALFAVYLHRRLDKIEDERNLHEDFVFMKTIQRCNTGERSLSLLNCEEIKSQFEGFVKDIMLNKEETKKENSFEMQKGDQNPQIAAHVISEASSKTTSVLQWAEKGYYTMSNNLVTLENGKQLTVKRQGLYYIYAQVTFCSNREASSQAPFIASLCLKSPGRFERILLRAANTHSSAKPCGQQSIHLGGVFELQPGASVFVNVTDPSQVSHGTGFTSFGLLKL

SEQ ID NO: 1112 - DNA, 723 bp, Artificial Sequence
  derived and/or modified sequence
atgatcgagacttacaaccagaccagccctcggagcgccgctaccggtctaccgatcagcatgaagatcttcatgtatctcctaacagtgttcctgattacacagatgattggctcggccctcttcgcggtctacctgcaccgccgcctagacaagattgaggatgagagaaatcttcacgaggattttgtgttcatgaagaccattcagcggtgtaacacaggggagagatcactttcactgctgaattgtgaagaaatcaagagccagtttgaaggattcgtgaaggacattatgttaaacaaggaagaaacaaaaaaagagaacagcttcgaaatgcaaaaggtgttacagtgggccgagaaagggtattacacaatgtcaaacaacttggtgacacttgagaacggtaaacagctgacagtcaaacggcagggtctgtattatatctatgcccaggtcacattttgctctaacagggaggcctcgtcacaggccccattcatcgccagcctatgtctgaaaagcccgggccgcttcgagaggatactgttgagggctgctaatacacatagttctgctaaaccctgcggtcagcagtccatccacctgggcggcgtgtttgaacttcaaccgggcgcatccgtatttgtcaacgtgacggatccatcccaagtttcacacggaactgggttcacaagttttggcctgctcaaactctag

SEQ ID NO: 1113 - DNA, 786 bp, Artificial Sequence
  derived and/or modified sequence
atgatcgagacatataaccagacctccccaagatccgcagctaccgggctgcctatcagcatgaaaatctttatgtacttgttaacggtgtttttgatcacgcagatgatcggaagcgccctctttgcagtgtatctgcatagaaggcttgacaaaattgaagatgagagaaatctgcacgaagacttcgtgtttatgaaaaccatccaacggtgtaacaccggggagcggtctcttagcctgctgaattgcgaagagattaagagccaatttgagggttttgtgaaagacatcatgctgaacaaagaggaaaccaagaaagaaaactctttcgagatgcagaaaggtgaccagaaccctcagatcgccgcccacgtgatctctgaggccagttccaagactacatctgtgctccaatgggccgaaaaaggctactacactatgtccaataacttggtgaccctagagaacggaaagcaactgaccgtgaaacggcagggactgtactacatttacgcccaggtgacgttctgctccaaccgcgaagccagttctcaggctccttttatcgccagtctttgcctcaaaagccccgggcgattcgaaagaatcctgttgagggcagcaaacacacactcatccgctaaaccttgcgggcagcaatcgatccatcttggcggagtctttgaactgcagcccggcgcctctgtattcgtgaacgtcacggacccaagccaggtgagccatggaacagggtttacatcatttggactgctaaagctgtag

SEQ ID NO: 1114 - DNA, 723 bp, Artificial Sequence
  derived and/or modified sequence
atgattgagacctacaaccagaccagccccaggtctgctgccaccggcctgcccatctccatgaagatcttcatgtacctgctgactgtgttcctgatcacccagatgattggcagcgccctgtttgctgtgtacctgcaccggcggctggacaagattgaagatgaaagaaacctgcatgaagattttgtgttcatgaagaccatccagcgctgcaacacaggagagaggagcctgagcctgctgaactgtgaggagatcaagagccagtttgagggctttgtgaaggacatcatgctgaacaaggaggagaccaagaaggagaacagctttgagatgcagaaggtgctgcagtgggccgagaagggctactacaccatgagcaacaacctggtgaccctggagaatggcaagcagctgactgtgaagaggcagggcctgtactacatctatgcccaggtgaccttctgcagcaaccgggaggccagcagccaggcccccttcatcgccagcctgtgcctgaagagccctggccgctttgagcgcatcctgctgcgggccgccaacacccacagcagcgccaagccctgtggccagcagagcatccacctgggcggcgtgtttgagctgcagcccggggcctctgtgtttgtgaatgtgacagaccccagccaggtgagccacggcaccggcttcaccagctttggcctgctgaagctgtag

SEQ ID NO: 1115 - DNA, 786 bp, Artificial Sequence
  derived and/or modified sequence
atgattgagacctacaaccagaccagccccaggtctgctgccaccggcctgcccatctccatgaagatcttcatgtacctgctgactgtgttcctgatcacccagatgattggcagcgccctgtttgctgtgtacctgcaccggcggctggacaagattgaagatgaaagaaacctgcatgaagattttgtgttcatgaagaccatccagcgctgcaacacaggagagaggagcctgagcctgctgaactgtgaggagatcaagagccagtttgagggctttgtgaaggacatcatgctgaacaaggaggagaccaagaaggagaacagctttgagatgcagaagggggaccagaacccccagattgctgcccacgtgatcagcgaggccagcagcaagaccacctctgtgctgcagtgggccgagaagggctactacaccatgagcaacaacctggtgaccctggagaatggcaagcagctgactgtgaagaggcagggcctgtactacatctatgcccaggtgaccttctgcagcaaccgggaggccagcagccaggcccccttcatcgccagcctgtgcctgaagagccctggccgctttgagcgcatcctgctgcgggccgccaacacccacagcagcgccaagccctgtggccagcagagcatccacctgggcggcgtgtttgagctgcagcccggggcctctgtgtttgtgaatgtgacagaccccagccaggtgtcccatggaacaggcttcaccagctttggcctgctgaagctgtag

SEQ ID NO: 1116 - DNA, 723 bp, Artificial Sequence
  derived and/or modified sequence
atgatcgagacctacaaccagaccagcccccggagcgccgccaccggtttgccaatctctatgaaaatcttcatgtacctcttgacagtctttctcatcactcaaatgattggatccgcgctgtttgcagtgtatttgcatcgccgtctcgacaagatagaggacgaaagaaacctgcatgaagatttcgtcttcatgaaaactatccagcgctgcaacaccggagagcggtccctctcacttctgaactgcgaggaaatcaaaagtcagtttgaagggtttgtgaaggatatcatgttgaacaaagaagagacaaagaaggagaatagttttgagatgcaaaaagttcttcaatgggctgaaaagggctattatactatgagtaacaacctcgtcactctcgagaatggcaaacagctgacggttaaacgtcaaggactctactacatttatgcgcaggtcactttctgctccaatcgcgaagcgtcgtcacaggccccttttatcgctagcctgtgtctgaagtccccggggcgttttgagagaattctactgcgcgccgcaaacactcactctagcgccaaaccttgcggacagcagtcaatccacttagggggcgtgttcgaattgcaaccaggtgcaagtgtttttgtgaacgtgacagacccgtcacaggtgtcccatgggaccggattcacgtcctttgggctgctgaagctgtag

SEQ ID NO: 1117 - DNA, 786 bp, Artificial Sequence
  derived and/or modified sequence
atgatcgagacctacaaccagaccagcccccggagcgccgccaccggtttgcctatctctatgaagatcttcatgtaccttctcactgtttttctgattacccagatgatcggttctgccctgttcgcagtgtacttgcaccgtcgtctggataaaatcgaagacgagcggaatctccatgaggatttcgtgtttatgaagacaatacagcgctgcaacaccggcgaaagaagtctcagcttgctcaactgcgaagagatcaaaagccagtttgaggggttcgtgaaagacatcatgctcaataaggaggagacaaaaaaggagaactcattcgaaatgcaaaagggagatcagaacccacagatcgcggcacatgtgatttctgaagcctccagtaagactacctcagtgttgcagtgggccgagaaaggatactatacaatgagcaacaatctggtcaccctggagaacggaaaacaattgacagttaagagacagggcctgtactacatttatgcccaggtgacgttctgctccaatcgtgaagctagcagccaggccccgtttatcgcttctctatgcctgaaaagtcctggaaggtttgagcgaattctgctcagagcagcgaatacccacagcagtgccaaaccctgtgggcagcagtctattcaccttggcggcgtgttcgagctgcagccgggcgcatccgtgttcgtgaatgtaacagacccgagtcaagtgagtcacggcaccggttttaccagttttgggcttttgaaattgtag

SEQ ID NO: 1118 - DNA, 723 bp, Artificial Sequence
  derived and/or modified sequence
atgatcgagacgtataaccagacatctccacgttcagcagccactggcctacctatctccatgaaaatattcatgtatctcctgacagtcttcctgataactcagatgatcggctcagccctattcgcagtgtatttacaccgtcgtctcgacaagatcgaggacgaacggaatcttcatgaggattttgtgttcatgaagacaattcagcgctgtaatactggagaaaggtccctgtccctgctgaactgcgaggagattaagagtcaattcgaaggttttgtgaaggacatcatgcttaacaaagaagagacaaagaaagaaaattccttcgagatgcaaaaggtgctccagtgggctgagaagggctactacacaatgtccaacaacttggtcacattagagaacggcaagcaattgacagtcaagagacaggggctctactacatttacgcacaggtcaccttttgcagcaaccgtgaagcctcttctcaagctcccttcattgcatccctatgcctgaaatctccgggacggtttgaacgaatcctgttgagggccgcaaatacccactctagcgccaaaccatgcggccagcaaagcatccatctgggcggtgtgtttgaactgcagcctggggcaagtgtttttgtgaatgtcacagaccctagtcaggtgagtcacgggacaggcttcacttcatttggtctgctgaagctctag

SEQ ID NO: 1119 - DNA, 786 bp, Artificial Sequence
  derived and/or modified sequence
atgattgagacgtacaatcagacaagcccccgaagcgcagcgaccggacttcccataagtatgaaaatctttatgtatctgctgaccgtgtttcttatcacccaaatgataggctccgctctatttgccgtgtatctccatcgcaggctagataaaatcgaagatgagcgaaacctgcatgaggactttgtgttcatgaagactattcagaggtgtaacacaggtgagcgttcgctttctctgctgaattgtgaagaaatcaagtcccagtttgagggcttcgtcaaggatataatgctgaacaaagaggagaccaagaaggagaacagcttcgaaatgcaaaagggagaccagaacccacaaatcgcagctcacgtcatatcagaggcctcatcaaaaacaacatcggttctgcaatgggctgaaaagggctattataccatgtctaacaatttggtgaccttggaaaatggtaaacagctcaccgtgaagcggcagggcctttactacatatacgctcaggtgactttttgctctaatcgggaagccagcagtcaggcaccattcattgcttcgctctgcctgaaaagcccagggagatttgaacgcattttactgcgcgctgcaaacacccactctagcgctaagccatgtggccaacagtccatacacttaggcggagtattcgaattacagcctggcgctagtgtcttcgttaatgtaacagatccatcccaagtgagtcacggcaccggcttcacctcttttggtctgttgaagctgtag

SEQ ID NO: 1120 - DNA, 1720 bp, Artificial Sequence
  derived and/or modified sequence
accatttcaactttaacacagcatgatcgaaacatacaaccaaacttctccccgatctgcggccactggactgcccatcagcatgaaaatttttatgtatttacttactgtttttcttatcacccagatgattgggtcagcactttttgctgtgtatcttcatagaaggttggacaagatagaagatgaaaggaatcttcatgaagattttgtattcatgaaaacgatacagagatgcaacacaggagaaagatccttatccttactgaactgtgaggagattaaaagccagtttgaaggctttgtgaaggatataatgttaaacaaagaggagacgaagaaagaaaacagctttgaaatgcaaaaagtgttacagtgggctgaaaaaggatactacaccatgagcaacaacttggtaaccctggaaaatgggaaacagctgaccgttaaaagacaaggactctattatatctatgcccaagtcaccttctgttccaatcgggaagcttcgagtcaagctccatttatagccagcctctgcctaaagtcccccggtagattcgagagaatcttactcagagctgcaaatacccacagttccgccaaaccttgcgggcaacaatccattcacttgggaggagtatttgaattgcaaccaggtgcttcggtgtttgtcaatgtgactgatccaagccaagtgagccatggcactggcttcacgtcctttggcttactcaaactctgaacagtgtcaccttgcaggctgtggtggagctgacgctgggagtcttcataatacagcacagcggttaagcccaccccctgttaactgcctatttataaccctaggatcctccttatggagaactatttattatacactccaaggcatgtagaactgtaataagtgaattacaggtcacatgaaaccaaaacgggccctgctccataagagcttatatatctgaagcagcaaccccactgatgcagacatccagagagtcctatgaaaagacaaggccattatgcacaggttgaattctgagtaaacagcagataacttgccaagttcagttttgtttctttgcgtgcagtgtctttccatggataatgcatttgatttatcagtgaagatgcagaagggaaatggggagcctcagctcacattcagttatggttgactctgggttcctatggccttgttggagggggccaggctctagaacgtctaacacagtggagaaccgaaaccccccccccccccccgccaccctctcggacagttattcattctctttcaatctctctctctccatctctctctttcagtctctctctctcaacctctttcttccaatctctctttctcaatctctctgtttccctttgtcagtctcttccctcccccagtctctcttctcaatccccctttctaacacacacacacacacacacacacacacacacacacacacacacacacacacagagtcaggccgttgctagtcagttctcttctttccaccctgtccctatctctaccactatagatgagggtgaggagtagggagtgcagccctgagcctgcccactcctcattacgaaatgactgtatttaaaggaaatctattgtatctacctgcagtctccattgtttccagagtgaacttgtaattatcttgttatttattttttgaataataaagacctcttaacatta

SEQ ID NO: 1121 - DNA, 1817 bp, Artificial Sequence
  derived and/or modified sequence
catgctgcctctgccaccttctctgccagaagataccatttcaactttaacacagcatgatcgaaacatacaaccaaacttctccccgatctgcggccactggactgcccatcagcatgaaaatttttatgtatttacttactgtttttcttatcacccagatgattgggtcagcactttttgctgtgtatcttcatagaaggttggacaagatagaagatgaaaggaatcttcatgaagattttgtattcatgaaaacgatacagagatgcaacacaggagaaagatccttatccttactgaactgtgaggagattaaaagccagtttgaaggctttgtgaaggatataatgttaaacaaagaggagacgaagaaagaaaacagctttgaaatgcaaaaaggtgatcagaatcctcaaattgcggcacatgtcataagtgaggccagcagtaaaacaacatctgtgttacagtgggctgaaaaaggatactacaccatgagcaacaacttggtaaccctggaaaatgggaaacagctgaccgttaaaagacaaggactctattatatctatgcccaagtcaccttctgttccaatcgggaagcttcgagtcaagctccatttatagccagcctctgcctaaagtcccccggtagattcgagagaatcttactcagagctgcaaatacccacagttccgccaaaccttgcgggcaacaatccattcacttgggaggagtatttgaattgcaaccaggtgcttcggtgtttgtcaatgtgactgatccaagccaagtgagccatggcactggcttcacgtcctttggcttactcaaactctgaacagtgtcaccttgcaggctgtggtggagctgacgctgggagtcttcataatacagcacagcggttaagcccaccccctgttaactgcctatttataaccctaggatcctccttatggagaactatttattatacactccaaggcatgtagaactgtaataagtgaattacaggtcacatgaaaccaaaacgggccctgctccataagagcttatatatctgaagcagcaaccccactgatgcagacatccagagagtcctatgaaaagacaaggccattatgcacaggttgaattctgagtaaacagcagataacttgccaagttcagttttgtttctttgcgtgcagtgtctttccatggataatgcatttgatttatcagtgaagatgcagaagggaaatggggagcctcagctcacattcagttatggttgactctgggttcctatggccttgttggagggggccaggctctagaacgtctaacacagtggagaaccgaaaccccccccccccccccgccaccctctcggacagttattcattctctttcaatctctctctctccatctctctctttcagtctctctctctcaacctctttcttccaatctctctttctcaatctctctgtttccctttgtcagtctcttccctcccccagtctctcttctcaatccccctttctaacacacacacacacacacacacacacacacacacacacacacacacacacacagagtcaggccgttgctagtcagttctcttctttccaccctgtccctatctctaccactatagatgagggtgaggagtagggagtgcagccctgagcctgcccactcctcattacgaaatgactgtatttaaaggaaatctattgtatctacctgcagtctccattgtttccagagtgaacttgtaattatcttgttatttattttttgaataataaagacctcttaacatta

SEQ ID NO: 1122 - DNA, 723 bp, Artificial Sequence
  derived and/or modified sequence
atgatcgagacctacaaccagaccagccccagaagcgccgccaccggcctgcccatcagcatgaagatcttcatgtacctgctgaccgtgttcctgatcacccagatgatcggcagcgccctgttcgccgtgtacctgcacagaagactggacaagatcgaggacgagagaaacctgcacgaggacttcgtgttcatgaagaccatccagagatgcaacaccggcgagagaagcctgagcctgctgaactgcgaggagatcaagagccagttcgagggcttcgtgaaggacatcatgctgaacaaggaggagaccaagaaggagaacagcttcgagatgcagaaggtgctgcagtgggccgagaagggctactacaccatgagcaacaacctggtgaccctggagaacggcaagcagctgaccgtgaagagacagggcctgtactacatctacgcccaggtgaccttctgcagcaacagagaggccagcagccaggcccccttcatcgccagcctgtgcctgaagagccccggcagattcgagagaatcctgctgagagccgccaacacccacagcagcgccaagccctgcggccagcagagcatccacctgggcggcgtgttcgagctgcagcccggcgccagcgtgttcgtgaacgtgaccgaccccagccaggtgagccacggcaccggcttcaccagcttcggcctgctgaagctgtag

SEQ ID NO: 1123 - DNA, 786 bp, Artificial Sequence
  derived and/or modified sequence
atgatcgagacctacaaccagaccagccccagaagcgccgccaccggcctgcccatcagcatgaagatcttcatgtacctgctgaccgtgttcctgatcacccagatgatcggcagcgccctgttcgccgtgtacctgcacagaagactggacaagatcgaggacgagagaaacctgcacgaggacttcgtgttcatgaagaccatccagagatgcaacaccggcgagagaagcctgagcctgctgaactgcgaggagatcaagagccagttcgagggcttcgtgaaggacatcatgctgaacaaggaggagaccaagaaggagaacagcttcgagatgcagaagggcgaccagaacccccagatcgccgcccacgtgatcagcgaggccagcagcaagaccaccagcgtgctgcagtgggccgagaagggctactacaccatgagcaacaacctggtgaccctggagaacggcaagcagctgaccgtgaagagacagggcctgtactacatctacgcccaggtgaccttctgcagcaacagagaggccagcagccaggcccccttcatcgccagcctgtgcctgaagagccccggcagattcgagagaatcctgctgagagccgccaacacccacagcagcgccaagccctgcggccagcagagcatccacctgggcggcgtgttcgagctgcagcccggcgccagcgtgttcgtgaacgtgaccgaccccagccaggtgagccacggcaccggcttcaccagcttcggcctgctgaagctgtag

SEQ ID NO: 1124 - protein, 303 aa, Artificial Sequence
  derived and/or modified sequence
MATSRYEPVAEIGVGAYGTVYKARDPHSGHFVALKSVRVPNGGGGGGGLPISTVREVALLRRLEAFEHPNVVRLMDVCATSRTDREIKVTLVFEHVDQDLRTYLDKAPPPGLPAETIKDLMRQFLRGLDFLHANCIVHRDLKPENILVTSGGTVKLADFGLARIYSYQMALTPVVVTLWYRAPEVLLQSTYATPVDMWSVGCIFAEMFRRKPLFCGNSEADQLGKIFDLIGLPPEDDWPRDVSLPRGAFPPRGPRPVQSVVPEMEESGAQLLLEMLTFNPHKRISAFRALQHSYLHKDEGNPE

SEQ ID NO: 1125 - protein, 111 aa, Artificial Sequence
  derived and/or modified sequence
MATSRYEPVAEIGVGAYGTVYKARDPHSGHFVALKSVRVPNGGGGGGGLPISTVREVALLRRLEAFEHPNVVRLMDVCATSRTDREIKRCFVESLSSVETLKPTSWAKSLT

SEQ ID NO: 1126 - protein, 183 aa, Artificial Sequence
  derived and/or modified sequence
MRQFLRGLDFLHANCIVHRDLKPENILVTSGGTVKLADFGLARIYSYQMALTPVVVTLWYRAPEVLLQSTYATPVDMWSVGCIFAEMFRRKPLFCGNSEADQLGKIFDLIGLPPEDDWPRDVSLPRGAFPPRGPRPVQSVVPEMEESGAQLLLEMLTFNPHKRISAFRALQHSYLHKDEGNPE

SEQ ID NO: 1127 - protein, 203 aa, Artificial Sequence
  derived and/or modified sequence
MATSRYEPVAEIGVGAYGTVYKARDPHSGHFVALKSVRVPNGGGGGGGLPISTVREVALLRRLEAFEHPNVVRLMDVCATSRTDREIKVTLVFEHVDQDLRTYLDKAPPPGLPAETIKDLMRQFLRGLDFLHANCIVHRDLKPENILVTSGGTVKLADFGLARIYSYQMALTPVVVTLWYRAPEVLLQSTYATPVDMWSVGCI

SEQ ID NO: 1128 - protein, 170 aa, Artificial Sequence
  derived and/or modified sequence
MATSRYEPVAEIGVGAYGTVYKARDPHSGHFVALKSVRVPNGGGGGGGLPISTVREVALLRRLEAFEHPNVVRLMDVCATSRTDREIKVTLVFEHVDQDLRTYLDKAPPPGLPAETIKDLMRQFLRGLDFLHANCIVHRDLKPENILVTSGGTVKLADFGLARIYSYQMA

SEQ ID NO: 1129 - protein, 115 aa, Artificial Sequence
  derived and/or modified sequence
MATSRYEPVAEIGVGAYGTVYKARDPHSGHFVALKSVRVPNGGGGGGGLPISTVREVALLRRLEAFEHPNVVRLMDVCATSRTDREIKVTLVFEHVDQDLRTYLDKAPPPGLPAE

SEQ ID NO: 1130 - DNA, 912 bp, Artificial Sequence
  derived and/or modified sequence
atggccaccagcagatacgagcccgtggccgagatcggcgtgggcgcctacggcaccgtgtacaaggccagagacccccacagcggccacttcgtggccctgaagagcgtgagagtgcccaacggcggcggcggcggcggcggcctgcccatcagcaccgtgagagaggtggccctgctgagaagactggaggccttcgagcaccccaacgtggtgagactgatggacgtgtgcgccaccagcagaaccgacagagagatcaaggtgaccctggtgttcgagcacgtggaccaggacctgagaacctacctggacaaggcccccccccccggcctgcccgccgagaccatcaaggacctgatgagacagttcctgagaggcctggacttcctgcacgccaactgcatcgtgcacagagacctgaagcccgagaacatcctggtgaccagcggcggcaccgtgaagctggccgacttcggcctggccagaatctacagctaccagatggccctgacccccgtggtggtgaccctgtggtacagagcccccgaggtgctgctgcagagcacctacgccacccccgtggacatgtggagcgtgggctgcatcttcgccgagatgttcagaagaaagcccctgttctgcggcaacagcgaggccgaccagctgggcaagatcttcgacctgatcggcctgccccccgaggacgactggcccagagacgtgagcctgcccagaggcgccttcccccccagaggccccagacccgtgcagagcgtggtgcccgagatggaggagagcggcgcccagctgctgctggagatgctgaccttcaacccccacaagagaatcagcgccttcagagccctgcagcacagctacctgcacaaggacgagggcaaccccgagtag

SEQ ID NO: 1131 - DNA, 336 bp, Artificial Sequence
  derived and/or modified sequence
atggccaccagcagatacgagcccgtggccgagatcggcgtgggcgcctacggcaccgtgtacaaggccagagacccccacagcggccacttcgtggccctgaagagcgtgagagtgcccaacggcggcggcggcggcggcggcctgcccatcagcaccgtgagagaggtggccctgctgagaagactggaggccttcgagcaccccaacgtggtgagactgatggacgtgtgcgccaccagcagaaccgacagagagatcaagagatgcttcgtggagagcctgagcagcgtggagaccctgaagcccaccagctgggccaagagcctgacctag

SEQ ID NO: 1132 - DNA, 552 bp, Artificial Sequence
  derived and/or modified sequence
atgagacagttcctgagaggcctggacttcctgcacgccaactgcatcgtgcacagagacctgaagcccgagaacatcctggtgaccagcggcggcaccgtgaagctggccgacttcggcctggccagaatctacagctaccagatggccctgacccccgtggtggtgaccctgtggtacagagcccccgaggtgctgctgcagagcacctacgccacccccgtggacatgtggagcgtgggctgcatcttcgccgagatgttcagaagaaagcccctgttctgcggcaacagcgaggccgaccagctgggcaagatcttcgacctgatcggcctgccccccgaggacgactggcccagagacgtgagcctgcccagaggcgccttcccccccagaggccccagacccgtgcagagcgtggtgcccgagatggaggagagcggcgcccagctgctgctggagatgctgaccttcaacccccacaagagaatcagcgccttcagagccctgcagcacagctacctgcacaaggacgagggcaaccccgagtag

SEQ ID NO: 1133 - DNA, 612 bp, Artificial Sequence
  derived and/or modified sequence
atggccaccagcagatacgagcccgtggccgagatcggcgtgggcgcctacggcaccgtgtacaaggccagagacccccacagcggccacttcgtggccctgaagagcgtgagagtgcccaacggcggcggcggcggcggcggcctgcccatcagcaccgtgagagaggtggccctgctgagaagactggaggccttcgagcaccccaacgtggtgagactgatggacgtgtgcgccaccagcagaaccgacagagagatcaaggtgaccctggtgttcgagcacgtggaccaggacctgagaacctacctggacaaggcccccccccccggcctgcccgccgagaccatcaaggacctgatgagacagttcctgagaggcctggacttcctgcacgccaactgcatcgtgcacagagacctgaagcccgagaacatcctggtgaccagcggcggcaccgtgaagctggccgacttcggcctggccagaatctacagctaccagatggccctgacccccgtggtggtgaccctgtggtacagagcccccgaggtgctgctgcagagcacctacgccacccccgtggacatgtggagcgtgggctgcatctag

SEQ ID NO: 1134 - DNA, 513 bp, Artificial Sequence
  derived and/or modified sequence
atggccaccagcagatacgagcccgtggccgagatcggcgtgggcgcctacggcaccgtgtacaaggccagagacccccacagcggccacttcgtggccctgaagagcgtgagagtgcccaacggcggcggcggcggcggcggcctgcccatcagcaccgtgagagaggtggccctgctgagaagactggaggccttcgagcaccccaacgtggtgagactgatggacgtgtgcgccaccagcagaaccgacagagagatcaaggtgaccctggtgttcgagcacgtggaccaggacctgagaacctacctggacaaggcccccccccccggcctgcccgccgagaccatcaaggacctgatgagacagttcctgagaggcctggacttcctgcacgccaactgcatcgtgcacagagacctgaagcccgagaacatcctggtgaccagcggcggcaccgtgaagctggccgacttcggcctggccagaatctacagctaccagatggcctag

SEQ ID NO: 1135 - DNA, 348 bp, Artificial Sequence
  derived and/or modified sequence
atggccaccagcagatacgagcccgtggccgagatcggcgtgggcgcctacggcaccgtgtacaaggccagagacccccacagcggccacttcgtggccctgaagagcgtgagagtgcccaacggcggcggcggcggcggcggcctgcccatcagcaccgtgagagaggtggccctgctgagaagactggaggccttcgagcaccccaacgtggtgagactgatggacgtgtgcgccaccagcagaaccgacagagagatcaaggtgaccctggtgttcgagcacgtggaccaggacctgagaacctacctggacaaggcccccccccccggcctgcccgccgagtag

SEQ ID NO: 1136 - DNA, 1552 bp, Artificial Sequence
  derived and/or modified sequence
gtgatagcaacagatcacgtggctgccatcgcccctccgcccccttacactcttcgccctcctcccagtcgaagcacctcctgtccgcccctcagcgcatgggtggcggtcacgtgcccagaacgtccggcgttcgccccgccctcccagtttccgcgcgcctctttggcagctggtcacatggtgagggtgggggtgagggggcctctctagcttgcggcctgtgtctatggtcgggccctctgcgtccagctgctccggaccgagctcgggtgtatggggccgtaggaaccggctccggggccccgataacgggccgcccccacagcaccccgggctggcgtgagggtctcccttgatctgagaatggctacctctcgatatgagccagtggctgaaattggtgtcggtgcctatgggacagtgtacaaggcccgtgatccccacagtggccactttgtggccctcaagagtgtgagagtccccaatggaggaggaggtggaggaggccttcccatcagcacagttcgtgaggtggctttactgaggcgactggaggcttttgagcatcccaatgttgtccggctgatggacgtctgtgccacatcccgaactgaccgggagatcaaggtaaccctggtgtttgagcatgtagaccaggacctaaggacatatctggacaaggcacccccaccaggcttgccagccgaaacgatcaaggatctgatgcgccagtttctaagaggcctagatttccttcatgccaattgcatcgttcaccgagatctgaagccagagaacattctggtgacaagtggtggaacagtcaagctggctgactttggcctggccagaatctacagctaccagatggcacttacacccgtggttgttacactctggtaccgagctcccgaagttcttctgcagtccacatatgcaacacctgtggacatgtggagtgttggctgtatctttgcagagatgtttcgtcgaaagcctctcttctgtggaaactctgaagccgaccagttgggcaaaatctttgacctgattgggctgcctccagaggatgactggcctcgagatgtatccctgccccgtggagcctttccccccagagggccccgcccagtgcagtcggtggtacctgagatggaggagtcgggagcacagctgctgctggaaatgctgacttttaacccacacaagcgaatctctgcctttcgagctctgcagcactcttatctacataaggatgaaggtaatccggagtgagcaatggagtggctgccatggaaggaagaaaagctgccatttcccttctggacactgagagggcaatctttgcctttatctctgaggctatggagggtcctcctccatctttctacagagattactttgctgccttaatgacattcccctcccacctctccttttgaggcttctccttctccttcccatttctctacactaaggggtatgttccctcttgtccctttccctacctttatatttggggtccttttttatacaggaaaaacaaaac

SEQ ID NO: 1137 - DNA, 1000 bp, Artificial Sequence
  derived and/or modified sequence
gtgggggtgagggggcctctctagcttgcggcctgtgtctatggtcgggccctctgcgtccagctgctccggaccgagctcgggtgtatggggccgtaggaaccggctccggggccccgataacgggccgcccccacagcaccccgggctggcgtgagggtctcccttgatctgagaatggctacctctcgatatgagccagtggctgaaattggtgtcggtgcctatgggacagtgtacaaggcccgtgatccccacagtggccactttgtggccctcaagagtgtgagagtccccaatggaggaggaggtggaggaggccttcccatcagcacagttcgtgaggtggctttactgaggcgactggaggcttttgagcatcccaatgttgtccggctgatggacgtctgtgccacatcccgaactgaccgggagatcaagagatgtttcgtcgaaagcctctcttctgtggaaactctgaagccgaccagttgggcaaaatctttgacctgattgggctgcctccagaggatgactggcctcgagatgtatccctgccccgtggagcctttccccccagagggccccgcccagtgcagtcggtggtacctgagatggaggagtcgggagcacagctgctgctggaaatgctgacttttaacccacacaagcgaatctctgcctttcgagctctgcagcactcttatctacataaggatgaaggtaatccggagtgagcaatggagtggctgccatggaaggaagaaaagctgccatttcccttctggacactgagagggcaatctttgcctttatctctgaggctatggagggtcctcctccatctttctacagagattactttgctgccttaatgacattcccctcccacctctccttttgaggcttctccttctccttcccatttctctacactaaggggtatgttccctcttgtccctttccctacctttatatttggggtccttttttatacagg

SEQ ID NO: 1138 - DNA, 952 bp, Artificial Sequence
  derived and/or modified sequence
gtgagggggcctctctagcttgcggcctgtgtctatggtcgggccctctgcgtccagctgctccggaccgagctcgggtgtatggggccgtaggaaccggctccggggccccgataacgggccgcccccacagcaccccgggctggcgtgagggtctcccttgatctgagaatggctacctctcgatatgagccagtggctgaaattggtgtcggtgcctatgggacagtgtacaaggcccgtgatccccacagtggccactttgtggccctcaagagtgtgagagtccccaatggaggaggaggtggaggaggccttcccatcagcacagttcgtgaggtggctttactgaggcgactggaggcttttgagcatcccaatgttgtccggatctgatgcgccagtttctaagaggcctagatttccttcatgccaattgcatcgttcaccgagatctgaagccagagaacattctggtgacaagtggtggaacagtcaagctggctgactttggcctggccagaatctacagctaccagatggcacttacacccgtggttgttacactctggtaccgagctcccgaagttcttctgcagtccacatatgcaacacctgtggacatgtggagtgttggctgtatctttgcagagatgtttcgtcgaaagcctctcttctgtggaaactctgaagccgaccagttgggcaaaatctttgacctgattgggctgcctccagaggatgactggcctcgagatgtatccctgccccgtggagcctttccccccagagggccccgcccagtgcagtcggtggtacctgagatggaggagtcgggagcacagctgctgctggaaatgctgacttttaacccacacaagcgaatctctgcctttcgagctctgcagcactcttatctacataaggatgaaggtaatccggagtgagcaat

SEQ ID NO: 1139 - DNA, 769 bp, Artificial Sequence
  derived and/or modified sequence
gccccaaggaagactgggagcgggggatgggatgctggtggtgttctttgcgctttttttttgggagtccctttgttgctgcaggctcataccatcctaactctgtaagcgacttttggtgataggagtctgtgattgtagggtctcccttgatctgagaatggctacctctcgatatgagccagtggctgaaattggtgtcggtgcctatgggacagtgtacaaggcccgtgatccccacagtggccactttgtggccctcaagagtgtgagagtccccaatggaggaggaggtggaggaggccttcccatcagcacagttcgtgaggtggctttactgaggcgactggaggcttttgagcatcccaatgttgtccggctgatggacgtctgtgccacatcccgaactgaccgggagatcaaggtaaccctggtgtttgagcatgtagaccaggacctaaggacatatctggacaaggcacccccaccaggcttgccagccgaaacgatcaaggatctgatgcgccagtttctaagaggcctagatttccttcatgccaattgcatcgttcaccgagatctgaagccagagaacattctggtgacaagtggtggaacagtcaagctggctgactttggcctggccagaatctacagctaccagatggcacttacacccgtggttgttacactctggtaccgagctcccgaagttcttctgcagtccacatatgcaacacctgtggacatgtggagtgttggctgtatc

SEQ ID NO: 1140 - DNA, 694 bp, Artificial Sequence
  derived and/or modified sequence
gggggcctctctagcttgcggcctgtgtctatggtcgggccctctgcgtccagctgctccggaccgagctcgggtgtatggggccgtaggaaccggctccggggccccgataacgggccgcccccacagcaccccgggctggcgtgaggagtctgtgattgtagggtctcccttgatctgagaatggctacctctcgatatgagccagtggctgaaattggtgtcggtgcctatgggacagtgtacaaggcccgtgatccccacagtggccactttgtggccctcaagagtgtgagagtccccaatggaggaggaggtggaggaggccttcccatcagcacagttcgtgaggtggctttactgaggcgactggaggcttttgagcatcccaatgttgtccggctgatggacgtctgtgccacatcccgaactgaccgggagatcaaggtaaccctggtgtttgagcatgtagaccaggacctaaggacatatctggacaaggcacccccaccaggcttgccagccgaaacgatcaaggatctgatgcgccagtttctaagaggcctagatttccttcatgccaattgcatcgttcaccgagatctgaagccagagaacattctggtgacaagtggtggaacagtcaagctggctgactttggcctggccagaatctacagctaccagatggcac

SEQ ID NO: 1141 - DNA, 447 bp, Artificial Sequence
  derived and/or modified sequence
accccattcccactccgtgtcctggggcccgcccagcctccttaggcgccgcgcctgctcgcggtctccgctgacaccccagggtctcccttgatctgagaatggctacctctcgatatgagccagtggctgaaattggtgtcggtgcctatgggacagtgtacaaggcccgtgatccccacagtggccactttgtggccctcaagagtgtgagagtccccaatggaggaggaggtggaggaggccttcccatcagcacagttcgtgaggtggctttactgaggcgactggaggcttttgagcatcccaatgttgtccggctgatggacgtctgtgccacatcccgaactgaccgggagatcaaggtaaccctggtgtttgagcatgtagaccaggacctaaggacatatctggacaaggcacccccaccaggcttgccagccgaaa

SEQ ID NO: 1142 - DNA, 912 bp, Artificial Sequence
  derived and/or modified sequence
atggctaccagccggtacgaaccagtcgccgagataggtgtaggagcttacggaaccgtgtataaggccagggatcctcacagtggtcacttcgttgctctgaaatcagtgagggtaccaaacggcggcggaggaggagggggccttcccatcagcacagtaagggaggttgcactgctgaggagactcgaagcattcgagcaccccaatgtggtgcgacttatggatgtgtgcgcaacctccagaacggatagggaaatcaaagtcacactggtttttgagcacgtggaccaggatctcaggacatacttggataaagcccccccgcccgggctgcccgctgaaacaataaaagacttgatgcgacagttcttacgcggcctcgacttcttgcatgcaaactgcatagttcaccgcgatctgaagccggagaacattcttgtcacttccggcgggacagtaaaactggctgactttggtctcgcaagaatttactcctatcagatggcacttactccggtggtagttactctctggtatcgagcaccagaggtgttactgcagagcacatatgcaacaccagtggacatgtggagtgtgggatgtatttttgcggagatgtttcggcgtaagccactattctgcggcaatagtgaggctgaccagctgggcaaaatatttgatctaataggcttgcccccagaggatgactggcccagagacgtgagtctcccgagaggcgccttcccccccagaggaccccggccagttcagagcgtggtgcccgagatggaggaatcaggcgcacaactgctgctggagatgctcactttcaatcctcacaagcgaattagcgccttccgcgctctgcaacatagctatttgcacaaggacgagggtaaccctgaatag

SEQ ID NO: 1143 - DNA, 336 bp, Artificial Sequence
  derived and/or modified sequence
atggccaccagccggtatgaacctgttgcagagattggtgttggggcttacgggaccgtgtataaggctagagatccccatagcggtcacttcgtggccctgaaaagcgtgagggttccgaatggcggcggaggcggaggcggtttgcctattagcactgtgcgggaggttgcgctactgaggaggctcgaagcctttgagcaccccaacgtggtcaggctcatggacgtctgcgctacatctaggactgacagagaaattaaaaggtgcttcgtagaatccctgtccagcgtggaaaccctgaaaccgactagctgggccaagtctctgacatag

SEQ ID NO: 1144 - DNA, 552 bp, Artificial Sequence
  derived and/or modified sequence
atgagacaatttttacgcggcctggactttctccacgcaaactgcattgtccaccgagatcttaagcctgagaatatcctagttacttccggcggcaccgtgaagctggccgattttggacttgcaagaatctatagctaccagatggctctgacacctgtggtcgtcacattatggtacagagccccagaggtattattgcagagtacttacgctacaccagtggatatgtggtctgtgggttgtatattcgcggagatgttcaggaggaaacccttattttgcggtaacagcgaggccgaccagctgggcaagatcttcgatttgatcggattgccacccgaagatgattggcctcgcgatgtcagtctcccacgcggagcgttcccaccaaggggacctaggcccgtccagtccgtggtgccagagatggaagagtccggggcccagttattgctggaaatgctgactttcaacccacataagagaatttcagccttccgggccctccaacactcttatcttcataaagacgaggggaacccggagtag

SEQ ID NO: 1145 - DNA, 612 bp, Artificial Sequence
  derived and/or modified sequence
atggccacctcgaggtatgagcccgtggccgagatcggtgtgggtgcatatgggactgtttacaaggcccgggatcctcactcagggcacttcgtcgcattaaagtcggtgcgggttccgaatggagggggcgggggcgggggcctccctataagcaccgtccgtgaagtcgctctgctccgcaggttggaggcatttgaacatcccaatgtcgtccgcctgatggatgtttgcgcgacaagtcgaaccgatcgggaaataaaagtcaccttggtgtttgagcatgttgaccaggatctcaggacctatctggataaagcccccccgccgggcctcccggccgaaactatcaaggacttaatgaggcaatttcttcgcggactcgacttcttacatgcgaattgcatagttcaccgagacttgaagccagagaacatcctggtgacttccggaggtactgtcaaactagctgattttggtctggcaagaatctattcgtaccagatggctctgacccctgtggtggtgaccctctggtatagggctccagaagtgttgttgcaatccacctatgcaacccctgtggacatgtggtccgtcggttgtatctag

SEQ ID NO: 1146 - DNA, 513 bp, Artificial Sequence
  derived and/or modified sequence
atggccactagtagatacgagcctgtcgcagaaataggagttggggcgtacgggacggtctacaaagctagagacccacactctggccacttcgttgctcttaaatccgtgcgcgtgcctaacggagggggcggtggtggagggctccctatttccaccgtcagagaagtggccctgctgaggcgccttgaggcattcgagcatccaaacgttgtccggctgatggatgtttgcgcaacatcacggaccgaccgggagataaaggtcaccctggtgtttgaacatgttgatcaggatctgcgcacttatttggacaaagccccccctcctgggttgcctgctgaaacaataaaagatctgatgcgccagtttctccggggcctggactttcttcacgctaactgcatagtacacagggacctgaagccagaaaatattctggtaacgtccgggggaacagtcaagcttgctgacttcggactggccaggatctattcttaccagatggcatag

SEQ ID NO: 1147 - DNA, 348 bp, Artificial Sequence
  derived and/or modified sequence
atggcaacaagccgctatgagcccgtcgccgagatcggagtcggcgcctacggcacggtctacaaggcccgggatccgcactctgggcattttgtggctctgaagagtgttcgggttccgaacggcggcggggggggaggaggcctgccaattagcaccgtgcgtgaggttgccttgcttcggcgtttagaagccttcgagcacccaaacgtagtgcggttaatggatgtctgcgccacaagcaggaccgatagagagatcaaagtaacattagtatttgaacatgttgaccaggatctccggacctaccttgataaagctcctccgcccggtctgccagccgagtag

SEQ ID NO: 1148 - DNA, 912 bp, Artificial Sequence
  derived and/or modified sequence
atggccaccagccgctatgagcctgtggccgagattggagtgggcgcctatggaacagtgtacaaggcccgggacccccacagcggccactttgtggccctgaagtctgtgcgggtgcccaatggaggcggcggcggcggcggcctgcccatcagcacagtgcgggaggtggccctgctgcggcggctggaggcctttgagcaccccaacgtggtgcggctgatggatgtgtgtgccaccagcaggacagaccgggagatcaaggtgaccctggtgtttgaacatgtggaccaggacctgcggacctacctggacaaggcccctcctcctggcctgcctgctgagaccatcaaggacctgatgaggcagttcctgcggggcctggacttcctgcacgccaactgcatcgtgcaccgggacctgaagccagagaacatcctggtgaccagcggcggcaccgtgaagctggccgactttggcctggcccgcatctacagctaccagatggccctgacccctgtggtggtgaccctgtggtaccgggcccctgaggtgctgctgcagagcacctacgccacccctgtggacatgtggagcgtgggctgcatctttgctgagatgttccggaggaagcccctcttctgtggcaacagcgaggccgaccagctgggcaagatctttgacctgattggcctgcccccagaagatgactggcccagagatgtgtccctgcccaggggggccttccccccccggggccccaggcctgtgcagagcgtggtgcctgagatggaggagagcggggcccagctgctgctggagatgctgaccttcaacccccacaagaggatcagcgccttccgggccctgcagcacagctacctgcacaaggatgagggcaaccctgagtag

SEQ ID NO: 1149 - DNA, 336 bp, Artificial Sequence
  derived and/or modified sequence
atggccaccagccgctatgagcctgtggccgagattggagtgggcgcctatggaacagtgtacaaggcccgggacccccacagcggccactttgtggccctgaagtctgtgcgggtgcccaatggaggcggcggcggcggcggcctgcccatcagcacagtgcgggaggtggccctgctgcggcggctggaggcctttgagcaccccaacgtggtgcggctgatggatgtgtgtgccaccagcaggacagaccgggagatcaagcgctgctttgtggagagcctgagctctgtggagaccctgaagcccacctcctgggccaagagcctgacctag

SEQ ID NO: 1150 - DNA, 552 bp, Artificial Sequence
  derived and/or modified sequence
atgaggcagttcctgcggggcctggacttcctgcacgccaactgcatcgtgcaccgggacctgaagccagagaacatcctggtgaccagcggcggcaccgtgaagctggccgactttggcctggcccgcatctacagctaccagatggccctgacccctgtggtggtgaccctgtggtaccgggcccctgaggtgctgctgcagagcacctacgccacccctgtggacatgtggagcgtgggctgcatctttgctgagatgttccggaggaagcccctcttctgtggcaacagcgaggccgaccagctgggcaagatctttgacctgattggcctgcccccagaagatgactggcccagagatgtgtccctgcccaggggggccttccccccccggggccccaggcctgtgcagagcgtggtgcctgagatggaggagagcggggcccagctgctgctggagatgctgaccttcaacccccacaagaggatcagcgccttccgggccctgcagcacagctacctgcacaaggatgagggcaaccctgagtag

SEQ ID NO: 1151 - DNA, 612 bp, Artificial Sequence
  derived and/or modified sequence
atggccaccagccgctatgagcctgtggccgagattggagtgggcgcctatggaacagtgtacaaggcccgggacccccacagcggccactttgtggccctgaagtctgtgcgggtgcccaatggaggcggcggcggcggcggcctgcccatcagcacagtgcgggaggtggccctgctgcggcggctggaggcctttgagcaccccaacgtggtgcggctgatggatgtgtgtgccaccagcaggacagaccgggagatcaaggtgaccctggtgtttgaacatgtggaccaggacctgcggacctacctggacaaggcccctcctcctggcctgcctgctgagaccatcaaggacctgatgaggcagttcctgcggggcctggacttcctgcacgccaactgcatcgtgcaccgggacctgaagccagagaacatcctggtgaccagcggcggcaccgtgaagctggccgactttggcctggcccgcatctacagctaccagatggccctgacccctgtggtggtgaccctgtggtaccgggcccctgaggtgctgctgcagagcacctacgccacccctgtggacatgtggagcgtgggctgcatctag

SEQ ID NO: 1152 - DNA, 513 bp, Artificial Sequence
  derived and/or modified sequence
atggccaccagccgctatgagcctgtggccgagattggagtgggcgcctatggaacagtgtacaaggcccgggacccccacagcggccactttgtggccctgaagtctgtgcgggtgcccaatggaggcggcggcggcggcggcctgcccatcagcacagtgcgggaggtggccctgctgcggcggctggaggcctttgagcaccccaacgtggtgcggctgatggatgtgtgtgccaccagcaggacagaccgggagatcaaggtgaccctggtgtttgaacatgtggaccaggacctgcggacctacctggacaaggcccctcctcctggcctgcctgctgagaccatcaaggacctgatgaggcagttcctgcggggcctggacttcctgcacgccaactgcatcgtgcaccgggacctgaagccagagaacatcctggtgaccagcggcggcaccgtgaagctggccgactttggcctggcccgcatctacagctaccagatggcctag

SEQ ID NO: 1153 - DNA, 348 bp, Artificial Sequence
  derived and/or modified sequence
atggccaccagccgctatgagcctgtggccgagattggagtgggcgcctatggaacagtgtacaaggcccgggacccccacagcggccactttgtggccctgaagtctgtgcgggtgcccaatggaggcggcggcggcggcggcctgcccatcagcacagtgcgggaggtggccctgctgcggcggctggaggcctttgagcaccccaacgtggtgcggctgatggatgtgtgtgccaccagcaggacagaccgggagatcaaggtgaccctggtgtttgaacatgtggaccaggacctgcggacctacctggacaaggcccctcctcctggcctgcctgctgagtag

SEQ ID NO: 1154 - DNA, 912 bp, Artificial Sequence
  derived and/or modified sequence
atggccaccagccggtacgagcccgtggccgagatcggcgtgggcgcgtatggaactgtgtacaaagcaagggatccacactccgggcacttcgtagccctaaaatccgtgcgggtgcctaacgggggtggtggagggggaggtctccccatctccactgttcgggaggtcgcactgctgcgtagactggaggcattcgaacatccgaatgtggtgaggctgatggatgtgtgtgccacatcacgcacagatcgcgagatcaaggtcacactcgtgtttgaacacgtggatcaggatcttcgcacctatttggacaaggcacctccgccaggcctcccggccgaaactatcaaagacctcatgcgacaatttctgcgcggcctcgactttctgcatgctaactgcatcgtccacagagatctaaagcccgagaatatcctggtgacttccggagggaccgtgaaactggctgacttcggactggcaaggatctactcatatcagatggctctcactccggtggtggtgaccctttggtatcgcgcccctgaggtcctcctgcaatccacttacgccacgcctgtggatatgtggtcagtggggtgtatcttcgccgagatgttcagaagaaagccactattttgtgggaattctgaagccgatcagttgggtaagatttttgacctgattgggctgcctccagaagatgactggccccgcgacgtctctctcccccggggagccttcccgccaagagggccccgcccggtgcagagcgtggtgcccgagatggaggagagcggggcacaactccttcttgaaatgctgactttcaacccccacaagagaatatccgcattccgagcgctccagcatagctaccttcacaaagatgaggggaatcccgagtag

SEQ ID NO: 1155 - DNA, 336 bp, Artificial Sequence
  derived and/or modified sequence
atggccaccagccggtacgagcccgtggccgagatcggcgtgggcgcttatggcaccgtctacaaggcaagagacccccatagcggccatttcgtggcactaaaaagcgtgagagtccccaacggaggcggaggaggcggtgggctacccatctccaccgttagagaggttgcactcctcaggcggttagaggccttcgaacaccccaatgtggttcgtttgatggatgtctgcgccacctccaggacggatcgcgaaatcaagagatgttttgtagaaagcttaagctccgttgaaacacttaagccaaccagttgggcaaagtcgttaacttag

SEQ ID NO: 1156 - DNA, 552 bp, Artificial Sequence
  derived and/or modified sequence
atgcggcagttcctgcggggcctggacttcctgcacgccaactgcatcgtgcaccgcgaccttaaaccagaaaatattctggtcacctcaggcgggactgtgaaacttgctgattttggcctggcccgcatctatagctatcagatggccctgacccccgtggtagtgaccctctggtacagggctcctgaagtgctgctccaaagcacatacgccactcccgtggatatgtggagtgtgggttgcatttttgcggagatgtttcgcagaaagcctctgttctgtgggaactccgaggctgatcagcttgggaaaatcttcgacctcatcggtctgccgcctgaggacgactggccacgggacgtctctcttccccgcggagcattccccccccgcggccctagacccgtccagtcagtcgttccggaaatggaagagagcggagcacagcttttgctggaaatgctgacgttcaatccgcataaacgcatctcagcctttagggccctacagcatagctatctgcacaaagatgagggaaatcccgagtag

SEQ ID NO: 1157 - DNA, 612 bp, Artificial Sequence
  derived and/or modified sequence
atggccaccagccggtacgagcccgtggccgagatcggcgtgggcgcctacgggaccgtctataaagcccgcgatccccattcgggccattttgtggcattgaagtccgtgcgcgtccctaatggtggcggcggaggagggggactgcctatttcaacagtgcgtgaggtcgcactgttacggaggcttgaggcgtttgaacatccaaacgtggtccgactgatggatgtgtgtgcaaccagccgaacagacagagagatcaaagttacactcgtgtttgaacacgtagaccaagatttacgtacatatctggacaaggcacctcctcctggtttgcccgcagaaaccatcaaagacctgatgaggcaattcttaagagggctggattttctccacgcaaattgtatcgtacatcgtgacctgaaacctgaaaatattttagtgacctccggaggaacggtgaaattggctgacttcggcctggcccggatatattcctaccagatggccctaaccccagtggtcgtcaccctctggtatagggctcccgaggttctgctgcaaagtacctacgccactcccgtcgatatgtggagcgttggctgtatctag

SEQ ID NO: 1158 - DNA, 513 bp, Artificial Sequence
  derived and/or modified sequence
atggccaccagccggtacgagcccgtggccgagatcggcgtgggcgcctatggaacagtgtacaaggctcgcgatccacattcaggacattttgtggcactgaagtccgtgcgggttcccaatggtggaggcggcggtggtggcctgccaatttccacggtgagagaggtagccctgcttagaagacttgaggcttttgaacatcccaacgtggtaagactaatggatgtctgcgctacttcccggaccgatagggagattaaagtcactctcgtctttgagcacgtggaccaggatctgcgcacctatttagataaagcccccccgccaggcctacccgccgaaaccatcaaagatcttatgcgtcaattcctccgcggattggattttcttcacgcaaactgcatagtgcatagagatctaaagcctgaaaatatccttgtaacctctggcggcaccgtgaaactggccgatttcgggctagcccgaatttattcttatcaaatggcatag

SEQ ID NO: 1159 - DNA, 348 bp, Artificial Sequence
  derived and/or modified sequence
atggccaccagccggtacgagcccgtggccgagatcggcgtgggcgcttatggcaccgtttataaagcgcgggacccacactccggtcactttgtggctctcaagagcgtgagggtaccaaatggcggggggggaggcgggggccttcctatctctactgtgagggaagtagcgcttctgcggcggcttgaggctttcgaacacccaaacgttgtgcgactcatggatgtatgcgccacttctcggacggacagagaaattaaagttacactggtgttcgaacatgttgaccaggatctcaggacctatctggacaaggcccctccacctggtttgccggcagagtag

SEQ ID NO: 1160 - DNA, 912 bp, Artificial Sequence
  derived and/or modified sequence
atggcgacatcccggtacgagccggtcgctgagatcggcgttggggcatacggtaccgtgtacaaggccagagaccctcactccgggcatttcgttgcgctgaaatcagtgagggttccgaatggtggaggcggaggaggcggacttcctatcagcactgtgcgggaagtggccctgctcagacgcttggaagctttcgagcacccgaacgtcgtgagactcatggacgtttgcgcaacatctcgcacagaccgtgagatcaaagtgacactggtgtttgagcacgtggatcaggacctcagaacatacctggacaaagcgccaccaccagggctccctgccgagaccatcaaggatctgatgcgccagtttttgagaggcctggatttcctgcacgcaaactgcatcgtccatcgagacctgaagcccgaaaatattctcgtcacgtccggtggcactgttaagcttgccgatttcggcttggctcgcatatactcctatcagatggcactgacccctgtggttgtcacattatggtaccgtgctccagaggtactattgcagtctacttatgcgactcccgtcgacatgtggtctgtaggttgcattttcgccgagatgttccgccgaaagcccctattctgtggaaactccgaagccgatcaactcgggaaaatcttcgacttgataggcctccccccagaagacgattggcccagggacgtttccctgcccagaggcgcatttcccccaaggggaccccgaccagtgcagagtgtagtgcccgaaatggaagagtccggtgcacagttgcttctagagatgctaacatttaacccccataagcgaataagcgcctttagggccttgcaacacagctatctacacaaggacgaagggaatccagagtag

SEQ ID NO: 1161 - DNA, 336 bp, Artificial Sequence
  derived and/or modified sequence
atggccactagccgctatgaacccgtggcagagataggagtgggggcatatggaacggtttataaagcccgagatcctcattccggacactttgtcgccctcaaaagtgtaagagtgccgaatggaggtgggggaggtggtggattacctatttctactgtccgagaggtagctctgctgcggcgactcgaagcgttcgagcacccgaacgtggtgaggctcatggacgtgtgcgctacgtctaggaccgaccgtgagataaagaggtgcttcgtggaaagcttgtcttcagtggagaccctgaaacctactagttgggctaaaagcctgacctag

SEQ ID NO: 1162 - DNA, 552 bp, Artificial Sequence
  derived and/or modified sequence
atgaggcagtttctgcggggtctggattttttgcacgccaactgcatcgtccaccgggatctcaaaccagaaaatattcttgttacgtccgggggtactgtcaaactcgcagactttgggctagctcgcatatactcctatcagatggcccttacacctgtggtggtgaccctctggtaccgcgcacccgaggtcctgctgcagagcacatatgctaccccagtcgacatgtggagcgtggggtgtattttcgccgaaatgtttaggcgtaagcctttattctgcggaaattccgaagcggatcagctaggcaaaatctttgatcttatcggtctgcccccagaagatgactggccccgagatgtgtcattgcctcgcggagctttccctcctcgtggacctcgaccagtccaaagtgtggtgcctgagatggaagagagtggggctcaattgttgttggagatgctgaccttcaatcctcataagcggatcagtgcgttccgcgcactgcagcactcttacctgcataaagacgaaggcaatcccgagtag

SEQ ID NO: 1163 - DNA, 612 bp, Artificial Sequence
  derived and/or modified sequence
atggccacgtcacgctacgagcccgtggcggaaattggcgtgggcgcttacggtacagtctacaaggccagggatccccatagtggccactttgtagccttgaagagcgtacgagtccctaatggcggaggaggcggaggcggtttgccaatttctactgtgcgcgaagtcgcacttctgagaaggcttgaagccttcgaacatcccaacgtcgtgcggcttatggacgtttgtgccacttctcgtacagacagggaaatcaaagttactctggtgtttgaacacgtggaccaggatttaagaacctatcttgacaaggcacctccacccggtctgccggctgaaactataaaggatcttatgcgccagttcctgcggggtctggatttcttacatgccaactgcattgtccatcgagacttaaagccggagaacatcttggtaacctctggtggaactgtgaagcttgctgatttcggtctggcgcgtatctattcttatcagatggccctgacacctgtggtggttacactgtggtaccgggctccggaagtgctcctgcagagcacctacgctacacctgtagatatgtggtctgtcggatgtatttag

SEQ ID NO: 1164 - DNA, 513 bp, Artificial Sequence
  derived and/or modified sequence
atggcgacgtcccgctacgagcctgtggccgagattggggtgggcgcatatggaacagtctataaagccagagatccccattccgggcacttcgtggcgctcaaaagcgtccgcgtgcccaacgggggtggcggaggcggaggtttgccgatatcaactgtgcgggaggtggcccttctgaggagactggaggcttttgagcatcccaatgtggtccgtctgatggacgtgtgcgcaacctcgcgaacagatcgtgagatcaaagtgacccttgtgttcgagcacgttgatcaggatttgcggacatatctggacaaggctccaccacccggactgccagctgaaaccattaaagatttgatgcgtcagttccttcgaggtctggacttcctgcatgccaattgcatcgtacatcgagatcttaaacctgaaaacatactagttacgtccggcggaacggtgaaattggctgatttcggactcgccagaatctactcatatcaaatggcctag

SEQ ID NO: 1165 - DNA, 348 bp, Artificial Sequence
  derived and/or modified sequence
atggccacatcaaggtatgagccggtggctgagattggcgtgggagcttatggtacagtgtataaggctagagatccacattcaggtcattttgtggccttaaagagcgtccgcgtacccaacgggggaggcggtggagggggactaccaattagcactgtaagagaagtcgcactgctgcgccgactggaggccttcgagcacccgaatgttgtgagactgatggacgtctgcgccacctccaggacagaccgcgaaattaaggttactctggtctttgaacacgtcgatcaggatttgcgcacatacctggacaaggcaccccctcccggactgcctgcggagtag

SEQ ID NO: 1166 - protein, 305 aa, Artificial Sequence
  derived and/or modified sequence
MERLVARGTFPVLVRTSACRSLFGPVDHEELSRELQARLAELNAEDQNRWDYDFQQDMPLRGPGRLQWTEVDSDSVPAFYRETVQVGRCRLLLAPRPVAVAVAVSPPLEPAAESLDGLEEAPEQLPSVPVPAPASTPPPVPVLAPAPAPAPAPVAAPVAAPVAVAVLAPAPAPAPAPAPAPAPVAAPAPAPAPAPAPAPAPAPAPDAAPQESAEQGANQGQRGQEPLADQLHSGISGRPAAGTAAASANGAAIKKLSGPLISDFFAKRKRSAPEKSSGDVPAPCPSPSAAPGVGSVEQTPRKRLR

SEQ ID NO: 1167 - protein, 316 aa, Artificial Sequence
  derived and/or modified sequence
MSDASLRSTSTMERLVARGTFPVLVRTSACRSLFGPVDHEELSRELQARLAELNAEDQNRWDYDFQQDMPLRGPGRLQWTEVDSDSVPAFYRETVQVGRCRLLLAPRPVAVAVAVSPPLEPAAESLDGLEEAPEQLPSVPVPAPASTPPPVPVLAPAPAPAPAPVAAPVAAPVAVAVLAPAPAPAPAPAPAPAPVAAPAPAPAPAPAPAPAPAPAPDAAPQESAEQGANQGQRGQEPLADQLHSGISGRPAAGTAAASANGAAIKKLSGPLISDFFAKRKRSAPEKSSGDVPAPCPSPSAAPGVGSVEQTPRKRLR

SEQ ID NO: 1168 - DNA, 951 bp, Artificial Sequence
  derived and/or modified sequence
atgagcgacgccagcctgagaagcaccagcaccatggagagactggtggccagaggcaccttccccgtgctggtgagaaccagcgcctgcagaagcctgttcggccccgtggaccacgaggagctgagcagagagctgcaggccagactggccgagctgaacgccgaggaccagaacagatgggactacgacttccagcaggacatgcccctgagaggccccggcagactgcagtggaccgaggtggacagcgacagcgtgcccgccttctacagagagaccgtgcaggtgggcagatgcagactgctgctggcccccagacccgtggccgtggccgtggccgtgagcccccccctggagcccgccgccgagagcctggacggcctggaggaggcccccgagcagctgcccagcgtgcccgtgcccgcccccgccagcacccccccccccgtgcccgtgctggcccccgcccccgcccccgcccccgcccccgtggccgcccccgtggccgcccccgtggccgtggccgtgctggcccccgcccccgcccccgcccccgcccccgcccccgcccccgcccccgtggccgcccccgcccccgcccccgcccccgcccccgcccccgcccccgcccccgcccccgcccccgacgccgccccccaggagagcgccgagcagggcgccaaccagggccagagaggccaggagcccctggccgaccagctgcacagcggcatcagcggcagacccgccgccggcaccgccgccgccagcgccaacggcgccgccatcaagaagctgagcggccccctgatcagcgacttcttcgccaagagaaagagaagcgcccccgagaagagcagcggcgacgtgcccgccccctgccccagccccagcgccgcccccggcgtgggcagcgtggagcagacccccagaaagagactgagatag

SEQ ID NO: 1169 - DNA, 1745 bp, Artificial Sequence
  derived and/or modified sequence
agtgcgctgtgctcgaggggtgccggccaggcctgagcgagcgagctagccagcaggcatcgagggggcgcggctgccgtccggacgagacaggcgaacccgacgcagaagagtccaccaccggacagccagcacatccacgatggagcgtcttgtcgcccgtgggaccttcccagtactagtgcgcaccagcgcctgccgcagcctcttcgggccggtggaccacgaggagctgagccgcgagctgcaggcccgcctggccgagctgaacgccgaggaccagaaccgctgggattacgacttccagcaggacatgccgctgcggggccctggacgcctgcagtggaccgaagtggacagcgactcggtgcccgcgttctaccgcgagacggtgcaggtggggcgctgccgcctgctgctggcgccgcggcccgtcgcggtcgcggtggctgtcagcccgcccctcgagccggccgctgagtccctcgacggcctcgaggaggcgccggagcagctgcctagtgtcccggtcccggccccggcgtccaccccgcccccagtcccggtcctggctccagccccggccccggctccggctccggtcgcggctccggtcgcggctccggtcgcggtcgcggtcctggccccggccccggccccggctccggctccggctccggccccggctccagtcgcggccccggccccagccccggccccggccccggccccggcccccgccccggccccggccccggacgcggcgcctcaagagagcgccgagcagggcgcgaaccaggggcagcgcggccaggagcctctcgctgaccagctgcactcggggatttcgggacgtcccgcggccggcaccgcggccgccagcgccaacggcgcggcgatcaagaagctgtccgggcctctgatctccgatttcttcgccaagcgcaagagatcagcgcctgagaagtcgtcgggcgatgtccccgcgccgtgtccctctccaagcgccgcccctggcgtgggctcggtggagcagaccccgcgcaagaggctgcggtgagccaaagcccaaagagccccgagggaacctgccggggcagcggacgttggaagggcgctgggcctcggctgggaccgttcatgtagcagcaaccggcggcggctgccgcagagcagcgttcggttttgtttttaaattttgaaaactgtgcaatgtattaataacgtctttttatatctaaatgtattctgcacgagaaggtacactggtcccaaggtgtaaagctttaagagtcatttatataaaatgtttaatctctgctgaaactcagtgcaaaaaaaagaaaaaagaaaaaaaaaaggaaaaaataaaaaaaccatgtatatttgtacaaaaagtttttaaagttatactaacttatattttctatttatgtccaggcgtggaccgctctgccacgcactagctcggttattggttatgccaaaggcactctccatctcccacatctggttattgacaagtgtaactttattttcatcgcggactctggggaagggggtcactcacaagctgtagctgccatacatgcccatctagcttgcagtctcttcgcgctttcgctgtctctcttattatgactgtgtttatctgaaacttgaagacaagtctgttaaaatggttcctgagccgtctgtaccactgccccggcccctcgtccgccgggttctaaataaagaggccg

SEQ ID NO: 1170 - DNA, 2051 bp, Artificial Sequence
  derived and/or modified sequence
ggtgttgttgaaactgaaaatactacattatgctaatcgcggccgggcccgcgcgcacgggggtggggcccgcgcgtataaagggggcgcaggcgggctgggcgttccacaggccaagtgcgctgtgctcgaggggtgccggccaggcctgagcgagcgagctagccagcaggcatcgagggggcgcggctgccgtccggacgagacaggcgaacccgacgcagaagagtccaccaccggacagccaggtagccgccgcgtccctcgcacacgcagagtcgggcggcgcggggtctcccttgcgcccggcctccgccctctcctcctctcctttccccttcttctcgctgtcctctcctctctcgctgcccgcgtttgcgcagccccgggccatgtccgacgcgtccctccgcagcacatccacgatggagcgtcttgtcgcccgtgggaccttcccagtactagtgcgcaccagcgcctgccgcagcctcttcgggccggtggaccacgaggagctgagccgcgagctgcaggcccgcctggccgagctgaacgccgaggaccagaaccgctgggattacgacttccagcaggacatgccgctgcggggccctggacgcctgcagtggaccgaagtggacagcgactcggtgcccgcgttctaccgcgagacggtgcaggtggggcgctgccgcctgctgctggcgccgcggcccgtcgcggtcgcggtggctgtcagcccgcccctcgagccggccgctgagtccctcgacggcctcgaggaggcgccggagcagctgcctagtgtcccggtcccggccccggcgtccaccccgcccccagtcccggtcctggctccagccccggccccggctccggctccggtcgcggctccggtcgcggctccggtcgcggtcgcggtcctggccccggccccggccccggctccggctccggctccggccccggctccagtcgcggccccggccccagccccggccccggccccggccccggcccccgccccggccccggccccggacgcggcgcctcaagagagcgccgagcagggcgcgaaccaggggcagcgcggccaggagcctctcgctgaccagctgcactcggggatttcgggacgtcccgcggccggcaccgcggccgccagcgccaacggcgcggcgatcaagaagctgtccgggcctctgatctccgatttcttcgccaagcgcaagagatcagcgcctgagaagtcgtcgggcgatgtccccgcgccgtgtccctctccaagcgccgcccctggcgtgggctcggtggagcagaccccgcgcaagaggctgcggtgagccaatttagagcccaaagagccccgagggaacctgccggggcagcggacgttggaagggcgctgggcctcggctgggaccgttcatgtagcagcaaccggcggcggctgccgcagagcagcgttcggttttgtttttaaattttgaaaactgtgcaatgtattaataacgtctttttatatctaaatgtattctgcacgagaaggtacactggtcccaaggtgtaaagctttaagagtcatttatataaaatgtttaatctctgctgaaactcagtgcaaaaaaaagaaaaaagaaaaaaaaaaggaaaaaataaaaaaaccatgtatatttgtacaaaaagtttttaaagttatactaacttatattttctatttatgtccaggcgtggaccgctctgccacgcactagctcggttattggttatgccaaaggcactctccatctcccacatctggttattgacaagtgtaactttattttcatcgcggactctggggaagggggtcactcacaagctgtagctgccatacatgcccatctagcttgcagtctcttcgcgctttcgctgtctctcttattatgactgtgtttatctgaaacttgaagacaagtctgttaaaatggttcctgagccgtctgtaccactgccccggcccctcgtccgccgggttctaaataaagaggccgaaaaatgctgcaactcca

SEQ ID NO: 1171 - DNA, 1570 bp, Artificial Sequence
  derived and/or modified sequence
aggccaagtgcgctgtgctcgaggggtgccggccaggcctgagcgagcgagctagccagcaggcatcgagggggcgcggctgccgtccggacgagacaggcgaacccgacgcagaagagtccaccaccggacagccaggtagccgccgcgtccctcgcacacgcagagtcgggcggcgcggggtctcccttgcgcccggcctccgccctctcctcctctcctttccccttcttctcgctgtcctctcctctctcgctgcccgcgtttgcgcagccccgggccatgtccgacgcgtccctccgcagcacatccacgatggagcgtcttgtcgcccgtgggaccttcccagtactagtgcgcaccagcgcctgccgcagcctcttcgggccggtggaccacgaggagctgagccgcgagctgcaggcccgcctggccgagctgaacgccgaggaccagaaccgctgggattacgacttccagcaggacatgccgctgcggggccctggacgcctgcagtggaccgaagtggacagcgactcggtgcccgcgttctaccgcgagacggtgcaggtggggcgctgccgcctgctgctggcgccgcggcccgtcgcggtcgcggtggctgtcagcccgcccctcgagccggccgctgagtccctcgacggcctcgaggaggcgccggagcagctgcctagtgtcccggtcccggccccggcgtccaccccgcccccagtcccggtcctggctccagccccggccccggctccggctccggtcgcggctccggtcgcggctccggtcgcggtcgcggtcctggccccggccccggccccggctccggctccggctccggccccggctccagtcgcggccccggccccagccccggccccggccccggccccggcccccgccccggccccggccccggacgcggcgcctcaagagagcgccgagcagggcgcgaaccaggggcagcgcggccaggagcctctcgctgaccagctgcactcggggatttcgggacgtcccgcggccggcaccgcggccgccagcgccaacggcgcggcgatcaagaagctgtccgggcctctgatctccgatttcttcgccaagcgcaagagatcagcgcctgagaagtcgtcgggcgatgtccccgcgccgtgtccctctccaagcgccgcccctggcgtgggctcggtggagcagaccccgcgcaagaggctgcggtgagccaaagcccaaagagccccgagggaacctgccggggcagcggacgttggaagggcgctgggcctcggctgggaccgttcatgtagcagcaaccggcggcggctgccgcagagcagcgttcggttttgtttttaaattttgaaaactgtgcaatgtattaataacgtctttttatatctaaatgtattctgcacgagaaggtacactggtcccaaggtgtaaagctttaagagtcatttatataaaatgtttaatctctgctgaaactcagtgcaaaaaaaagaaaaaagaaaaaaaaaaggaaaaaataaaaaaaccatgtatatttgtacaaaaa

SEQ ID NO: 1172 - DNA, 1811 bp, Artificial Sequence
  derived and/or modified sequence
cccgcgcgtataaagggggcgcaggcgggctgggcgttccacaggccaagtgcgctgtgctcgaggggtgccggccaggcctgagcgagcgagctagccagcaggcatcgagggggcgcggctgccgtccggacgagacaggcgaacccgacgcagaagagtccaccaccggacagccagcacatccacgatggagcgtcttgtcgcccgtgggaccttcccagtactagtgcgcaccagcgcctgccgcagcctcttcgggccggtggaccacgaggagctgagccgcgagctgcaggcccgcctggccgagctgaacgccgaggaccagaaccgctgggattacgacttccagcaggacatgccgctgcggggccctggacgcctgcagtggaccgaagtggacagcgactcggtgcccgcgttctaccgcgagacggtgcaggtggggcgctgccgcctgctgctggcgccgcggcccgtcgcggtcgcggtggctgtcagcccgcccctcgagccggccgctgagtccctcgacggcctcgaggaggcgccggagcagctgcctagtgtcccggtcccggccccggcgtccaccccgcccccagtcccggtcctggctccagccccggccccggctccggctccggtcgcggctccggtcgcggctccggtcgcggtcgcggtcctggccccggccccggccccggctccggctccggctccggccccggctccagtcgcggccccggccccagccccggccccggccccggccccggcccccgccccggccccggccccggacgcggcgcctcaagagagcgccgagcagggcgcgaaccaggggcagcgcggccaggagcctctcgctgaccagctgcactcggggatttcgggacgtcccgcggccggcaccgcggccgccagcgccaacggcgcggcgatcaagaagctgtccgggcctctgatctccgatttcttcgccaagcgcaagagatcagcgcctgagaagtcgtcgggcgatgtccccgcgccgtgtccctctccaagcgccgcccctggcgtgggctcggtggagcagaccccgcgcaagaggctgcggtgagccaatttagagcccaaagagccccgagggaacctgccggggcagcggacgttggaagggcgctgggcctcggctgggaccgttcatgtagcagcaaccggcggcggctgccgcagagcagcgttcggttttgtttttaaattttgaaaactgtgcaatgtattaataacgtctttttatatctaaatgtattctgcacgagaaggtacactggtcccaaggtgtaaagctttaagagtcatttatataaaatgtttaatctctgctgaaactcagtgcaaaaaaaagaaaaaagaaaaaaaaaaggaaaaaataaaaaaaccatgtatatttgtacaaaaagtttttaaagttatactaacttatattttctatttatgtccaggcgtggaccgctctgccacgcactagctcggttattggttatgccaaaggcactctccatctcccacatctggttattgacaagtgtaactttattttcatcgcggactctggggaagggggtcactcacaagctgtagctgccatacatgcccatctagcttgcagtctcttcgcgctttcgctgtctctcttattatgactgtgtttatctgaaacttgaagacaagtctgttaaaatggttcctgagccgtctgtaccactgccccggcccctcgtccgccgggttctaaataaagaggccgaaaaatgctgcaa

SEQ ID NO: 1173 - DNA, 951 bp, Artificial Sequence
  derived and/or modified sequence
atgagtgacgcaagtctaagatccactagtacgatggagcgcttggtggcccggggcacctttcccgtgctggttagaacatctgcctgtcgaagtctgtttggccccgttgaccacgaagaactttcacgtgagctccaggcccgcctggccgagctgaacgcggaagatcaaaatagatgggattacgatttccagcaagacatgccgctgcgcggaccaggacgtctgcagtggaccgaagttgattccgattcagtgccggcattttacagagagacagtacaagtgggcaggtgtcgcctcctcctggccccacgacccgtggccgtcgcagttgccgtctcaccacccctggaaccagcggcggagagcttagacggattggaggaggcaccggaacaactgcctagtgtgccagtcccagcccctgcttcgacccctcctcccgtacctgttctcgccccagctcctgctcctgcccccgctcccgtcgccgctcccgtagcggctccagtggccgtcgcggtactggctccggcccccgccccggcaccggcgcctgcccccgcaccagcacctgttgctgcaccagctcccgccccggccccggcaccagcacccgcccctgcgcctgccccagcacccgacgccgctccacaggagtcggctgagcagggggccaatcaggggcaacgcggccaggagccccttgccgatcagctccattctggtatctctggaaggcccgctgcgggaactgcagccgccagcgcaaatggagcagccatcaagaagctgagtggaccacttatctcagacttctttgccaagcgaaagagatcggctccagaaaagtctagcggggacgttccggcgccatgtccctcaccatcagctgccccaggcgtgggatcggtggagcaaacccctcgaaaaagacttcgttag

SEQ ID NO: 1174 - DNA, 951 bp, Artificial Sequence
  derived and/or modified sequence
atgtccgatgcttctctgcgaagtactagcacaatggagagactagtcgctaggggtactttcccagtgctggtgcgcaccagcgcctgtagaagtctgttcggcccagtggaccacgaggagctgagccgcgagctgcaggctcgtctcgcggagctgaacgccgaggaccagaatcggtgggactacgattttcagcaagatatgccgttgcggggccccggacgacttcagtggaccgaagtggatagcgatagtgtgcctgccttctatcgggaaacagtgcaggtcggaagatgcagactactactcgccccccggcccgtggcagtcgccgtcgcagtgagccctcccttagaacccgccgctgagagtttggacggcctggaagaggctcctgagcagctccctagtgtgcccgttcctgcacctgcctccactcctcccccagtgcccgtcctggcacctgcacccgcaccagctcccgctccagtggctgctccagtggctgcccctgtggccgtggccgtgctggctccggcgcctgctccagccccagctccagcccctgcccctgctccagtggctgccccagcacccgctccagcacccgcccccgcacccgcacccgcacccgccccagcgcctgacgcagctccacaggagagcgctgaacagggcgccaaccaaggccagcggggacaggagcctctggcggatcagttacattctgggatcagtggccggccggcggccggcacggccgccgcctctgctaatggggcagcaattaaaaaactcagtggccccttaatatccgacttttttgccaagagaaagcgttcagcacccgaaaaaagttccggagatgtgcccgcgccatgtccaagccccagcgctgcgcctggcgtgggcagtgtcgagcagaccccccgcaagaggttgcggtag

SEQ ID NO: 1175 - DNA, 951 bp, Artificial Sequence
  derived and/or modified sequence
atgtctgatgccagcctgcggagcaccagcaccatggagcggctggtggcccggggcaccttccctgtgctggtgaggaccagcgcctgccgcagcctgtttggacctgtggaccacgaggagctgagccgggagctgcaggcccggctggccgagctgaatgctgaggaccagaaccgctgggactatgacttccagcaggacatgcccctgcggggccctggccgcctgcagtggacagaggtggacagcgacagcgtgcctgccttctaccgggagaccgtgcaggtgggccgctgccgcctgctgctggcccccaggcctgtggccgtggccgtggccgtgtccccacccctggagcctgctgctgagagcctggatggcctggaggaggcccctgagcagctgcccagcgtgcctgtgcctgccccagccagcaccccacctcctgtgcctgtgctggccccagccccagccccagccccagcccctgtggccgcccctgtggccgcccctgtggccgtggccgtgctggccccagccccagccccagccccagccccagccccagccccagcccctgtggccgccccagccccagccccagccccagccccagccccagccccagccccagccccagccccagatgctgccccccaggagagcgctgagcagggcgccaaccagggccagaggggccaggagcccctggccgaccagctgcacagcggcatcagcggccggcctgctgctggaacagctgctgccagcgccaacggggccgccatcaagaagctgagcggccccctcatcagtgacttctttgccaagaggaagaggtctgcccctgagaagagcagtggagatgtgcctgccccctgccccagccccagcgctgcccctggggtgggctctgtggagcagacccccaggaagaggctgaggtag

SEQ ID NO: 1176 - DNA, 951 bp, Artificial Sequence
  derived and/or modified sequence
atgagcgacgccagcctgcggagcaccagcaccatggagcggctggtggctcgcggcacattccccgtgcttgtgagaacttccgcctgccgaagcctctttgggcctgttgatcatgaagaactgagccgtgagctgcaggcccgtctagcagaactaaatgccgaagaccagaatcgatgggactacgacttccagcaggacatgcccttgcggggtcccgggcggctccaatggaccgaggtagacagcgactccgtgcccgcattctaccgggaaactgtgcaagtgggcaggtgtcggctcctcctcgcgcccaggcccgtggcggtggcagtagccgtttccccgccactggagcccgcagcggaaagtctggatggactggaagaggctccagagcagctgccctctgtgcctgtgcctgccccagcctctaccccacccccagtaccagtgctcgctccagcgcctgcccctgccccagcaccggttgccgctcctgtcgccgcaccggtggctgtggccgttctggcacctgcccctgcccccgctcctgcgccggccccggcgcctgcgccagtggctgctccagcccccgctccagctcccgcgcctgcgcctgctccagccccggctcccgctccagatgcagccccacaggagagcgccgaacagggagccaaccaggggcagcgggggcaggaaccactggctgaccagctccatagtgggatctctggcagacccgctgcgggaaccgcggctgcgagtgctaatggtgccgccatcaagaagctcagtggacctctgatttcagacttttttgcaaagcgaaaaaggagcgcccccgagaagagctcaggcgatgtgcctgccccatgtccatcgccatccgccgcccccggggtagggagcgtcgaacaaaccccaaggaagcgattgcgctag

SEQ ID NO: 1177 - DNA, 951 bp, Artificial Sequence
  derived and/or modified sequence
atgagcgacgccagcctgcggagcaccagcaccatggagcggctggttgcccgcggcactttccccgtgctggtaaggacctctgcttgccgaagtcttttcgggcccgttgaccatgaggaactcagtagggagctgcaggcgagacttgcagagctcaacgccgaggatcagaatcgctgggactacgactttcagcaggatatgccattaagaggtccaggacgcctccagtggacagaagtggactccgacagcgtcccggctttttatcgcgaaaccgtgcaagtgggacggtgtcggctgctgctggctcctaggccggtggccgtcgccgtagccgtgtctcccccactggaacccgcagccgagtccctggatggattggaagaggcgcccgagcagttaccttccgtgcctgtgccagcaccagcaagtactcctccgccggtgcctgtcctggcacccgcaccagcccccgcacccgctccggtagcagctcctgtggccgctcccgttgccgtagcagtactcgctccggctcccgctcctgctcccgcaccagcccccgcgccggcacctgtggctgcacctgccccagcccccgcacccgcccctgcccccgccccagctcctgcccccgctccagacgccgcgccacaggaatccgccgaacaaggggcaaaccagggacagagagggcaggaaccactcgcagatcaactgcattccggaattagtggccgccccgccgccggaactgcagccgcaagtgccaatggggccgccattaaaaagctgtccgggccactgatctcagatttcttcgcaaagagaaaacggtctgcacctgagaagtcctctggcgatgtcccggccccctgcccatctcccagtgccgcccctggcgtgggtagcgttgagcaaactcctaggaagcgactacgatag

SEQ ID NO: 1178 - DNA, 951 bp, Artificial Sequence
  derived and/or modified sequence
atgagtgacgcttctctccggagtactagcaccatggagcgcctcgttgccagaggaacctttccagtgctggtccggactagtgcatgtcgatctctgttcggtcccgtggaccacgaggagctgtcccgtgaactccaagctcgcctcgccgaattaaacgccgaagaccagaatcgctgggactacgacttccaacaggatatgccgcttaggggaccaggcagactacaatggacggaagtggattctgatagcgtgcccgcattttatcgggaaactgtgcaggtgggcaggtgcagacttctcctggcccctcggcctgtggcggtggccgtcgccgtgtcaccgcctttggaacccgcagccgaaagcttggacggcctggaggaggctccggagcagctaccatccgtgccagtgccagctccggcttctactcctcctcccgtcccggtcttagctccagctcccgcacctgcacccgctcccgtcgccgcaccggtcgccgcaccagtggccgttgcagttctcgctccagcccctgcgcctgccccagccccagcgccagccccagccccagttgcagctccagctccagctcccgcacctgccccagccccagcacccgctcccgctcctgcccctgatgcagcaccccaggagtcagccgagcagggcgctaaccaagggcagagaggtcaggagcccttggccgaccaactacactcagggatcagtggtaggcccgctgccggtacagctgccgcttctgccaatggggcagccattaagaagctgtctgggcctctgatatctgatttcttcgccaaaagaaagcgatcggcccctgagaagtcgtccggcgacgtgcctgcgccttgtccctccccaagtgcagcacctggcgtgggttcagtggaacagactccgcgaaagcggttgcggtag

SEQ ID NO: 1179 - DNA, 951 bp, Artificial Sequence
  derived and/or modified sequence
atgtcggacgcaagtctccgctcgacctcaacaatggaacgcctcgtggctcggggaaccttccccgtgctcgtgcgtaccagcgcatgtcggtccctctttggccctgttgaccacgaggagctctctcgcgagctacaagccagactggcagagcttaacgcggaggaccagaatcgttgggattatgactttcagcaggacatgcctctcagggggcctggtagactccagtggacagaagtggactccgatagtgtccctgccttctatagggaaacagtgcaagtaggcagatgcagattactactggctccgcgacccgtggccgtggccgtcgcagtgtcgcctcctctggaaccggctgcagaatcccttgatggactggaggaagcgcctgagcagctgccgtctgtcccagtacctgctcctgcctcaacacctcccccagtgccggtcctcgctcccgcacccgcacccgcacctgctcctgtcgcggctccagtggcagctccggtggcagtcgctgtcttggccccagcacctgctcccgctcctgccccagcccctgcaccggctcccgtagccgctcccgctccagcaccagcgccagctccagcccctgctcctgccccagcccctgcaccagatgccgctcctcaggagtctgccgaacagggagccaaccagggacagcggggtcaggagccattagccgatcagctgcacagcgggattagcgggagacctgccgctgggaccgccgctgcttcggctaatggagccgcaattaaaaaattgtcgggaccactcatctcggatttcttcgctaagagaaaaaggtccgcgcctgaaaagtcatccggcgatgtacctgccccatgcccctcgccatctgctgctccaggcgtcggttcagtggagcaaactccaagaaagcgactgagatag

SEQ ID NO: 1180 - DNA, 471 bp, Artificial Sequence
  derived and/or modified sequence
atgagaggcggcggcggcgtgcccctgatccacttcagcctgcccgtgtgcagccccttcctgtacctgagcctgcccgagccccaggccaagcaccagagaagacccggcagcgagcagggcgcccacgtggccagcgtggaccacccccccgcctgcaccgccctgggcggccccagaaacgccagacccagcgccggcggcagcctgttcaccagcctgcagcccagcgaggacaccagcgagtggggcgccgagcccgccgacggcgagaacaagaacgacgacaccctgtacacccccgacgacctgagcatccccggccacttcgtgcccaccgtgtgccccgccgagaccctgggctgcagcagactggagctgagcgtgatcggcttcgaggagggccccagcatgggcaccgccgtgttccagctgcagtacctgctggacctgctgggcagcagactgtag

SEQ ID NO: 1181 - protein, 156 aa, Artificial Sequence
  derived and/or modified sequence
MEPAAGSSMEPSADWLATAAARGRVEEVRALLEAGALPNAPNSYGRRPIQVMMMGSARVAELLLLHGAEPNCADPATLTRPVHDAAREGFLDTLVVLHRAGARLDVRDAWGRLPVDLAEELGHRDVARYLRAAAGGTRGSNHARIDAAEGPSDIPD

SEQ ID NO: 1182 - DNA, 471 bp, Artificial Sequence
  derived and/or modified sequence
atggagcccgccgccggcagcagcatggagcccagcgccgactggctggccaccgccgccgccagaggcagagtggaggaggtgagagccctgctggaggccggcgccctgcccaacgcccccaacagctacggcagaagacccatccaggtgatgatgatgggcagcgccagagtggccgagctgctgctgctgcacggcgccgagcccaactgcgccgaccccgccaccctgaccagacccgtgcacgacgccgccagagagggcttcctggacaccctggtggtgctgcacagagccggcgccagactggacgtgagagacgcctggggcagactgcccgtggacctggccgaggagctgggccacagagacgtggccagatacctgagagccgccgccggcggcaccagaggcagcaaccacgccagaatcgacgccgccgagggccccagcgacatccccgactag

SEQ ID NO: 1183 - DNA, 1218 bp, Artificial Sequence
  derived and/or modified sequence
cccaacctggggcgacttcaggggtgccacattcgctaagtgctcggagttaatagcacctcctccgagcactcgctcacggcgtccccttgcctggaaagataccgcggtccctccagaggatttgagggacagggtcggagggggctcttccgccagcaccggaggaagaaagaggaggggctggctggtcaccagagggtggggcggaccgcgtgcgctcggcggctgcggagagggggagagcaggcagcgggcggcggggagcagcatggagccggcggcggggagcagcatggagccttcggctgactggctggccacggccgcggcccggggtcgggtagaggaggtgcgggcgctgctggaggcgggggcgctgcccaacgcaccgaatagttacggtcggaggccgatccaggtcatgatgatgggcagcgcccgagtggcggagctgctgctgctccacggcgcggagcccaactgcgccgaccccgccactctcacccgacccgtgcacgacgctgcccgggagggcttcctggacacgctggtggtgctgcaccgggccggggcgcggctggacgtgcgcgatgcctggggccgtctgcccgtggacctggctgaggagctgggccatcgcgatgtcgcacggtacctgcgcgcggctgcggggggcaccagaggcagtaaccatgcccgcatagatgccgcggaaggtccctcagacatccccgattgaaagaaccagagaggctctgagaaacctcgggaaacttagatcatcagtcaccgaaggtcctacagggccacaactgcccccgccacaacccaccccgctttcgtagttttcatttagaaaatagagcttttaaaaatgtcctgccttttaacgtagatatatgccttcccccactaccgtaaatgtccatttatatcattttttatatattcttataaaaatgtaaaaaagaaaaacaccgcttctgccttttcactgtgttggagttttctggagtgagcactcacgccctaagcgcacattcatgtgggcatttcttgcgagcctcgcagcctccggaagctgtcgacttcatgacaagcattttgtgaactagggaagctcaggggggttactggcttctcttgagtcacactgctagcaaatggcagaaccaaagctcaaataaaaataaaataattttcattcattcactc

SEQ ID NO: 1184 - DNA, 1151 bp, Artificial Sequence
  derived and/or modified sequence
cgctcagggaaggcgggtgcgcgcctgcggggcggagatgggcagggggcggtgcgtgggtcccagtctgcagttaagggggcaggagtggcgctgctcacctctggtgccaaagggcggcgcagcggctgccgagctcggccctggaggcggcgagaacatggtgcgcaggttcttggtgaccctccggattcggcgcgcgtgcggcccgccgcgagtgagggttttcgtggttcacatcccgcggctcacgggggagtgggcagcgccaggggcgcccgccgctgtggccctcgtgctgatgctactgaggagccagcgtctagggcagcagccgcttcctagaagaccaggtcatgatgatgggcagcgcccgagtggcggagctgctgctgctccacggcgcggagcccaactgcgccgaccccgccactctcacccgacccgtgcacgacgctgcccgggagggcttcctggacacgctggtggtgctgcaccgggccggggcgcggctggacgtgcgcgatgcctggggccgtctgcccgtggacctggctgaggagctgggccatcgcgatgtcgcacggtacctgcgcgcggctgcggggggcaccagaggcagtaaccatgcccgcatagatgccgcggaaggtccctcagacatccccgattgaaagaaccagagaggctctgagaaacctcgggaaacttagatcatcagtcaccgaaggtcctacagggccacaactgcccccgccacaacccaccccgctttcgtagttttcatttagaaaatagagcttttaaaaatgtcctgccttttaacgtagatatatgccttcccccactaccgtaaatgtccatttatatcattttttatatattcttataaaaatgtaaaaaagaaaaacaccgcttctgccttttcactgtgttggagttttctggagtgagcactcacgccctaagcgcacattcatgtgggcatttcttgcgagcctcgcagcctccggaagctgtcgacttcatgacaagcattttgtgaactagggaagctcaggggggttactggcttctcttgagtcacactgctagcaaatggcagaaccaaagctcaaataaaaataaaataattttcattcattcactca

SEQ ID NO: 1185 - DNA, 905 bp, Artificial Sequence
  derived and/or modified sequence
cgctcagggaaggcgggtgcgcgcctgcggggcggagatgggcagggggcggtgcgtgggtcccagtctgcagttaagggggcaggagtggcgctgctcacctctggtgccaaagggcggcgcagcggctgccgagctcggccctggaggcggcgagaacatggtgcgcaggttcttggtgaccctccggattcggcgcgcgtgcggcccgccgcgagtgagggttttcgtggttcacatcccgcggctcacgggggagtgggcagcgccaggggcgcccgccgctgtggccctcgtgctgatgctactgaggagccagcgtctagggcagcagccgcttcctagaagaccaggtcatgatgatgggcagcgcccgagtggcggagctgctgctgctccacggcgcggagcccaactgcgccgaccccgccactctcacccgacccgtgcacgacgctgcccgggagggcttcctggacacgctggtggtgctgcaccgggccggggcgcggctggacgtgcgcgatgcctggggccgtctgcccgtggacctggctgaggagctgggccatcgcgatgtcgcacggtacctgcgcgcggctgcggggggcaccagaggcagtaaccatgcccgcatagatgccgcggaaggtccctcagacatccccgattgaaagaaccagagaggctctgagaaacctcgggaaacttagatcatcagtcaccgaaggtcctacagggccacaactgcccccgccacaacccaccccgctttcgtagttttcatttagaaaatagagcttttaaaaatgtcctgccttttaacgtagatatatgccttcccccactaccgtaaatgtccatttatatcattttttatatattcttataaaaatgtaaaaaag

SEQ ID NO: 1186 - DNA, 471 bp, Artificial Sequence
  derived and/or modified sequence
atggagcctgctgccggctcctcaatggagccaagtgcagactggctagccacagcggctgctaggggccgcgtagaggaggttagggctctgcttgaggcaggcgccctgcccaacgcacctaacagctatggccgccgcccaatccaggtgatgatgatgggtagcgctagagtggcagagcttctgctgcttcatggggccgagcccaattgtgccgaccccgctacactaacaagacctgtgcacgacgcggcccgggaaggctttctcgacacgttggtcgtgttgcaccgtgcaggggcaaggttggacgtgcgggacgcatggggcagacttccagtggaccttgccgaagagctgggtcatcgagatgtagcccgctacctccgggcagctgccggcggcaccagagggagcaatcatgcccgaatcgatgctgcagagggtccctcagacatcccagattag

SEQ ID NO: 1187 - DNA, 471 bp, Artificial Sequence
  derived and/or modified sequence
atggagcctgctgctggcagctccatggagcccagcgctgactggctggccacagctgctgcccggggccgggtggaggaggtgcgggccctgctggaggccggggccctgcccaatgcccccaacagctatggccggcggcccatccaggtgatgatgatgggcagcgcccgggtggccgagctgctgctgctgcacggggctgagcccaactgtgccgaccctgccaccctgaccaggcctgtgcatgatgctgcccgggagggcttcctggacaccctggtggtgctgcaccgggccggggcccggctggatgtgagagatgcctggggccgcctgcctgtggacctggccgaggagctgggccacagagatgtggcccgctacctgcgggctgctgctgggggcacccggggcagcaaccacgccagaattgatgctgctgagggccccagcgacatcccagactag

SEQ ID NO: 1188 - DNA, 471 bp, Artificial Sequence
  derived and/or modified sequence
atggagcccgccgccggcagcagcatggagcccagcgccgactggttggctaccgctgcagccaggggtagagtcgaagaggtccgggccctgctagaggccggtgctttgccaaacgcaccaaattcctacggtcgaaggcctattcaagtgatgatgatgggttcggccagggtggccgagctgctgcttctacacggcgcagagcccaactgcgccgatccagcaacactgacaagacctgtgcatgatgctgccagggaggggttcctggatacactggtggtcttgcaccgagccggcgctcggctggatgtcagggatgcatggggcagattacccgttgacctggccgaggaactggggcacagggatgtcgcccggtacctaagggcagccgcgggtggcaccagggggagcaaccacgcacgaattgacgcagcagagggaccaagtgatatacccgactag

SEQ ID NO: 1189 - DNA, 471 bp, Artificial Sequence
  derived and/or modified sequence
atggagcccgctgccggtagttccatggagccctcggcagattggctggccaccgctgctgcccgtggaagagtggaagaggtaagagcactgctcgaggcaggagctttaccaaatgccccaaactcttacggcagacgacccattcaggtgatgatgatgggatcggcccgtgtggccgaacttctgctgctccacggcgcagaaccaaattgcgccgaccccgctacattgacacgcccagtccacgacgccgcaagggaaggcttcttggataccctggtcgtcctacatcgagcaggggctcggctcgacgtcagagacgcatggggcaggctgccagttgacctggctgaggaactgggccatcgtgatgtggctcgctacctgagagccgctgcgggaggaacccgaggctcgaatcatgctcgtattgatgccgctgaggggccatccgacatcccagactag

SEQ ID NO: 1190 - protein, 493 aa, Artificial Sequence [sequence omitted]

SEQ ID NO: 1191 - DNA, 1482 bp, Artificial Sequence
  derived and/or modified sequence
atgctggccgctacagtcctgaccctggctctcctcggcaatgctcatgcatgttctaaggggacaagtcacgaagcaggcatcgtctgtcggatcacgaagcctgctctacttgtcctcaaccatgaaaccgccaaggttattcaaaccgctttccagcgtgcatcttatcccgatataaccggcgagaaggcaatgatgctgcttgggcaggtgaagtacggcctgcacaatattcagatcagccatctgagcattgcttcgtctcaagtcgagttagtcgaggccaaaagcatcgacgtgtcaattcagaacgtatctgtcgtgtttaaaggcactcttaaatatgggtatactactgcttggtggctaggcatcgatcagtccatcgacttcgagatcgatagcgcaattgaccttcagatcaatactcagttaacctgcgattcaggtcgcgtgcggactgatgctccggactgttacctgtccttccacaaactgttactgcacctgcagggtgagcgggagcctggttggattaagcagctgtttaccaacttcatctcatttacattgaagcttgtactgaaaggccaaatctgtaaggaaatcaacgtcatttccaatatcatggctgatttcgtccagactagggccgcttctatcctatctgacggagacatcggcgtggacatttctctgactggcgaccccgttattactgcttcctacttagagtctcatcacaaaggccacttcatatacaagaatgtctcggaggatcttccgctgcctacctttagcccgactctgttaggggactccaggatgctttacttttggttttcagagagggtatttcatagcctcgcgaaagtagcatttcaagatgggcgcttaatgctctccctgatgggcgacgagttcaaggccgtcttggaaacctggggttttaacacgaaccaagaaattttccaagaggtggtaggcgggttcccttcacaggcacaggtgacggtccattgtctaaaaatgccaaagatctcctgccagaataaaggtgtggtggtgaactcttccgttatggtgaaatttctcttcccccggcctgatcagcaacacagtgtggcttacacttttgaagaggacattgtcactactgtgcaggcaagttattctaaaaagaagttgtttctgtctctgctggattttcagattactcctaaaacagtgtctaatcttacagagtcctcatctgagagtgtccagagcttcctgcagtccatgattaccgcggtcggtatacctgaggtgatgtcacggctggaagttgtctttactgcgctgatgaattcaaaaggagtttccctgtttgatattatcaatccagaaattatcacaagggacggatttctgctcctacagatggacttcggtttcccagaacatttgcttgtagatttcctgcaaagtctttcctag

SEQ ID NO: 1192 - DNA, 1482 bp, Artificial Sequence
  derived and/or modified sequence
atgctggccgccaccgtgctgaccctggccctgctgggcaatgcccacgcctgcagcaagggcaccagccatgaggccggcatcgtgtgccgcatcaccaagccagccctgctggtgctgaaccacgagacagccaaggtgatccagacagccttccagagggccagctacccagacatcactggagagaaggccatgatgctgctgggccaggtgaagtatggcctgcacaacatccagatcagccacctgagcatcgccagcagccaggtggagctggtggaggccaagagcattgatgtgtccatccagaatgtgtctgtggtgttcaagggcaccctgaagtatggctacaccacagcctggtggctgggcatcgaccagagcattgactttgaaattgacagcgccatcgacctgcagatcaacacccagctgacctgtgacagcggccgggtgaggacagatgccccagactgctacctgtccttccacaagctgctgctgcacctgcagggcgagcgggagcccggctggatcaagcagctgttcaccaacttcatctccttcaccctgaagctggtgctgaagggccagatctgcaaggagatcaacgtcatcagcaacatcatggctgactttgtgcagaccagggctgccagcatcctgagtgatggagacatcggcgtggacatcagcctgactggagaccccgtcatcacagccagctacctggagagccaccacaagggccacttcatctacaagaatgtgtctgaggacctgcccctgcccaccttcagccccaccctgctgggggacagcaggatgctgtacttctggttcagcgagagggtcttccacagcctggccaaggtggccttccaggacggccgcctgatgctgagcctgatgggagatgagttcaaggctgtgctggagacctggggcttcaacaccaaccaggagatcttccaggaggtggtgggcggcttccccagccaggcccaggtgacagtgcactgcctgaagatgcccaagatcagctgccagaacaagggcgtggtggtgaacagctctgtgatggtgaagttcctgttccccaggccagaccagcagcacagcgtggcctacacctttgaggaggacatcgtgaccaccgtgcaggccagctacagcaagaagaagctgttcctgagcctgctggacttccagatcacccccaagacagtgagcaacctgacagagagcagcagcgagagcgtgcagagcttcctgcagagcatgatcacagctgtgggcatccctgaggtgatgagccggctggaggtggtgttcaccgccctgatgaacagcaaaggagtgtccctgtttgacatcatcaaccctgagatcatcaccagagatggcttcctgctgctgcagatggactttggcttccctgagcacctgctggtggacttcctgcagagcctgtcctag

SEQ ID NO: 1193 - DNA, 1482 bp, Artificial Sequence
  derived and/or modified sequence
atgctggccgccaccgtgctgaccctggccctgctgggcaacgcccatgcatgctccaagggcacctcgcatgaagccggtattgtgtgtcgaattaccaaaccggcactgctcgttctgaatcacgagaccgctaaggtcattcagaccgcttttcagagagcatcatatcccgacatcacgggcgagaaagctatgatgctcttaggtcaagtaaagtatggcctgcataacatccagattagccacctaagtattgcttcttctcaggtcgaactggtggaggctaaatcgatcgacgtgtcaattcaaaatgtgtctgtcgtttttaaagggactctgaagtatggctataccacggcctggtggttagggatcgaccaatcaatcgatttcgagatagactcagccatagaccttcaaataaacacacagttgacctgcgattctggccgggttagaactgacgccccagattgttacttgtcttttcacaagctcctgttacacttgcaaggtgaacgagagcctggatggataaaacagctctttactaactttatttcgtttaccctgaagttggtgctaaaggggcagatatgtaaagagattaacgtcatcagcaatattatggctgacttcgtgcagaccagggctgcatccatactctcagacggggacatcggggtcgatataagtctgacgggggatcccgtgatcaccgcgtcgtatctggagtcccaccataagggacacttcatctacaaaaatgtgtccgaagatctaccgctacccaccttttctcccacgctgttaggggactcgcgcatgctgtatttctggtttagtgagcgcgtattccacagccttgctaaagtggcatttcaggatggtaggcttatgttaagcctaatgggtgatgaatttaaagcggtactggaaacgtggggttttaacaccaaccaggagatctttcaagaagtggtgggagggtttcctagccaggcccaggttacagtccactgcctcaaaatgcctaaaatcagctgccagaacaaaggtgtggttgtaaatagttcagtgatggtgaagtttctcttccccaggccagatcagcaacacagcgtcgcttacactttcgaagaggacatagtcactactgtccaggcgagctacagcaagaaaaaattgttcctgagtctcttggacttccagatcacaccaaaaactgtttccaatttaaccgaatcctcttccgaatcagtgcagtcattcctccaatccatgataaccgccgtgggaatacctgaagtgatgtcacggcttgaagtggtgtttaccgctcttatgaacagcaagggagtcagtctctttgatatcattaaccccgagattatcacgagggatgggtttcttctgctccaaatggatttcggattccctgaacatctcttggttgatttcctccaatctttgagctag

SEQ ID NO: 1194 - DNA, 1482 bp, Artificial Sequence
  derived and/or modified sequence
atgctggctgctaccgttctcacactcgcccttctcggcaacgcacatgcctgctctaagggtactagccatgaagccggaatcgtgtgcaggataacaaagcctgcactgttagtactaaatcacgagaccgctaaagtcattcagactgctttccagagggccagctacccggatatcactggtgaaaaggccatgatgctcctgggacaagtcaagtacgggctgcataacatacagataagccatctgtcgatcgccagcagccaggttgagctagtcgaggcgaaatcaattgacgttagcatacagaatgtgtccgtggtattcaagggcacacttaagtacggttacaccactgcttggtggttgggcattgaccagagcattgatttcgaaatcgacagtgccattgatctgcagattaatacacagctcacttgcgatagcggacgcgtgagaaccgatgctcctgattgctatttgagtttccataaattgttactgcacttgcagggagagcgggagccaggctggatcaagcagctgtttaccaatttcatatctttcaccctgaagctagttctaaaagggcagatttgcaaagagattaacgtgatttctaacatcatggcagattttgtgcaaacgcgtgcagcctccatcctgagcgacggagacatcggagtggatatttccctgacaggcgaccctgtgattaccgcctcctatttggagtctcaccacaagggacacttcatctacaagaatgtctctgaggaccttccccttcccacattttcccctaccctgctaggtgactcacgcatgttatatttctggttctctgagagggtgttccactccctcgccaaggtcgcctttcaggatggccgtctcatgctcagcctgatgggcgacgagtttaaagcggtcctggaaacttggggctttaacacaaaccaagagattttccaggaagtagtggggggatttccttcacaggcccaggttaccgtgcactgcttgaagatgcctaaaatctcttgccaaaataagggagttgtcgttaactcatccgtgatggttaaatttttgtttcccaggcccgatcagcagcacagcgtcgcttacactttcgaagaggatattgttaccacagttcaggcctcgtactccaagaaaaaactcttcttatccctgctggatttccaaattacacctaagacagtttctaacttgactgagagtagctctgaatccgtacagtcttttctacagagtatgatcacagcagtgggaatcccggaggtcatgagtagactcgaggtggtgtttactgcactgatgaatagcaagggggtgtccttgtttgacataatcaatcctgagataatcacgcgggacggattcctgctcctgcagatggatttcggattccctgagcatctgctagtggacttccttcagagcttgagctag

SEQ ID NO: 1195 - DNA, 1791 bp, Artificial Sequence
  derived and/or modified sequence
gtgaatctctggggccaggaagaccctgctgcccggaagagcctcatgttccgtgggggctgggcggacatacatatacgggctccaggctgaacggctcgggccacttacacaccactgcctgataaccatgctggctgccacagtcctgaccctggccctgctgggcaatgcccatgcctgctccaaaggcacctcgcacgaggcaggcatcgtgtgccgcatcaccaagcctgccctcctggtgttgaaccacgagactgccaaggtgatccagaccgccttccagcgagccagctacccagatatcacgggcgagaaggccatgatgctccttggccaagtcaagtatgggttgcacaacatccagatcagccacttgtccatcgccagcagccaggtggagctggtggaagccaagtccattgatgtctccattcagaacgtgtctgtggtcttcaaggggaccctgaagtatggctacaccactgcctggtggctgggtattgatcagtccattgacttcgagatcgactctgccattgacctccagatcaacacacagctgacctgtgactctggtagagtgcggaccgatgcccctgactgctacctgtctttccataagctgctcctgcatctccaaggggagcgagagcctgggtggatcaagcagctgttcacaaatttcatctccttcaccctgaagctggtcctgaagggacagatctgcaaagagatcaacgtcatctctaacatcatggccgattttgtccagacaagggctgccagcatcctttcagatggagacattggggtggacatttccctgacaggtgatcccgtcatcacagcctcctacctggagtcccatcacaagggtcatttcatctacaagaatgtctcagaggacctccccctccccaccttctcgcccacactgctgggggactcccgcatgctgtacttctggttctctgagcgagtcttccactcgctggccaaggtagctttccaggatggccgcctcatgctcagcctgatgggagacgagttcaaggcagtgctggagacctggggcttcaacaccaaccaggaaatcttccaagaggttgtcggcggcttccccagccaggcccaagtcaccgtccactgcctcaagatgcccaagatctcctgccaaaacaagggagtcgtggtcaattcttcagtgatggtgaaattcctctttccacgcccagaccagcaacattctgtagcttacacatttgaagaggatatcgtgactaccgtccaggcctcctattctaagaaaaagctcttcttaagcctcttggatttccagattacaccaaagactgtttccaacttgactgagagcagctccgagtccgtccagagcttcctgcagtcaatgatcaccgctgtgggcatccctgaggtcatgtctcggctcgaggtagtgtttacagccctcatgaacagcaaaggcgtgagcctcttcgacatcatcaaccctgagattatcactcgagatggcttcctgctgctgcagatggactttggcttccctgagcacctgctggtggatttcctccagagcttgagctagaagtctccaaggaggtcgggatggggcttgtagcagaaggcaagcaccaggctcacagctggaaccctggtgtctcctccagcgtggtggaagttgggttaggagtacggagatggagattggctcccaactcctccctatcctaaaggcccactggcattaaagtgctgtatccaaga

SEQ ID NO: 1196 - DNA, 1482 bp, Artificial Sequence
  derived and/or modified sequence
atgctggccgccaccgtgctgaccctggccctgctgggcaacgcccacgcctgcagcaagggcaccagccacgaggccggcatcgtgtgcagaatcaccaagcccgccctgctggtgctgaaccacgagaccgccaaggtgatccagaccgccttccagagagccagctaccccgacatcaccggcgagaaggccatgatgctgctgggccaggtgaagtacggcctgcacaacatccagatcagccacctgagcatcgccagcagccaggtggagctggtggaggccaagagcatcgacgtgagcatccagaacgtgagcgtggtgttcaagggcaccctgaagtacggctacaccaccgcctggtggctgggcatcgaccagagcatcgacttcgagatcgacagcgccatcgacctgcagatcaacacccagctgacctgcgacagcggcagagtgagaaccgacgcccccgactgctacctgagcttccacaagctgctgctgcacctgcagggcgagagagagcccggctggatcaagcagctgttcaccaacttcatcagcttcaccctgaagctggtgctgaagggccagatctgcaaggagatcaacgtgatcagcaacatcatggccgacttcgtgcagaccagagccgccagcatcctgagcgacggcgacatcggcgtggacatcagcctgaccggcgaccccgtgatcaccgccagctacctggagagccaccacaagggccacttcatctacaagaacgtgagcgaggacctgcccctgcccaccttcagccccaccctgctgggcgacagcagaatgctgtacttctggttcagcgagagagtgttccacagcctggccaaggtggccttccaggacggcagactgatgctgagcctgatgggcgacgagttcaaggccgtgctggagacctggggcttcaacaccaaccaggagatcttccaggaggtggtgggcggcttccccagccaggcccaggtgaccgtgcactgcctgaagatgcccaagatcagctgccagaacaagggcgtggtggtgaacagcagcgtgatggtgaagttcctgttccccagacccgaccagcagcacagcgtggcctacaccttcgaggaggacatcgtgaccaccgtgcaggccagctacagcaagaagaagctgttcctgagcctgctggacttccagatcacccccaagaccgtgagcaacctgaccgagagcagcagcgagagcgtgcagagcttcctgcagagcatgatcaccgccgtgggcatccccgaggtgatgagcagactggaggtggtgttcaccgccctgatgaacagcaagggcgtgagcctgttcgacatcatcaaccccgagatcatcaccagagacggcttcctgctgctgcagatggacttcggcttccccgagcacctgctggtggacttcctgcagagcctgagctag

SEQ ID NO: 1197 - protein, 457 aa, Artificial Sequence
  derived and/or modified sequence
MEPWPLLLLFSLCSAGLVLGSEHETRLVAKLFKDYSSVVRPVEDHRQVVEVTVGLQLIQLINVDEVNQIVTTNVRLKQQWVDYNLKWNPDDYGGVKKIHIPSEKIWRPDLVLYNNADGDFAIVKFTKVLLQYTGHITWTPPAIFKSYCEIIVTHFPFDEQNCSMKLGTWTYDGSVVAINPESDQPDLSNFMESGEWVIKESRGWKHSVTYSCCPDTPYLDITYHFVMQRLPLYFIVNVIIPCLLFSFLTGLVFYLPTDSGEKMTLSISVLLSLTVFLLVIVELIPSTSSAVPLIGKYMLFTMVFVIASIIITVIVINTHHRSPSTHVMPNWVRKVFIDTIPNIMFFSTMKRPSREKQDKKIFTEDIDISDISGKPGPPPMGFHSPLIKHPEVKSAIEGIKYIAETMKSDQESNNAAAEWKYVAMVMDHILLGVFMLVCIIGTLAVFAGRLIELNQQG

SEQ ID NO: 1198 - DNA, 1374 bp, Artificial Sequence
  derived and/or modified sequence
atggagccctggccactcctgctgctattcagcttatgctccgcagggcttgtcttagggagtgaacacgagaccaggttagtggccaaacttttcaaagactactccagtgtcgtgcggccagtcgaggatcatagacaggtggttgaagtaaccgtgggtctgcagctcatacaactcattaatgtggatgaagtcaaccagatcgtcaccactaatgttaggctgaagcaacagtgggtggactacaacctcaagtggaatccagatgactatgggggcgttaagaagattcacattccgtccgaaaaaatatggcgtccagacctggtattatacaacaatgccgacggggactttgccatagtgaagttcaccaaagttttgctgcaatacaccggccacatcacttggacgcctcccgccatcttcaagtcatattgtgagataatcgtaactcattttccctttgatgagcagaactgtagcatgaagctcggcacttggacctatgatggcagcgtagtggctataaaccctgagtccgatcaacccgatctgtctaacttcatggaaagcggggagtgggtgatcaaggagtctcggggttggaaacactctgtgacttacagttgctgccctgacaccccttatctggacatcacttaccactttgtgatgcaacgactgcccctttattttattgtgaatgtgattattccgtgtctgttgtttagtttcctgacaggcctcgtcttctacctccccactgattcaggcgaaaaaatgaccctttcaataagcgtgctcctctccctcaccgtgtttctactagtcatcgtcgaactgattccttccacctcatcagctgtccccctcatcgggaagtacatgcttttcaccatggtattcgtcatagcgtctataatcatcacagttatcgtcattaacacacatcataggtcacccagcacacacgttatgccgaactgggtacgcaaggtgtttatagatactatccccaacatcatgtttttctctaccatgaaacggccctctagagaaaaacaagacaaaaaaatctttaccgaggatattgacataagtgatatctccgggaagcccggccctccaccaatggggtttcactctccactcattaaacacccagaagtcaaatctgcgatagaaggcatcaagtacatcgccgaaaccatgaagtctgaccaggagtccaacaacgccgcagctgagtggaagtacgtggctatggtgatggatcatatcctcttaggagtgttcatgctcgtttgtattatcggaactctggcggttttcgcgggtcggctgatcgagcttaaccagcaagggtag

SEQ ID NO: 1199 - DNA, 1374 bp, Artificial Sequence
  derived and/or modified sequence
atggagccctggcccctgctgctgctcttcagcctgtgcagcgctggcctggtgctgggcagcgagcacgagacccggctggtggccaagctgttcaaggactacagctctgtggtgcggcctgtggaggaccaccggcaggtggtggaggtgacagtgggcctgcagctgatccagctgatcaacgtggatgaggtgaaccagatcgtgaccaccaacgtgcggctgaagcagcagtgggtggactacaacctgaagtggaacccagatgattatggaggagtgaagaagatccacatccccagcgagaagatctggaggccagacctggtgctgtacaacaatgctgatggagactttgccatcgtgaagttcaccaaggtgctgctgcagtacacaggccacatcacctggaccccaccagccatcttcaagagctactgtgagatcatcgtgacccacttcccctttgatgagcagaactgcagcatgaagctgggcacctggacctatgatggctctgtggtggccatcaaccctgagagtgaccagcctgacctgagcaacttcatggagagcggggagtgggtgatcaaggagagccggggctggaagcacagcgtgacctacagctgctgcccagacaccccctacctggacatcacctaccactttgtgatgcagaggctgcccctgtacttcatcgtgaatgtcatcatcccctgcctgctcttctccttcctgaccggcctggtgttctacctgcccacagattctggagagaagatgaccctgagcatctctgtgctgctgagcctgaccgtcttcctgctggtgattgtggagctgatccccagcaccagcagcgctgtgcccctcatcggcaagtacatgctgttcaccatggtgtttgtgattgccagcatcatcatcaccgtcatcgtcatcaacacccaccacaggagccccagcacccacgtgatgcccaactgggtgaggaaggtgttcatcgacaccatccccaacatcatgttcttcagcaccatgaagaggcccagccgggagaagcaggacaagaagatcttcacagaggacatcgacatcagtgacatcagcggcaagccaggccccccacccatgggcttccacagccccctcatcaagcaccctgaggtgaagagcgccatcgagggcatcaagtacatcgccgagaccatgaagagtgaccaggagagcaacaatgctgctgctgagtggaagtatgtggccatggtgatggaccacatcctgctgggcgtcttcatgctggtgtgcatcatcggcaccctggccgtgtttgctggccgcctgattgagctgaaccagcagggctag

SEQ ID NO: 1200 - DNA, 1374 bp, Artificial Sequence
  derived and/or modified sequence
atggagccctggcccctgctgctgctgttcagcctgtgcagcgccggcctcgttctagggagtgagcatgaaacacggctggtggccaagctgttcaaggactacagtagcgtggttcgacccgtggaggatcaccgacaagttgttgaggttaccgtagggcttcagctgatccagctgatcaacgtcgatgaagttaatcaaatcgtcactaccaacgtccgtcttaaacagcagtgggtggactataatctgaaatggaatcctgacgactatggtggggtgaagaagatacacattccatccgaaaaaatttggaggcccgacctggtgctgtataacaacgccgacggcgactttgcaatcgttaaattcacaaaggtccttctccagtacaccggacacatcacatggacccccccagctatctttaaatcctattgtgagatcatagtgacccactttccatttgacgagcagaattgctcaatgaagctcggaacttggacttacgacggtagcgtggtcgccattaatccagaatccgatcagcctgacctgagcaactttatggagtcaggcgagtgggttattaaagaaagccgggggtggaaacattctgtgacatattcatgctgtccagacaccccgtatctcgatatcacttatcactttgtaatgcagcgcctgcctctctatttcatagtgaacgtcattatcccatgtttgctttttagcttcctgactggtctggtcttctacctgcctactgattcaggtgaaaagatgaccctttcgatatccgtcttgcttagcttgaccgtattcctactggtgattgttgaactcattccatccactagcagcgcagtgcccctgatcggcaagtacatgttgtttacgatggtttttgtgatcgcctccatcatcatcacggttattgtgatcaatacacatcatcgcagcccgtcaactcacgtcatgcccaattgggtccgtaaggtatttatcgacaccattccgaatatcatgttcttcagcacgatgaaaagaccttcccgagaaaaacaggataagaagattttcaccgaagacatcgacatcagcgacatttcaggaaaaccaggacctccccccatgggttttcatagtcccctaattaaacaccccgaggtgaaaagtgccatagagggtatcaagtatatagctgagaccatgaaaagcgatcaggagtcaaataacgcagccgccgagtggaaatacgtggcaatggtcatggatcacattcttctgggcgtgtttatgctggtgtgtataatagggacattggccgtttttgcaggacggttgattgagctcaaccagcagggatag

SEQ ID NO: 1201 - DNA, 1374 bp, Artificial Sequence
  derived and/or modified sequence
atggaaccctggcccctcctgctacttttttcattatgtagcgctgggctggttctgggaagtgagcatgaaacgaggttagtagcgaagctttttaaagactacagctctgtggtgagaccagtcgaagatcatagacaggtcgtcgaggtgacagtggggctccagctcattcagttgattaacgtggatgaggtgaaccaaatcgtgaccaccaatgtacgactgaagcagcagtgggtagactataacctgaaatggaatccagatgactatggcggagttaaaaagattcacatcccctccgagaaaatctggcgccctgaccttgtgctgtataacaatgcggatggcgatttcgccattgttaagtttactaaagtcctgctgcagtacacaggacacatcacatggaccccacccgctatcttcaagtcatactgcgaaatcattgtaacgcactttccattcgacgagcagaattgttctatgaagctgggcacctggacctacgatggatccgtagttgcgattaatcccgaatctgaccagccggatctgtctaatttcatggagtccggggagtgggttatcaaagagtctcgtgggtggaaacatagtgtgacatacagctgttgcccggacacaccttacctggatataacctaccattttgtgatgcagcgactgcccctgtatttcattgtgaacgttatcatcccatgtttgctgttctctttcctgactggtcttgttttttatctgcctactgattccggcgagaagatgacactcagtatttctgtgcttctgagcctcactgtgttccttctcgtgatcgttgagctgatcccttcaacatcatccgctgtgcctctaataggtaaatatatgcttttcacgatggtgttcgtcatcgccagcatcatcattacagtcattgtcattaacacccaccaccggagtccaagtacccatgtaatgcctaattgggtgcgaaaagtgtttatcgatactatccctaatatcatgttttttagcacaatgaaacgcccttctcgggagaaacaggacaaaaagatctttacggaagacatcgatatctctgatatttccggaaaacctggaccgccaccaatgggcttccactccccgcttattaagcatcctgaggttaaatccgctattgaaggcattaagtatattgcagagacaatgaagtcagaccaggaaagtaataatgccgcagcggaatggaagtatgtggccatggtgatggaccacattctgttgggagtgtttatgctggtatgcattatagggactctcgcggtgtttgccggaaggctgatcgagttaaatcagcaggggtag

SEQ ID NO: 1202 - DNA, 1984 bp, Artificial Sequence
  derived and/or modified sequence
agacaagcacccagccagagtgccagtgagaagcacaggccaccactctgccctggtccacacaagctccggtagcccatggagccctggcctctcctcctgctctttagcctttgctcagctggcctcgtcctgggctccgaacatgagacccgtctggtggcaaagctatttaaagactacagcagcgtggtgcggccagtggaagaccaccgccaggtcgtggaggtcaccgtgggcctgcagctgatacagctcatcaatgtggatgaagtaaatcagatcgtgacaaccaatgtgcgtctgaaacagcaatgggtggattacaacctaaaatggaatccagatgactatggcggtgtgaaaaaaattcacattccttcagaaaagatctggcgcccagaccttgttctctataacaatgcagatggtgactttgctattgtcaagttcaccaaagtgctcctgcagtacactggccacatcacgtggacacctccagccatctttaaaagctactgtgagatcatcgtcacccactttccctttgatgaacagaactgcagcatgaagctgggcacctggacctacgacggctctgtcgtggccatcaacccggaaagcgaccagccagacctgagcaacttcatggagagcggggagtgggtgatcaaggagtcccggggctggaagcactccgtgacctattcctgctgccccgacaccccctacctggacatcacctaccacttcgtcatgcagcgcctgcccctctacttcatcgtcaacgtcatcatcccctgcctgctcttctccttcttaactggcctggtattctacctgcccacagactcaggggagaagatgactctgagcatctctgtcttactgtctttgactgtgttccttctggtcatcgtggagctgatcccctccacgtccagtgctgtgcccttgattggaaaatacatgctgttcaccatggtgttcgtcattgcctccatcatcatcactgtcatcgtcatcaacacacaccaccgctcacccagcacccatgtcatgcccaactgggtgcggaaggtttttatcgacactatcccaaatatcatgtttttctccacaatgaaaagaccatccagagaaaagcaagacaaaaagatttttacagaagacattgatatctctgacatttctggaaagccagggcctccacccatgggcttccactctcccctgatcaaacaccccgaggtgaaaagtgccatcgagggcatcaagtacatcgcagagaccatgaagtcagaccaggagtctaacaatgcggcggcagagtggaagtacgttgcaatggtgatggaccacatactcctcggagtcttcatgcttgtttgcatcatcggaaccctagccgtgtttgcaggtcgactcattgaattaaatcagcaaggatgagcagaaaatgagctgagcttagctctgccctggaacctaccagagcagagaagggcaggagaggaagatttgtctacttgctccactcgcacttatcaaacgtgttatattccatacttattattgatgataagatttacctttatgtaagtttatggccttgaagtgttttcatattgcttctccctttagttctgctgtctccctgaagagtgaaccctctttagtaaatgaaactaatcactaaaaaaagtgttcatttccagtgtctggaagagtttttgccaggataaccgaggttttctgttgcattgtcattgctgttatatttatatatttacttattttgtctaaccacgagaccactagggagttgctgatgttctaaatgaagtgtattctttgcttaagagtcagttttgtacctactaagaaaaccccatctaccagtcctaaagagataaggcatttgatttggagagagaggaagcagtagaaatgaaataaactaaaatgcaaactgcatcaaaaa

SEQ ID NO: 1203 - DNA, 1374 bp, Artificial Sequence
  derived and/or modified sequence
atggagccctggcccctgctgctgctgttcagcctgtgcagcgccggcctggtgctgggcagcgagcacgagaccagactggtggccaagctgttcaaggactacagcagcgtggtgagacccgtggaggaccacagacaggtggtggaggtgaccgtgggcctgcagctgatccagctgatcaacgtggacgaggtgaaccagatcgtgaccaccaacgtgagactgaagcagcagtgggtggactacaacctgaagtggaaccccgacgactacggcggcgtgaagaagatccacatccccagcgagaagatctggagacccgacctggtgctgtacaacaacgccgacggcgacttcgccatcgtgaagttcaccaaggtgctgctgcagtacaccggccacatcacctggaccccccccgccatcttcaagagctactgcgagatcatcgtgacccacttccccttcgacgagcagaactgcagcatgaagctgggcacctggacctacgacggcagcgtggtggccatcaaccccgagagcgaccagcccgacctgagcaacttcatggagagcggcgagtgggtgatcaaggagagcagaggctggaagcacagcgtgacctacagctgctgccccgacaccccctacctggacatcacctaccacttcgtgatgcagagactgcccctgtacttcatcgtgaacgtgatcatcccctgcctgctgttcagcttcctgaccggcctggtgttctacctgcccaccgacagcggcgagaagatgaccctgagcatcagcgtgctgctgagcctgaccgtgttcctgctggtgatcgtggagctgatccccagcaccagcagcgccgtgcccctgatcggcaagtacatgctgttcaccatggtgttcgtgatcgccagcatcatcatcaccgtgatcgtgatcaacacccaccacagaagccccagcacccacgtgatgcccaactgggtgagaaaggtgttcatcgacaccatccccaacatcatgttcttcagcaccatgaagagacccagcagagagaagcaggacaagaagatcttcaccgaggacatcgacatcagcgacatcagcggcaagcccggccccccccccatgggcttccacagccccctgatcaagcaccccgaggtgaagagcgccatcgagggcatcaagtacatcgccgagaccatgaagagcgaccaggagagcaacaacgccgccgccgagtggaagtacgtggccatggtgatggaccacatcctgctgggcgtgttcatgctggtgtgcatcatcggcaccctggccgtgttcgccggcagactgatcgagctgaaccagcagggctag

SEQ ID NO: 1204 - protein, 493 aa, Artificial Sequence
  derived and/or modified sequence
MARAPLGVLLLLGLLGRGVGKNEELRLYHHLFNNYDPGSRPVREPEDTVTISLKVTLTNLISLNEKEETLTTSVWIGIDWQDYRLNYSKDDFGGIETLRVPSELVWLPEIVLENNIDGQFGVAYDANVLVYEGGSVTWLPPAIYRSVCAVEVTYFPFDWQNCSLIFRSQTYNAEEVEFTFAVDNDGKTINKIDIDTEAYTENGEWAIDFCPGVIRRHHGGATDGPGETDVIYSLIIRRKPLFYVINIIVPCVLISGLVLLAYFLPAQAGGQKCTVSINVLLAQTVFLFLIAQKIPETSLSVPLLGRFLIFVMVVATLIVMNCVIVLNVSQRTPTTHAMSPRLRHVLLELLPRLLGSPPPPEAPRAASPPRRASSVGLLLRAEELILKKPRSELVFEGQRHRQGTWTAAFCQSLGAAAPEVRCCVDAVNFVAESTRDQEATGEEVSDWVRMGNALDNICFWAALVLFSVGSSLIFLGAYFNRVPDLPYAPCIQP

SEQ ID NO: 1205 - DNA, 1482 bp, Artificial Sequence
  derived and/or modified sequence
atggcccgcgccccgctcggtgttctgctcctgctcgggttgctaggccgcggggtgggaaaaaacgaggagctcagattgtaccaccacctgtttaataactatgacccgggctcccgacctgtccgcgaacctgaagatactgtgaccatttccctgaaagtcacactgactaacttgatctcactgaatgagaaggaagagactctcaccacatccgtgtggattggcatcgactggcaggactaccggctgaattactccaaagacgatttcgggggaattgaaacgctacgggtgccgtccgaactcgtctggttgccagagatcgtgctggaaaacaatattgacggacagtttggagtcgcctacgatgctaacgtcctggtctacgaaggtggatcggttacgtggctgccccctgctatctatagatcagtgtgtgcagtggaggtgacatattttccatttgattggcagaattgctctctcatttttcgctctcagacttataacgctgaggaggtcgagtttactttcgccgttgacaacgatggcaaaactattaataaaatcgatatagatacggaggcctatactgaaaacggagagtgggctatcgatttctgcccgggcgtgatcagaagacaccacgggggtgcgaccgacggtcccggggaaactgatgtgatctattcactaattattcggcggaaaccactgttttatgtgatcaacataatcgttccttgcgtcctgattagtggcttggtgttacttgcctactttttaccagcccaggctgggggacaaaagtgcacagtcagtattaacgtgcttcttgctcagactgtattcctttttttaatcgctcaaaagatccccgaaacgtccctatctgtgcctctgctggggcgcttcctgatatttgttatggtcgtggcaacactgatcgtgatgaactgcgtaattgtgctcaatgtgtcgcagcgcactccaacaactcatgccatgagtcctcgcctcaggcatgtgctgctggagctgctccctagattgctgggctcacccccaccaccagaagccccaagagcagcttctccaccacgtagagcttcttccgtcggtctgctcctcagggctgaagagttgatcctcaagaagcctcggtctgagctcgtgttcgaagggcaaaggcatagacagggtacgtggaccgcagcattctgtcaaagtctgggagctgcggcaccagaagtgaggtgctgcgttgacgccgttaatttcgtggccgagtctacaagagatcaggaggccacgggagaggaggtctcagactgggtacggatggggaatgcgctggataacatttgcttctgggcggcactcgtgctattctcagtgggatcctcactgatctttttaggcgcatatttcaaccgcgttccagatctgccctacgccccttgcatccagccatag

SEQ ID NO: 1206 - DNA, 1482 bp, Artificial Sequence
  derived and/or modified sequence
atggcccgggcccccctgggcgtgctgctgctgctgggcctgctgggccggggcgtgggcaagaatgaggagctgcggctgtaccaccacctgttcaacaactatgaccccggcagcaggcctgtgcgggagcctgaggacacagtgaccatcagcctgaaggtgaccctgaccaacctgatcagcctgaatgagaaggaggagaccctgaccacctctgtgtggattggcatcgactggcaggactaccgcctgaactacagcaaggatgactttggaggcatcgagaccctgcgggtgcccagcgagctggtgtggctgcctgagatcgtgctggagaacaacattgatggccagtttggagtggcctatgatgccaacgtgctggtgtatgaaggaggctctgtgacctggctgcccccagccatctacagatctgtgtgtgctgtggaggtgacctacttcccctttgactggcagaactgcagcctcatcttccgcagccagacctacaatgctgaggaggtggagttcacctttgctgtggacaatgatggcaagaccatcaacaagattgacatcgacacagaggcctacacagaaaatggagagtgggccatcgacttctgccctggggtcatcagaagacaccacggcggggccacagatggccctggagaaacagatgtgatctacagcctcatcatccggaggaagcccctcttctacgtgatcaacatcatcgtgccctgtgtgctgatcagcggcctggtgctgctggcctacttcctgcctgcccaggccggcggccagaagtgcaccgtgtccatcaacgtgctgctggcccagaccgtcttcctgttcctgattgcccagaagatccctgagaccagcctgtctgtgcccctgctgggccgcttcctgatctttgtgatggtggtggccaccctcatcgtgatgaactgtgtgattgtgctgaatgtgtcccagaggacccccaccacccacgccatgagcccccggctgcggcacgtgctgctggagctgctgccccggctgctgggcagccccccacctcctgaggcccccagggctgccagccccccccggcgggccagctctgtgggcctgctgctgcgggcagaggagctgatcctgaagaagcccaggtctgagctggtgtttgagggccagaggcaccggcagggcacctggacagctgccttctgccagagcctgggcgccgccgcccctgaggtgcgctgctgcgtggatgctgtgaactttgtggccgagagcacccgggaccaggaggccaccggggaggaggtgtctgactgggtgaggatgggaaatgccctggacaacatctgcttctgggccgccctggtgctcttctctgtgggcagcagcctcatcttcctgggcgcctacttcaacagagtgcctgacctgccctatgccccctgcatccagccctag

SEQ ID NO: 1207 - DNA, 1482 bp, Artificial Sequence
  derived and/or modified sequence
atggcccgggcccccctgggcgtgctgctgctgctgggcctgctgggccgcggcgttgggaaaaatgaggagctccgcctgtaccaccaccttttcaataattatgatccaggcagccggccagtccgggaacctgaggacacagtcaccatttcactgaaagtgactctgaccaatcttattagcctgaacgagaaagaggaaaccttaactacttcagtctggatcggcattgattggcaggattatcggctgaattattccaaggatgatttcgggggcattgaaacgctccgcgtgccttctgagcttgtctggctccctgaaatcgttcttgagaataatattgacggtcagttcggagtggcttacgatgcgaacgtactggtgtatgagggcggctctgtgacatggttaccgcccgcaatatatcgaagcgtttgcgcagtagaggtgacctatttccctttcgactggcagaattgcagcctgatttttagatcccagacctataatgccgaggaagtggagttcaccttcgcagtcgataatgatggtaagacaattaacaagatcgacatcgataccgaggcttacactgagaacggcgagtgggccatcgacttctgcccaggtgtcattagacgacaccatggaggggcaacagatggcccaggcgagaccgatgtcatttattccctcatcatcaggagaaagcctctcttttacgtgattaacatcattgttccttgtgtactgatctccggcctggtgttgctagcctactttctacccgcccaggccggaggacagaaatgcaccgtgagcatcaacgtccttctggcgcagacagtttttcttttcttgattgcccaaaagataccagaaacaagcttgtcggtgcctctcctggggcgcttcctgatctttgtcatggttgtggctactctgatcgttatgaactgtgtgattgttctcaacgtgtcccagcgcacaccaacaactcatgccatgtctccacgacttcgacacgtcctgctggagctactgccacggttgctgggatctcctcctcctcctgaggcccctcgagccgctagtccaccacgccgcgctagttcggtcgggttgctgctgcgcgcggaagagcttatcctcaagaagcctcggtctgaattagtctttgagggtcaacggcataggcaggggacatggaccgctgctttctgccagagcctgggcgctgctgcccctgaggttagatgttgcgtcgatgccgttaactttgtagcagaatcgacccgcgatcaagaggcaactggagaggaagtctcggactgggttcgcatgggcaacgccctggataacatttgtttctgggctgcactggtcctgttctccgtggggagctctctcattttcctgggcgcttacttcaacagagttcccgacttgccatacgcgccttgtatccaaccgtag

SEQ ID NO: 1208 - DNA, 1482 bp, Artificial Sequence
  derived and/or modified sequence
atggcaagagctcccttgggcgtgctcttacttctgggactcctgggtagaggggttggcaaaaacgaggagctgaggttatatcaccacttatttaataattatgaccctggcagtagacctgtgagggaacctgaagacaccgttaccatctcgctgaaagttacactgaccaatctgatttcgttgaatgaaaaggaagagactctgactactagcgtatggatcggtatcgactggcaggattaccgcttgaattattctaaagacgattttggtggaatcgagaccttaagggtcccctcagagttggtgtggctaccagaaatcgtcttagaaaataatatagacggacagttcggagtggcctacgacgcgaatgtgcttgtctatgaaggaggcagtgtgacctggctgcctccggcaatatacaggtctgtgtgtgccgtagaagtaacttatttccctttcgactggcaaaattgctcactgatcttcaggagccaaacatataatgcggaggaagtggagttcaccttcgctgtggataacgatggaaaaaccataaataagatagacatagacaccgaagcatacaccgagaacggggagtgggctattgacttctgcccaggcgtgatccgcaggcaccatggaggtgcaacggacggccctggagaaaccgatgtgatttattctcttattattaggcgaaagcccctgttttatgttatcaatatcatcgtcccctgtgtgctcatcagtggcttagtacttttggcctactttttgcctgcccaggccggaggccaaaagtgcacagtttccattaacgtgctgctggcccagacagtttttttgtttcttatcgcccagaagattccagaaacatcattatctgtacctttgttagggagatttctgatatttgtcatggtggtggccactctgatcgtaatgaattgcgttattgtgctaaatgtgtctcagagaactccgactactcatgccatgagcccaagattgcgccatgtgctcttggaactcctgccacggctgctcggcagccctccccctcctgaagcacctcgggctgcgagtcctccacgtcgtgcctcctcggtcggtttgttattgcgggctgaggaactgatcttaaagaaacccagatcggaacttgtgttcgaaggacagcggcaccgccaaggaacctggacggcagccttttgccagagcttgggcgcagccgcacctgaggtgcggtgctgcgtggatgccgttaacttcgtggctgaaagtacccgtgatcaagaggctacgggagaagaagtttccgattgggtccgcatggggaacgcgctggacaatatctgtttctgggcggcattggttctgttcagcgtcgggagttcacttatcttcctgggcgcatacttcaatcgcgttcctgatcttccatacgctccctgcatccagccatag

SEQ ID NO: 1209 - DNA, 2455 bp, Artificial Sequence
  derived and/or modified sequence
cacgcagcaggatggcaagggctccgcttggggtcctgctcctcttggggcttctcggcaggggtgtggggaagaacgaggaactgcgtctttatcaccatctcttcaacaactatgacccaggaagccggccagtgcgggagcctgaggatactgtcaccatcagcctcaaggtcaccctgacgaatctcatctcactgaatgaaaaagaggagactctcaccactagcgtctggattggaatcgattggcaggattaccgactcaactacagcaaggacgactttgggggtatagaaaccctgcgagtcccttcagaactcgtgtggctgccagagattgtgctggaaaacaatattgatggccagttcggagtggcctacgacgccaacgtgctcgtctacgagggcggctccgtgacgtggctgcctccggccatctaccgcagcgtctgcgcagtggaggtcacctacttccccttcgattggcagaactgttcgcttattttccgctctcagacgtacaatgccgaagaggtggagttcacttttgccgtagacaacgacggcaagaccatcaacaagatcgacatcgacacagaggcctatactgagaacggcgagtgggccatcgacttctgcccgggggtgatccgccgccaccacggtggcgccaccgacggcccaggggagactgacgtcatctactcgctcatcatccgccggaagccgctcttctacgtcattaacatcatcgtgccctgtgtgctcatctcgggcctggtgctgctcgcctacttcctgccggcgcaggccggcggccagaaatgcacggtctccatcaacgtcctgctcgcccagaccgtcttcttgttcctcattgcccagaaaatcccagagacttctctgagcgtgccgctcctgggcaggttccttattttcgtcatggtggtcgccacgctcattgtcatgaattgcgtcatcgtgctcaacgtgtcccagcggacgcccaccacccacgccatgtccccgcggctgcgccacgttctcctggagctgctgccgcgcctcctgggctccccgccgccgcccgaggccccccgggccgcctcgcccccaaggcgggcgtcgtcggtgggcttattgctccgcgcggaggagctgatactgaaaaagccacggagcgagctcgtgtttgaggggcagaggcaccggcaggggacctggacggctgccttctgccagagcctgggcgccgccgcccccgaggtccgctgctgtgtggatgccgtgaacttcgtggccgagagcacgagagatcaggaggccaccggcgaggaagtgtccgactgggtgcgcatggggaatgcccttgacaacatctgcttctgggccgctctggtgctcttcagcgtgggctccagcctcatcttcctcggggcctacttcaaccgagtgcctgatctcccctacgcgccgtgtatccagccttagctcgcaccgacttcaatttcccacccatctccagtaggaaattgattttgaaaaagtaggctgccgccaccacggcattatgatcccttccccctgctgatcaatctgcagtttgtgaacttcacaagaatggtgtgtgcccgttccctggcgtgtgtaggcctggccgcagtccaggggtcagcaggaggaaagggttcacataggctctcaggtgccagtcttccagaaagcaaggactgcccttcattcagccttgctgacctcccagcctttctaaggctcagccccacgggactctggtggctgccagcttgtgagctatctatctatattcatttcatagccaaacaggagacccctttgcaggacttgcacacagggaggctgtagccaggaaaccctcttcttccctggtctggctctgctggagcgggtgggaaccaaacaccttcagtgctggtggccctcaggcccacaggtttaaggctgaggctgccctgacccttccacagtcatttcttctaggttttcttggcccagcactgcccatcccaccccatgaggctcactcattgcagatcccagcccaccctgcccctttcttccccaccctggaggctctctctgcctagtctacagtactgacagaaagcaaggacatgcggcctgcatggtgggagctggttgaattgtctttattaacaaacaggatatccaaggccactacattgaggaggggtggggggggagggagaagggttacttgctgctcacactatatacagatgcaagcaaggggcgtggagagtgagggctccctgctccctccctccaccggggaagggcatgggctagaagaggagaggggggtcgggaatggggggaatgttttggctggcggggtcccccctccattccctggagtttgggggaaggggaatcattaaagtgctttcaga

SEQ ID NO: 1210 - DNA, 1482 bp, Artificial Sequence
  derived and/or modified sequence
atggccagagcccccctgggcgtgctgctgctgctgggcctgctgggcagaggcgtgggcaagaacgaggagctgagactgtaccaccacctgttcaacaactacgaccccggcagcagacccgtgagagagcccgaggacaccgtgaccatcagcctgaaggtgaccctgaccaacctgatcagcctgaacgagaaggaggagaccctgaccaccagcgtgtggatcggcatcgactggcaggactacagactgaactacagcaaggacgacttcggcggcatcgagaccctgagagtgcccagcgagctggtgtggctgcccgagatcgtgctggagaacaacatcgacggccagttcggcgtggcctacgacgccaacgtgctggtgtacgagggcggcagcgtgacctggctgccccccgccatctacagaagcgtgtgcgccgtggaggtgacctacttccccttcgactggcagaactgcagcctgatcttcagaagccagacctacaacgccgaggaggtggagttcaccttcgccgtggacaacgacggcaagaccatcaacaagatcgacatcgacaccgaggcctacaccgagaacggcgagtgggccatcgacttctgccccggcgtgatcagaagacaccacggcggcgccaccgacggccccggcgagaccgacgtgatctacagcctgatcatcagaagaaagcccctgttctacgtgatcaacatcatcgtgccctgcgtgctgatcagcggcctggtgctgctggcctacttcctgcccgcccaggccggcggccagaagtgcaccgtgagcatcaacgtgctgctggcccagaccgtgttcctgttcctgatcgcccagaagatccccgagaccagcctgagcgtgcccctgctgggcagattcctgatcttcgtgatggtggtggccaccctgatcgtgatgaactgcgtgatcgtgctgaacgtgagccagagaacccccaccacccacgccatgagccccagactgagacacgtgctgctggagctgctgcccagactgctgggcagcccccccccccccgaggcccccagagccgccagcccccccagaagagccagcagcgtgggcctgctgctgagagccgaggagctgatcctgaagaagcccagaagcgagctggtgttcgagggccagagacacagacagggcacctggaccgccgccttctgccagagcctgggcgccgccgcccccgaggtgagatgctgcgtggacgccgtgaacttcgtggccgagagcaccagagaccaggaggccaccggcgaggaggtgagcgactgggtgagaatgggcaacgccctggacaacatctgcttctgggccgccctggtgctgttcagcgtgggcagcagcctgatcttcctgggcgcctacttcaacagagtgcccgacctgccctacgccccctgcatccagccctag

SEQ ID NO: 1211 - protein, 396 aa, Artificial Sequence
  derived and/or modified sequence
MLGFLSARQTGLEDPLRLRRAESTRRVLGLELNKDRDVERIHGGGINTLDIEPVEGRYMLSGGSDGVIVLYDLENSSRQSYYTCKAVCSIGRDHPDVHRYSVETVQWYPHDTGMFTSSSFDKTLKVWDTNTLQTADVFNFEETVYSHHMSPVSTKHCLVAVGTRGPKVQLCDLKSGSCSHILQGHRQEILAVSWSPRYDYILATASADSRVKLWDVRRASGCLITLDQHNGKKSQAVESANTAHNGKVNGLCFTSDGLHLLTVGTDNRMRLWNSSNGENTLVNYGKVCNNSKKGLKFTVSCGCSSEFVFVPYGSTIAVYTVYSGEQITMLKGHYKTVDCCVFQSNFQELYSGSRDCNILAWVPSLYEPVPDDDETTTKSQLNPAFEDAWSSSDEEG

SEQ ID NO: 1212 - protein, 338 aa, Artificial Sequence
  derived and/or modified sequence
MLSGGSDGVIVLYDLENSSRQSYYTCKAVCSIGRDHPDVHRYSVETVQWYPHDTGMFTSSSFDKTLKVWDTNTLQTADVFNFEETVYSHHMSPVSTKHCLVAVGTRGPKVQLCDLKSGSCSHILQGHRQEILAVSWSPRYDYILATASADSRVKLWDVRRASGCLITLDQHNGKKSQAVESANTAHNGKVNGLCFTSDGLHLLTVGTDNRMRLWNSSNGENTLVNYGKVCNNSKKGLKFTVSCGCSSEFVFVPYGSTIAVYTVYSGEQITMLKGHYKTVDCCVFQSNFQELYSGSRDCNILAWVPSLYEPVPDDDETTTKSQLNPAFEDAWSSSDEEG

SEQ ID NO: 1213 - protein, 395 aa, Artificial Sequence
  derived and/or modified sequence
MATSSAPAGVRTRYAGVFVRTPNGFGGPSSPSESRVNTESFGTGINTLDIEPVEGRYMLSGGSDGVIVLYDLENSSRQSYYTCKAVCSIGRDHPDVHRYSVETVQWYPHDTGMFTSSSFDKTLKVWDTNTLQTADVFNFEETVYSHHMSPVSTKHCLVAVGTRGPKVQLCDLKSGSCSHILQGHRQEILAVSWSPRYDYILATASADSRVKLWDVRRASGCLITLDQHNGKKSQAVESANTAHNGKVNGLCFTSDGLHLLTVGTDNRMRLWNSSNGENTLVNYGKVCNNSKKGLKFTVSCGCSSEFVFVPYGSTIAVYTVYSGEQITMLKGHYKTVDCCVFQSNFQELYSGSRDCNILAWVPSLYEPVPDDDETTTKSQLNPAFEDAWSSSDEEG

SEQ ID NO: 1214 - DNA, 1191 bp, Artificial Sequence
  derived and/or modified sequence
atgctgggcttcctgagcgccagacagaccggcctggaggaccccctgagactgagaagagccgagagcaccagaagagtgctgggcctggagctgaacaaggacagagacgtggagagaatccacggcggcggcatcaacaccctggacatcgagcccgtggagggcagatacatgctgagcggcggcagcgacggcgtgatcgtgctgtacgacctggagaacagcagcagacagagctactacacctgcaaggccgtgtgcagcatcggcagagaccaccccgacgtgcacagatacagcgtggagaccgtgcagtggtacccccacgacaccggcatgttcaccagcagcagcttcgacaagaccctgaaggtgtgggacaccaacaccctgcagaccgccgacgtgttcaacttcgaggagaccgtgtacagccaccacatgagccccgtgagcaccaagcactgcctggtggccgtgggcaccagaggccccaaggtgcagctgtgcgacctgaagagcggcagctgcagccacatcctgcagggccacagacaggagatcctggccgtgagctggagccccagatacgactacatcctggccaccgccagcgccgacagcagagtgaagctgtgggacgtgagaagagccagcggctgcctgatcaccctggaccagcacaacggcaagaagagccaggccgtggagagcgccaacaccgcccacaacggcaaggtgaacggcctgtgcttcaccagcgacggcctgcacctgctgaccgtgggcaccgacaacagaatgagactgtggaacagcagcaacggcgagaacaccctggtgaactacggcaaggtgtgcaacaacagcaagaagggcctgaagttcaccgtgagctgcggctgcagcagcgagttcgtgttcgtgccctacggcagcaccatcgccgtgtacaccgtgtacagcggcgagcagatcaccatgctgaagggccactacaagaccgtggactgctgcgtgttccagagcaacttccaggagctgtacagcggcagcagagactgcaacatcctggcctgggtgcccagcctgtacgagcccgtgcccgacgacgacgagaccaccaccaagagccagctgaaccccgccttcgaggacgcctggagcagcagcgacgaggagggctag

SEQ ID NO: 1215 - DNA, 1188 bp, Artificial Sequence
  derived and/or modified sequence
atggccaccagcagcgcccccgccggcgtgagaaccagatacgccggcgtgttcgtgagaacccccaacggcttcggcggccccagcagccccagcgagagcagagtgaacaccgagagcttcggcaccggcatcaacaccctggacatcgagcccgtggagggcagatacatgctgagcggcggcagcgacggcgtgatcgtgctgtacgacctggagaacagcagcagacagagctactacacctgcaaggccgtgtgcagcatcggcagagaccaccccgacgtgcacagatacagcgtggagaccgtgcagtggtacccccacgacaccggcatgttcaccagcagcagcttcgacaagaccctgaaggtgtgggacaccaacaccctgcagaccgccgacgtgttcaacttcgaggagaccgtgtacagccaccacatgagccccgtgagcaccaagcactgcctggtggccgtgggcaccagaggccccaaggtgcagctgtgcgacctgaagagcggcagctgcagccacatcctgcagggccacagacaggagatcctggccgtgagctggagccccagatacgactacatcctggccaccgccagcgccgacagcagagtgaagctgtgggacgtgagaagagccagcggctgcctgatcaccctggaccagcacaacggcaagaagagccaggccgtggagagcgccaacaccgcccacaacggcaaggtgaacggcctgtgcttcaccagcgacggcctgcacctgctgaccgtgggcaccgacaacagaatgagactgtggaacagcagcaacggcgagaacaccctggtgaactacggcaaggtgtgcaacaacagcaagaagggcctgaagttcaccgtgagctgcggctgcagcagcgagttcgtgttcgtgccctacggcagcaccatcgccgtgtacaccgtgtacagcggcgagcagatcaccatgctgaagggccactacaagaccgtggactgctgcgtgttccagagcaacttccaggagctgtacagcggcagcagagactgcaacatcctggcctgggtgcccagcctgtacgagcccgtgcccgacgacgacgagaccaccaccaagagccagctgaaccccgccttcgaggacgcctggagcagcagcgacgaggagggctag

SEQ ID NO: 1216 - DNA, 1191 bp, Artificial Sequence
  derived and/or modified sequence
atgctgggcttccttagcgcccgtcaaacaggtctggaagaccccttgaggttgcggagggctgagtccacacggagggtgctgggactggagttaaataaagaccgggacgtggagagaattcatggaggcgggatcaacacactcgacatcgaaccagtggaaggtcgttatatgcttagtggagggtcggatggagttattgtgctttatgatctggagaattcctctaggcagtcttactatacttgtaaggccgtgtgcagtatagggcgtgaccacccagacgtccaccggtactctgtggaaaccgttcagtggtaccctcacgacaccggcatgttcacatcctcatccttcgataagaccctcaaggtgtgggacaccaacactctacagacagctgatgtcttcaacttcgaggaaacggtgtacagtcatcatatgagccccgtctctaccaagcattgtctcgtcgcggttggcactcgtgggcctaaagttcaactgtgcgatcttaagtctgggtcctgtagccatattctacaaggacaccggcaggagatcttggccgtgtcctggagtcctcggtatgactatatattagccaccgcttctgccgactctagggtaaagctctgggatgtgaggagagccagtgggtgcttaattactctggatcagcacaacggcaagaaaagccaagcagtggagagcgccaacactgcccacaatggcaaagttaacggcctgtgtttcacctcagatggtctgcatctgctcaccgtgggcaccgacaaccggatgcgcctgtggaattccagcaacggtgaaaatactctcgtgaactacggcaaagtatgtaataactctaagaaagggcttaagtttactgtgtcctgcgggtgctctagcgaatttgtatttgtgccctacggctctacaattgctgtctacactgtttattccggggagcaaataacaatgttgaagggccactataaaaccgtggactgttgtgttttccaaagtaactttcaggaactgtactcgggctcacgcgattgtaacattttggcatgggtgccatctctctatgagcccgtgccggacgatgacgaaacaactaccaagtcccagctgaacccagctttcgaagacgcatggtcttcatccgatgaggaggggtag

SEQ ID NO: 1217 - DNA, 1188 bp, Artificial Sequence
  derived and/or modified sequence
atggccacgtcgtctgcgcccgctggagtaagaaccaggtatgctggggtctttgtgcggacaccaaatgggtttggaggcccttcttctcccagtgaatctcgcgtgaataccgaatcctttgggacaggcatcaatacattagacatcgagccagtggaaggacggtacatgctcagtggaggctctgacggcgtgatagtgttatatgatttagagaacagttcaagacaaagctactatacgtgtaaggccgtatgcagcatcggaagggatcaccccgacgtccatcgctattcagtggagaccgtacagtggtatcctcacgataccgggatgtttacttccagctcctttgacaagacgctgaaggtgtgggacactaacacactgcagactgccgatgtcttcaactttgaagaaacagtgtatagccatcacatgtctccagtctctacaaaacattgccttgtcgccgtcggaacccgcggccccaaagtgcagttgtgcgatctgaaatctggttcttgctcccacatcctgcagggccatcggcaagaaatcctggcagttagctggtccccacggtatgactacattcttgctaccgcgtccgccgacagcagagtgaagttatgggacgtccgtagagcctctgggtgtttgattaccctggatcagcacaatggcaagaaatcccaggccgtggaatcagccaacacagcccacaacggaaaagtcaacggactgtgcttcacaagcgacggactacacctgctcacagttggcaccgacaacagaatgcgcctatggaacagttccaatggagagaatacactagtaaactatgggaaggtgtgcaacaattccaagaaaggcctgaaatttaccgtttcctgcggctgttcttcagagtttgtgtttgtaccttacggatccaccatagctgtgtacactgtctattcgggcgagcagatcacaatgctcaagggccattataaaacagtcgactgctgtgtgttccagtccaatttccaggagctgtatagtggatcccgagattgcaacatcctggcctgggtgccatcgctttacgagcctgtacctgacgatgacgagacaactacaaagtctcagttgaaccctgctttcgaggatgcttggtcctccagcgatgaggaaggatag

SEQ ID NO: 1218 - DNA, 2017 bp, Artificial Sequence
  derived and/or modified sequence
gtcatggcgacgtccagtgctccagccggtgtgaggacacgatatgctggggtttttgtccgcacgccaaacgggtttggaggaccctcttcgccttcggagagcagagtcaacacggagagttttgggactggaattaaataaagacagagatgttgaaagaatccacggcggtggaattaacacccttgacattgaacctgttgaagggagatacatgttatcaggtggttcagatggtgtgattgtactttatgaccttgagaactccagcagacaatcttattacacatgtaaagcagtgtgttccattggcagagatcatcctgatgttcacagatacagtgtggagactgtacagtggtatcctcatgacactggcatgttcacatcaagctcatttgataaaactctgaaagtatgggatacaaatacattacaaactgcagatgtatttaattttgaggaaacagtttatagtcatcatatgtctccagtctccaccaagcactgtttggtagcagttggtactagaggacccaaagtacaactttgtgacttgaagtctggatcctgttctcacattctacagggtcacagacaagaaatattagcagtttcctggtctccacgttatgactatatcttggcaacagcaagtgctgacagtagagtaaaattatgggatgtgagaagagcatcaggatgtttgattactcttgatcaacataatgggaaaaagtcacaagctgttgaatcagcaaacactgctcataatgggaaagttaatggcttatgttttacaagtgatggacttcacctcctcactgttggtacagataatcgaatgaggctctggaatagttccaatggagaaaacacacttgtgaactatggaaaagtttgtaataacagtaaaaaaggattgaaattcactgtctcctgtggctgcagttcagaatttgtttttgtaccatatggtagcaccattgctgtttatacagtttactcaggagaacagataactatgcttaagggacattataaaactgttgactgctgtgtatttcagtcaaatttccaggaactttatagtggtagcagagactgcaacattctggcttgggttccatccttatatgaaccagttcctgatgatgatgagactacaacaaaatcacaattaaatccggcctttgaagatgcctggagcagcagtgatgaagaaggatgaatatcatctttagtacctttttgtctctgctgaaactttttaaatgagactgtgtttttttcaactgtatggtctattcctgacagctaaattagccctaaatgtgggtaatatttttcctcatgttttaaaatgaggttaatatttgcataaaatcctaaaacagacttctgtatagtttatttagtcaaaatgtgttccttgatcccagatgttgtggcctgggaaagccctcattgctacagtacaagtaacacaagtcgttgtacctcagttgtgaccttcagcagattttatgaactataagatgcagtctcagaggatcagcaagtggaggccatcagtattgactttctcttacttgctgtactatcagcctgctcgtttccacctttaagaatgattttgccaagaatgattatatcaaaaatagtagttgaaatggtaacatcaaaattattttattctttcttcttcatgtattcacatttttcagtggtttcatttaattaaccatgctttatgttaaacattttggggctcaatgtctcctactatccaaaatgtgcatcacaggaggcttttaactttgtgaaaatcccatgtttgctttattttattttaatgtcagaaggcagtttgcgctaatgcttgaactctttttctgtgaaactcattaaggtatgaccaaatcctgcctcattaattcaagcagaaaatatcctggcagggaatctggcttaaacatgaaatgctgtaataaaatttctatgttattgtctc

SEQ ID NO: 1219 - DNA, 1414 bp, Artificial Sequence
  derived and/or modified sequence
gtcatggcgacgtccagtgctccagccggtgtgaggacacgatatgctggggtttttgtccgcacgccaaacgggtttggaggaccctcttcgccttcggagagcagagtcaacacggagagttttgggactggaattaacacccttgacattgaacctgttgaagggagatacatgttatcaggtggttcagatggtgtgattgtactttatgaccttgagaactccagcagacaatcttattacacatgtaaagcagtgtgttccattggcagagatcatcctgatgttcacagatacagtgtggagactgtacagtggtatcctcatgacactggcatgttcacatcaagctcatttgataaaactctgaaagtatgggatacaaatacattacaaactgcagatgtatttaattttgaggaaacagtttatagtcatcatatgtctccagtctccaccaagcactgtttggtagcagttggtactagaggacccaaagtacaactttgtgacttgaagtctggatcctgttctcacattctacagggtcacagacaagaaatattagcagtttcctggtctccacgttatgactatatcttggcaacagcaagtgctgacagtagagtaaaattatgggatgtgagaagagcatcaggatgtttgattactcttgatcaacataatgggaaaaagtcacaagctgttgaatcagcaaacactgctcataatgggaaagttaatggcttatgttttacaagtgatggacttcacctcctcactgttggtacagataatcgaatgaggctctggaatagttccaatggagaaaacacacttgtgaactatggaaaagtttgtaataacagtaaaaaaggattgaaattcactgtctcctgtggctgcagttcagaatttgtttttgtaccatatggtagcaccattgctgtttatacagtttactcaggagaacagataactatgcttaagggacattataaaactgttgactgctgtgtatttcagtcaaatttccaggaactttatagtggtagcagagactgcaacattctggcttgggttccatccttatatgaaccagttcctgatgatgatgagactacaacaaaatcacaattaaatccggcctttgaagatgcctggagcagcagtgatgaagaaggatgaatatcatctttagtacctttttgtctctgctgaaactttttaaatgagactgtgtttttttcaactgtatggtctattcctgacagctaaattagccctaaatgtgggtaatatttttcctcatgttttaaaatgaggttaatatttgcataaaatcctaaaacagacttctgtatagtttatttagtcaaaatgtgttccttgatcccagatgttgtggcct

SEQ ID NO: 1220 - DNA, 1554 bp, Artificial Sequence
  derived and/or modified sequence
gagctctgtcatggcgacgtccagtgctccagccggtgtgaggacacgatatgctggggtttttgtccgcacgccaaacgggtttggaggaccctcttcgccttcggagagcagagtcaacacggagagttttgggactggaattaaataaagacagagatgttgaaagaatccacggcggtggaattaacacccttgacattgaacctgttgaagggagatacatgttatcaggtggttcagatggtgtgattgtactttatgaccttgagaactccagcagacaatcttattacacatgtaaagcagtgtgttccattggcagagatcatcctgatgttcacagatacagtgtggagactgtacagtggtatcctcatgacactggcatgttcacatcaagctcatttgataaaactctgaaagtatgggatacaaatacattacaattggtactagaggacccaaagtacaactttgtgacttgaagtctggatcctgttctcacattctacagggtcacagacaagaaatattagcagtttcctggtctccacgttatgactatatcttggcaacagcaagtgctgacagtagagtaaaattatgggatgtgagaagagcatcaggatgtttgattactcttgatcaacataatgggaaaaagtcacaagctgttgaatcagcaaacactgctcataatgggaaagttaatggcttatgttttacaagtgatggacttcacctcctcactgttggtacagataatcgaatgaggctctggaatagttccaatggagaaaacacacttgtgaactatggaaaagtttgtaataacagtaaaaaaggattgaaattcactgtctcctgtggctgcagttcagaatttgtttttgtaccatatggtagcaccattgctgtttatacagtttactcaggagaacagataactatgcttaagggacattataaaactgttgactgctgtgtatttcagtcaaatttccaggaactttatagtggtagcagagactgcaacattctggcttgggttccatccttatatgaaccagttcctgatgatgatgagactacaacaaaatcacaattaaatccggcctttgaagatgcctggagcagcagtgatgaagaaggatgaatatcatctttagtacctttttgtctctgctgaaactttttaaatgagactgtgtttttttcaactgtatggtctattcctgacagctaaattagccctaaatgtgggtaatatttttcctcatgttttaaaatgaggttaatatttgcataaaatcctaaaacagacttctgtatagtttatttagtcaaaatgtgttccttgatcccagatgttgtggcctgggaaagccctcattgctacagtacaagtaacacaagtcgttgtacctcagttgtgaccttcagcagattttatgaactataagatgcagtctcagaggatcagcaagtggaggccatcagtattgactttctcttacttgctgtactatcagcctgctcgtttccaccttt

SEQ ID NO: 1221 - DNA, 1191 bp, Artificial Sequence
  derived and/or modified sequence
atgctgggcttcctgagcgcccggcagacaggcctggaggaccccctgcggctgcggcgggcagagagcaccaggagagtgctgggcctggagctgaacaaggacagagatgtggagcgcatccacggcggcggcatcaacaccctggacatcgagcctgtggagggccgctacatgctgagcggcggcagtgatggagtcatcgtgctgtatgacctggagaacagcagccggcagagctactacacctgcaaggctgtgtgcagcatcggccgggaccacccagatgtgcaccgctacagcgtggagaccgtgcagtggtacccccatgacaccggcatgttcaccagcagcagctttgacaagaccctgaaggtgtgggacaccaacaccctgcagacagcagatgtgttcaactttgaggagaccgtgtacagccaccacatgagccctgtgtccaccaagcactgcctggtggccgtgggcacccggggccccaaggtgcagctgtgtgacctgaagagcggcagctgcagccacatcctgcagggccaccggcaggagatcctggccgtgtcctggagccccaggtatgactacatcctggccacagccagcgctgacagccgggtgaagctgtgggatgtgagaagagccagcggctgcctgatcaccctggaccagcacaacgggaagaagagccaggccgtggagagcgccaacacagcccacaacgggaaggtgaatggcctgtgcttcaccagtgatggcctgcacctgctgactgtgggcacagacaacaggatgaggctgtggaacagcagcaatggagagaacaccctggtgaactacggcaaggtgtgcaacaacagcaagaagggcctgaagttcaccgtgtcctgtggctgcagcagcgagtttgtgtttgtgccctacggcagcaccatcgctgtgtacacagtgtacagcggggagcagatcaccatgctgaagggccactacaagacagtggactgctgcgtgttccagagcaacttccaggagctgtacagcggcagccgggactgcaacatcctggcctgggtgcccagcctgtatgagcctgtgcctgatgatgatgagaccaccaccaagagccagctgaacccagcctttgaagatgcctggagcagcagtgatgaggagggctag

SEQ ID NO: 1222 - DNA, 1188 bp, Artificial Sequence
  derived and/or modified sequence
atggccaccagcagcgccccagctggggtgaggaccaggtatgctggggtgtttgtgaggaccccaaatggatttggaggccccagcagccccagcgagagccgggtgaacacagagagctttggaacaggcatcaacaccctggacatcgagcctgtggagggccgctacatgctgagcggcggcagtgatggagtgattgtgctgtatgacctggagaacagcagccggcagagctactacacctgcaaggctgtgtgcagcatcggccgggaccacccagatgtgcaccgctacagcgtggagaccgtgcagtggtacccccatgacaccggcatgttcaccagcagcagctttgacaagaccctgaaggtgtgggacaccaacaccctgcagacagcagatgtgttcaactttgaggagaccgtgtacagccaccacatgagccctgtgtccaccaagcactgcctggtggccgtgggcacccggggccccaaggtgcagctgtgtgacctgaagagcggcagctgcagccacatcctgcagggccaccggcaggagatcctggccgtgtcctggagccccaggtatgactacatcctggccacagccagcgctgacagccgggtgaagctgtgggatgtgcggcgggccagcggctgcctgatcaccctggaccagcacaacgggaagaagagccaggccgtggagagcgccaacacagcccacaacgggaaggtgaatggcctgtgcttcaccagtgatggcctgcacctgctgactgtgggcacagacaacaggatgaggctgtggaacagcagcaatggagagaacaccctggtgaactacggcaaggtgtgcaacaacagcaagaagggcctgaagttcaccgtgtcctgtggctgcagcagcgagtttgtgtttgtgccctacggcagcaccatcgctgtgtacacagtgtacagcggggagcagatcaccatgctgaagggccactacaagacagtggactgctgcgtgttccagagcaacttccaggagctgtacagcggcagccgggactgcaacatcctggcctgggtgcccagcctgtatgagcctgtgcctgatgatgatgagaccaccaccaagagccagctgaacccagcctttgaagatgcctggagcagcagtgatgaggagggctag

SEQ ID NO: 1223 - DNA, 1191 bp, Artificial Sequence
  derived and/or modified sequence
atgctgggcttcctgagcgcccggcagaccggcctggaggaccccctgcgtctgcggcgagcagaaagtacccgcagggttctgggtttggaacttaataaggatagagacgtggagcggatacatgggggcggaatcaacactcttgatatcgagcccgttgaaggaaggtacatgctctccggagggtccgatggagtaatcgtgctctacgatctggagaattctagtagacagtcatattatacatgcaaagccgtgtgtagtattggaagggatcacccagatgtgcatagatattctgttgagaccgtccagtggtacccacatgatactggcatgttcaccagctcctcatttgataaaacactcaaagtttgggacacaaataccctgcagacagccgacgtgttcaacttcgaagaaactgtctatagtcatcatatgagtcctgttagcacaaaacactgcctcgtcgccgtcgggactcggggtccaaaagttcagctctgtgatctcaagtctggttcgtgtagccatattctacagggtcatagacaggaaattctcgctgtgagctggagtccaagatatgattacattttggcaactgcgagcgccgactcccgtgtgaagttgtgggacgtgaggagagcatcagggtgtctaattacactggaccaacacaacggtaaaaagtcccaggctgttgagtcagccaacactgcacacaacggcaaggtcaacggtctgtgctttacaagcgatggactccatcttttgacggtggggacggacaatcgtatgcggctgtggaattcttcgaacggtgagaacaccctggtaaactatggcaaagtatgtaataattctaagaaaggactcaagttcacggtgagttgcggatgtagttctgaattcgtttttgtgccatacggtagcaccatcgccgtgtatacagtttacagtggagaacagatcacgatgctcaagggtcactataagaccgtcgattgttgtgtttttcagtccaactttcaggaactatacagcggcagtagagactgcaacatccttgcctgggtaccgtctttgtatgagcctgttcccgacgatgatgagacaacaactaagtcccaactgaacccagccttcgaagacgcctggtcctcttccgatgaggaaggctag

SEQ ID NO: 1224 - DNA, 1188 bp, Artificial Sequence
  derived and/or modified sequence
atggccaccagcagcgcccccgccggcgtgcggacccggtacgccggcgtctttgtgaggacaccaaatggcttcggaggccccagttcaccctctgagtctcgggtaaacaccgaaagtttcggaacaggtattaacactctggacatcgagcctgtggagggacggtacatgctaagcgggggttccgatggcgtgatcgtgctctacgacctggagaacagttcacgtcaatcttactacacttgcaaagcggtctgttccataggacgagatcatcctgacgtccatcggtactcagtggagactgtgcagtggtacccacacgacactggcatgtttacgagctcctcatttgacaaaaccctcaaggtatgggataccaacacactgcaaaccgctgatgtgttcaacttcgaagagacagtgtactctcatcatatgagtcctgtttccaccaaacattgtctcgtcgccgtaggaaccagagggccgaaagttcagctgtgtgacttgaaatctggatcctgcagccatatcctgcagggccatagacaggagatcctggcagtcagctggtcaccaagatacgactatatcctggctactgcgtccgcagattcacgggtcaagctgtgggatgttagaagggcctccggatgcctgatcacattggatcaacacaatggaaaaaagtcacaggcagtggaaagcgccaataccgctcataatgggaaggtgaatggcctctgttttactagcgatggactgcaccttttaacagtgggtactgacaatcgcatgagactgtggaattctagcaacggtgaaaacacacttgtcaactacgggaaagtgtgcaacaactcaaagaaaggactgaaatttactgtctcctgtgggtgcagctccgaattcgtcttcgtgccctacggctcgacaattgcagtgtacaccgtgtattcaggtgagcagattactatgctaaaaggacattacaaaaccgtggattgctgcgtgttccaatccaacttccaggagctgtactccggaagccgtgactgtaatatcttagcatgggtcccgtcgttgtacgaacccgtccctgacgatgatgagactaccaccaaatcccagctaaatcccgcatttgaggatgcgtggtcctcatccgacgaagagggttag

SEQ ID NO: 1225 - DNA, 1191 bp, Artificial Sequence
  derived and/or modified sequence
atgctcggtttcctgtcggcgagacagacaggcttagaggaccctttaagactgaggcgcgctgaaagcacaaggagagtcttggggctggagctgaataaggatagagatgtggaacggatccacggcggaggaattaataccctggacatcgaacccgttgaaggtcgttatatgttgtcgggaggatcggatggtgttattgtcctgtacgaccttgagaacagctcccgccaatcatattatacctgtaaagcagtatgctctattggacgtgaccacccagacgtgcatcgttatagcgttgagactgtacagtggtacccccacgacacaggaatgttcacatccagcagcttcgacaaaaccctgaaagtttgggataccaacacactccagacagccgacgtttttaattttgaggagacagtgtatagccaccatatgtcacctgtctctacaaaacactgtctggtggcagtgggtacacggggaccgaaagtacagctctgcgatctaaaatccgggtcctgtagccatatattacaggggcatagacaggagatcttagccgtgtcctggtcccctcgatacgactacatcctggcaacagcctccgccgactcaagagtcaagctatgggacgttaggcgcgcaagtggctgcctgatcactctggaccagcacaatggcaaaaagtctcaggctgtcgagtcggccaataccgctcataatggtaaagtgaacggtctttgttttactagtgatgggctccacttgttaacagtgggtacagataaccgcatgcggttgtggaacagtagtaacggtgagaatactctggtgaattatggaaaggtatgtaataattccaaaaagggcctgaagtttactgtcagttgcggatgctcttcagaattcgtatttgtgccttacgggtcgacaatagccgtgtatacagtctattcgggggagcagattactatgctgaaaggccattataaaactgtggattgttgtgtgttccagtcaaatttccaggagctttacagcggctctcgcgattgtaatatcctcgcttgggtccccagcttgtacgaaccggtgccggatgacgacgaaaccactaccaaatcacagcttaatcctgcatttgaggacgcctggtccagctccgacgaagagggatag

SEQ ID NO: 1226 - DNA, 1188 bp, Artificial Sequence
  derived and/or modified sequence
atggcgacgagctcggcccctgcaggcgtccgaacaagatacgccggtgtgtttgtgcgtacacctaacgggttcggagggccttcttctccttcagagagcagggtgaatactgaatcattcggaactggcattaacaccctcgatatcgagccagtagagggcagatacatgttatccgggggatcagacggcgtcatagtgctgtacgatctcgaaaattcaagccgccaaagctattacacgtgcaaagcagtctgctcaataggcagggatcatccggacgtccaccgctactcagtggaaacagtgcaatggtatccacacgacacgggaatgtttactagtagctcttttgataaaaccctgaaagtgtgggacaccaataccctgcaaaccgccgatgtttttaactttgaggagactgtctacagtcatcatatgtctcctgtgtcaactaagcactgtctggtggcagttgggacacggggtcccaaggtgcagttgtgcgacctgaagtcaggctcctgtagtcacattctgcagggccataggcaggaaattctggcagtgagctggagtcccaggtacgattacatcctggccaccgcatccgccgacagcagagtcaagctctgggatgtccggagagcatccgggtgcttgataaccctggatcagcacaatggcaaaaagagccaagcggtcgagtccgctaatacggcccataacggtaaagtaaacggactgtgcttcaccagcgacggcctgcacctcctcacagtcggaaccgacaatcgcatgcggctgtggaacagcagtaatggagaaaacaccctggttaactatggtaaggtgtgcaataatagcaaaaagggactgaaatttacagtgagctgtggttgctcctccgaattcgtgtttgtcccttatggttcaactatcgctgtgtataccgtgtacagtggcgaacagatcacgatgcttaaaggccactataaaacggtcgactgttgtgtgttccagtctaactttcaggagctgtacagtggaagcagggattgcaatatcctggcgtgggtgccctctctttacgagccggtgccggatgacgacgaaactacaacaaagtcccaacttaatccagccttcgaggacgcctggtccagttcagacgaggaggggtag

SEQ ID NO: 1227 - protein, 988 aa, Artificial Sequence
  derived and/or modified sequence
MEQSRSQQRGGEQSWWGSDPQYQYMPFEHCTSYGLPSENGGLQHRLRKDAGPRHNVHPTQIYGHHKEQFSDREQDIGMPKKTGSSSTVDSKDEDHYSKCQDCIHRLGQVVRRKLGEDGIFLVLLGLLMALVSWSMDYVSAKSLQAYKWSYAQMQPSLPLQFLVWVTFPLVLILFSALFCHLISPQAVGSGIPEMKTILRGVVLKEYLTMKAFVAKVVALTAGLGSGIPVGKEGPFVHIASICAAVLSKFMSVFCGVYEQPYYYSDILTVGCAVGVGCCFGTPLGGVLFSIEVTSTYFAVRNYWRGFFAATFSAFVFRVLAVWNKDAVTITALFRTNFRMDFPFDLKELPAFAAIGICCGLLGAVFVYLHRQVMLGVRKHKALSQFLAKHRLLYPGIVTFVIASFTFPPGMGQFMAGELMPREAISTLFDNNTWVKHAGDPESLGQSAVWIHPRVNVVIIIFLFFVMKFWMSIVATTMPIPCGGFMPVFVLGAAFGRLVGEIMAMLFPDGILFDDIIYKILPGGYAVIGAAALTGAVSHTVSTAVICFELTGQIAHILPMMVAVILANMVAQSLQPSLYDSIIQVKKLPYLPDLGWNQLSKYTIFVEDIMVRDVKFVSASYTYGELRTLLQTTTVKTLPLVDSKDSMILLGSVERSELQALLQRHLCPERRLRAAQEMARKLSELPYDGKARLAGEGLPGAPPGRPESFAFVDEDEDEDLSGKSELPPSLALHPSTTAPLSPEEPNGPLPGHKQQPEAPEPAGQRPSIFQSLLHCLLGRARPTKKKTTQDSTDLVDNMSPEEIEAWEQEQLSQPVCFDSCCIDQSPFQLVEQTTLHKTHTLFSLLGLHLAYVTSMGKLRGVLALEELQKAIEGHTKSGVQLRPPLASFRNTTSTRKSTGAPPSSAENWNLPEDRPGATGTGDVIAASPETPVPSPSPEPPLSLAPGKVEGELEELELVESPGLEEELADILQGPSLRSTDEEDEDELIL

SEQ ID NO: 1228 - DNA, 2967 bp, Artificial Sequence
  derived and/or modified sequence
atggaacagtcccgctcccagcaacgcggcggcgaacagtcatggtggggatcagatccgcagtaccagtacatgccttttgaacattgtaccagttatggcctgccaagcgaaaatggtggattacaacatagattacgaaaagacgcggggccccggcacaacgtacatcccactcagatttacggccaccacaaagagcaattttctgatagagagcaggatattggcatgcctaaaaaaacgggcagttcaagcactgtggactctaaggacgaagaccactacagcaaatgtcaggactgcatccatagactggggcaggttgtgcggcgcaagctgggagaagacgggatatttctggtgctgctaggcttgctgatggccttggtttcttggtccatggattacgtgagtgctaagtccttacaggcatacaaatggtcatatgcccagatgcaaccttcattaccactgcagtttctggtgtgggtgacatttcccctggtactgatacttttcagtgcattgttctgtcacctcattagcccccaggccgtgggcagcggcattcccgagatgaagacgatcctgagaggagtcgtcttgaaggagtacttaactatgaaagccttcgtggctaaggtggtggccctgactgccggattgggttctggcattcccgtcggcaaggagggccctttcgtccatattgcctctatatgtgccgcggtgctttctaaattcatgagcgtattctgcggggtttacgagcagccttattattattctgatattctgaccgtaggatgtgccgtcggggtcggctgttgtttcggcacacctctgggtggagtcctgttctcaattgaagtaacatctacatatttcgccgtcagaaattattggaggggttttttcgccgcgacgttttccgcattcgtctttcgtgtcctggccgtgtggaacaaggatgcagtgacgatcaccgcactgttccgaacaaatttcagaatggacttccctttcgacctgaaggaactgcccgcctttgctgccattggaatatgctgtggtcttctgggggcagttttcgtgtacctgcaccgccaagtcatgctcggagtgaggaagcacaaagctttgtcacaattcctggccaagcacagactgctgtaccctggcatagtcacctttgtgatcgcaagctttacttttccgccaggaatgggacagttcatggccggtgaactaatgccaagagaggctatctctacactgttcgataacaatacctgggtgaagcatgccggtgacccggagtcccttggccaaagcgccgtttggatccacccaagagttaacgtagtgatcattattttcctcttcttcgtgatgaagttctggatgtcaatcgtggccaccactatgccaattccatgtggcggatttatgccagttttcgttcttggtgccgcatttggccgcctggtaggagagatcatggctatgctgtttccagacgggatcctgtttgacgatataatatacaaaatcctcccgggcgggtatgccgtgatcggcgccgctgcactgactggcgcggtatcacatacagttagcacagcggttatttgcttcgagctgactggtcagatcgctcatattctgcccatgatggtggcggttatactggctaatatggtcgcacagtcccttcaaccatcactttatgacagcataatccaggtgaagaagctgccatacctgccagatctcggatggaatcagctgagcaaatataccatttttgtcgaggacattatggtccgcgacgtgaaattcgtgtccgctagttatacatacggagaattacggactttgctgcagaccacaaccgttaagacactgccgctggtggattctaaagatagcatgatactcctcggatcagtcgagagatctgaactccaggccctcctgcagcggcatctgtgtcctgaacggaggctgagagctgcccaagagatggcaagaaaactctcagagttaccttacgacggtaaggctagactcgcaggcgaagggctgccgggcgctcccccagggaggcctgagagtttcgcatttgtggatgaggatgaggatgaagatctgtcaggaaagtctgagttaccaccttctctggccctgcatccttcaacgaccgcgcctcttagccctgaggagcctaatggccctctgcccggtcacaagcagcagcctgaggctccagaaccagcgggtcaacgtcccagtatcttccagtccctcctgcattgtctcctaggccgggcccggcccactaagaagaaaactactcaagattccaccgatttggtagataatatgagccccgaggagatcgaggcctgggagcaggagcagcttagtcagccagtgtgctttgacagctgctgtattgatcagtcccctttccaattggttgaacagaccacactgcacaaaacccatactctcttcagtttattgggtctacatcttgcttacgtgacaagcatggggaaattgaggggggtcctggctctcgaggaactgcagaaggctatcgagggccacactaaatccggcgttcaactgcgacccccgctggcctcgttccggaatacaacttccaccaggaagtcgaccggggcaccgcccagtagtgccgaaaactggaaccttcctgaggaccgcccaggcgcgactggaacaggcgacgtgatcgctgcaagtcccgagaccccagtcccttcaccctcacccgagccacctctgtcattagcccccggcaaggtcgaaggagagctggaggaactcgagctggtggagagtcctgggctggaagaagaactggcggacattctgcagggaccgtcactccgtagcactgatgaagaagacgaggacgagctgattctctag

SEQ ID NO: 1229 - DNA, 2967 bp, Artificial Sequence
  derived and/or modified sequence
atggagcagagccgcagccagcagaggggcggggagcagagctggtggggcagtgacccccagtaccagtacatgccctttgagcactgcaccagctatggcctgcccagtgaaaatggaggcctgcagcaccggctgaggaaggatgctggccccaggcacaacgtgcaccccacccagatctacggccaccacaaggagcagttcagtgaccgggagcaggacatcggcatgcccaagaagacaggcagcagcagcacagtggacagcaaggatgaggaccactacagcaagtgccaggactgcatccaccggctgggccaggtggtgcggaggaagctgggggaggatggcatcttcctggtgctgctgggcctgctgatggccctggtgtcctggagcatggactatgtgtctgccaagagcctgcaggcctacaagtggagctatgcccagatgcagcccagcctgcccctgcagttcctggtgtgggtgaccttccccctggtgctgatcctcttcagcgccctcttctgccacctgatcagcccccaggccgtgggcagcggcatccctgagatgaagaccatcctgcggggcgtggtgctgaaggagtacctgaccatgaaggcctttgtggccaaggtggtggccctgacagctggcctgggcagcggcatccctgtgggcaaggagggcccctttgtgcacatcgccagcatctgtgccgctgtgctgagcaagttcatgtctgtgttctgtggggtgtatgagcagccctactactacagcgacatcctgactgtgggctgtgctgtgggcgtgggctgctgcttcggcacccccctgggcggcgtgctcttcagcattgaggtgaccagcacctactttgctgtgaggaactactggaggggcttctttgctgccaccttcagcgcctttgtgttccgggtgctggccgtgtggaacaaggatgctgtgaccatcacagccctcttccgcaccaacttcaggatggacttcccctttgacctgaaggagctgcctgcctttgctgccatcggcatctgctgcggcctgctgggcgctgtgtttgtgtacctgcaccggcaggtgatgctgggcgtgaggaagcacaaggccctgagccagttcctggccaagcaccggctgctgtacccaggcatcgtgacctttgtgattgccagcttcaccttccccccaggcatgggccagttcatggccggggagctgatgccccgggaggccatcagcaccctgtttgacaacaacacctgggtgaagcatgctggggaccctgagagcctgggccagagcgctgtgtggatccacccccgggtgaatgtggtgatcatcatcttcctgttctttgtgatgaagttctggatgagcatcgtggccaccaccatgcccatcccctgtggcggcttcatgcctgtgtttgtgctgggcgccgccttcggccgcctggtgggggagatcatggccatgctgttcccagatggcatcctgtttgatgacatcatctacaagatcctgcccggcggctatgctgtgattggagctgctgccctgactggagctgtgagccacacagtgtccacagctgtgatctgctttgagctgaccggccagatcgcccacatcctgcccatgatggtggccgtcatcctggccaacatggtggcccagagcctgcagcccagcctgtatgacagcatcatccaggtgaagaagctgccctacctgcctgacctgggctggaaccagctgagcaagtacaccatctttgtggaggacatcatggtgagagatgtgaagtttgtgtctgccagctacacctacggggagctgcggaccctgctgcagaccaccaccgtgaagaccctgcccctggtggacagcaaggacagcatgatcctgctgggctctgtggagaggtctgagctgcaggccctgctgcagaggcacctgtgcccagagcggcggctgcgggccgcccaggagatggccaggaagctgtctgagctgccctatgatggcaaggcccggctggccggggagggcctgcccggggcccctcctggccggcctgagagctttgcctttgtggatgaagatgaagatgaggacctgagcggcaagtctgagctgccccccagcctggccctgcaccccagcaccacagcccccctgagccctgaggagcccaacggccccctgcccggccacaagcagcagcctgaggcccctgagcctgctggccagaggcccagcatcttccagagcctgctgcactgcctgctgggccgggcccggcccaccaagaagaagaccacccaggacagcacagacctggtggacaacatgagccctgaggagattgaggcctgggagcaggagcagctgagccagcctgtgtgctttgacagctgctgcatcgaccagagccccttccagctggtggagcagaccaccctgcacaagacccacaccctcttcagcctgctgggcctgcacctggcctacgtgacctccatgggcaagctgcggggcgtgctggccctggaggagctgcagaaggccatcgagggccacaccaagagcggcgtgcagctgcggccccccctggccagcttcaggaacaccaccagcaccaggaagagcactggagccccacccagcagcgctgagaactggaacctgcctgaagatagacctggggccactggaactggagatgtgattgctgccagccctgagacccctgtgcccagccccagccctgagccccccctgagcctggcccctgggaaggtggagggggagctggaggagctggagctggtggagagccctggcctggaggaggagctggccgacatcctgcagggccccagcctgcggagcacagatgaagaagatgaagatgagctgatcctgtag

SEQ ID NO: 1230 - DNA, 2967 bp, Artificial Sequence
  derived and/or modified sequence
atggagcagagccggagccagcagcggggcggcgagcagagctggtggggctccgatccccaatatcagtatatgcctttcgaacactgcactagttatggtttaccgtccgagaatggagggctacagcataggcttcgcaaggatgccggtccccggcataacgttcacccaacacagatctatggtcaccacaaagagcaattcagtgaccgcgaacaggatatcggcatgcccaagaagacgggttccagtagtacagttgacagcaaagatgaggatcattattcaaagtgtcaggattgcatccatcgcttgggtcaagtggtgcggcgcaaattgggagaggacggcatattcctagttctcctcggcctgctaatggctctggtttcctggagcatggactacgttagcgcaaagtctctccaggcctacaaatggtcatatgcacagatgcagccaagcctgcctctgcagttccttgtttgggtgacgtttccgctagttcttatactgttttcagctctgttttgtcacctgattagtccacaggctgtgggctccggcatccctgaaatgaagactatcctgaggggggtggttctcaaggagtacctgaccatgaaagcgtttgtcgccaaggtggtggccttaaccgcaggactaggaagcggaatccccgtgggcaaggaaggcccatttgtgcatatcgcatctatctgtgccgctgtccttagtaaattcatgtcagttttttgcggcgtgtacgaacagccgtattactattccgatatcttaacggtgggatgtgctgtcggcgtgggatgctgctttgggacgcctctcggaggggtgctgtttagtatcgaggtgaccagtacgtacttcgcagtgaggaactattggcgcgggttcttcgcagcaacattttccgccttcgtatttagagtgttggcggtctggaacaaggatgccgtgactataactgcattgtttagaactaattttcgcatggacttcccgttcgacttgaaggaactgcctgcattcgccgcaatcggaatttgctgcgggcttctgggagccgtctttgtatatcttcatagacaggtgatgctcggcgtcagaaaacataaggccctgagccaattcctagccaaacaccgattgctctaccccggaatcgtcacctttgtcatcgcctcatttacgtttccccccggcatgggccagttcatggccggcgagttgatgccaagggaagctatctcaaccctttttgacaataatacatgggtcaagcacgccggtgaccccgaatccctgggtcagagcgccgtgtggatccacccccgggtgaacgtcgttatcatcatcttcctgttcttcgtgatgaaattctggatgtctatcgtcgcaacaactatgcccattccatgtggcgggtttatgccagtgtttgtcctgggggcggcttttgggcggctggtgggggaaatcatggccatgctgttcccagatggaattctgtttgatgacatcatttacaagatcctgccaggaggttacgcagtcattggcgccgctgctcttacaggagctgtgagccataccgtctcaactgcagtaatatgctttgaactgaccggtcagattgcccatattttgccaatgatggtggcggtgatcctggccaatatggtagcccaatctctgcagccctcgctctacgatagcatcatccaggtgaaaaaactgccgtatctgcctgacctggggtggaatcagctgagcaaatataccattttcgttgaggacatcatggtgcgagatgtcaaatttgtaagtgcttcatacacctacggggagttgaggacgttgctgcaaacgaccacagttaagaccctgcccttggtagatagcaaggattcaatgatcctactgggcagtgtggagagatccgaactgcaggctcttctccagaggcatctgtgccccgagcgtaggctgcgggccgcacaggagatggcaagaaagctgtccgagctaccctacgatggcaaggcccggctggctggggagggtctgccaggcgctccacccgggcggcctgagagctttgcatttgtcgacgaagacgaagatgaggacctgagcggcaagtccgaactcccaccgagtctggccttgcaccccagtacaacagcccccctgtcccctgaggagcccaatggtcccctgcctggacacaaacagcagccagaagccccagagccagctgggcagagacctagtatttttcagtcactcttgcactgtctgctgggaagggctcggcctaccaagaagaagacaactcaggactccacggatcttgtcgacaacatgtccccagaggagatagaagcatgggaacaggagcagctttcccaacctgtgtgctttgattcttgctgcatcgatcagagcccatttcaattggtggagcagaccacactgcacaagactcatactcttttctcactgctgggtttacacctagcctacgtaacctctatgggaaagctgcgcggtgtcctggcactggaggagctgcagaaggctatcgagggtcacacgaaatctggcgttcaactgcggccacccttagcctcgttccgtaacacaaccagcacacgtaagagtaccggcgcacctcccagttccgccgagaattggaatttaccagaggataggcccggggcgacaggtactggcgacgtgatcgctgcaagccccgagacgccagtgccatcaccaagtcctgaaccacctctgtctcttgctccaggaaaagttgagggggagctggaagaacttgaactggtggagtctcccggcctcgaggaagagctagccgacattttgcagggaccgtcccttcgatctactgacgaagaagacgaagatgagctgatcctgtag

SEQ ID NO: 1231 - DNA, 2967 bp, Artificial Sequence
  derived and/or modified sequence
atggagcagtctagaagccagcagaggggcggagagcagtcatggtgggggagcgatcctcagtaccagtatatgccattcgaacattgcacatcttacggactgccatcggagaacggaggcctgcagcacagattgagaaaagatgcgggaccacgacacaatgtgcatcctactcagatttacgggcaccataaggagcagttcagcgaccgcgagcaagatatcggcatgcctaaaaagacagggtctagttccaccgttgactcaaaggacgaggaccattactctaaatgccaggactgtattcatagactgggccaggtggtgcggcgtaaactgggggaggacggcatttttctggtgttgctcggcctattgatggccctggtttcgtggtcgatggattatgtgtctgctaagtctctgcaggcttataagtggagttacgctcagatgcagccgagcctgccgctccagttcctcgtgtgggtgacattcccccttgttctcatacttttttcagccctattttgccatctgatatctccccaggcagtgggatccggtatcccagagatgaaaaccatactccggggagtggtactcaaggagtacctaactatgaaagcatttgtagctaaagtggtggcgctgacagcaggcctcggctcaggcattccagtgggaaaagaggggcctttcgtgcatattgctagcatctgtgccgcagtgctgtccaagttcatgtccgtcttttgtggtgtttatgagcaaccatactactattccgacattcttacagtcggatgcgccgtcggggtcgggtgctgctttgggacaccgctcggaggcgtacttttctctattgaagtgacttctacttatttcgcagtgaggaattactggcgcggattcttcgccgctaccttttccgcctttgtgttccgcgttctagcagtatggaacaaggatgccgtaaccatcaccgcgctgtttaggactaatttcagaatggactttccttttgacttaaaggagctgccagccttcgccgcaatcggaatatgctgtggcttactgggggcagtgtttgtgtatttacacagacaggtaatgttgggcgtccggaagcataaggcattgagccagtttctggctaaacataggctgctctaccctggtattgtgacatttgtcatcgccagttttaccttcccacccggtatggggcagttcatggcaggcgaacttatgccaagagaagccatcagtacccttttcgacaacaacacgtgggttaaacacgccggtgaccccgagtcccttggccagtcagccgtgtggatccatccacgagtgaatgtggtgataattatctttctattttttgtgatgaagttctggatgtccatagtcgcaacgacaatgcctatcccatgcggaggatttatgccggtatttgtcttgggcgctgcttttgggcgtcttgttggcgagattatggcaatgctgttcccggatggcatcctctttgacgacattatctacaaaattttgcccggtggctacgcagtcatcggagcagccgcactgacgggtgccgtctctcatacagtctccactgcagtgatctgctttgaattaactggccagatcgcccatattttgcctatgatggtagctgttatcttggctaacatggtggcccagtctcttcagcccagcctctatgattcaattatacaagtgaaaaaactcccttaccttccggatttaggctggaaccagctctcaaagtacacaatttttgtggaggatatcatggtacgagacgtgaagtttgtgtcagcttcatacacttatggagaattgcgcaccctgctccagactaccacagtgaagacgcttcctttggtggatagcaaggacagtatgatactgctaggatcggtggagcgttctgaactacaggccctgcttcagaggcatctgtgcccagaacgaaggcttagggcggcacaggagatggcaagaaagctaagtgagctgccgtacgacggaaaggctaggctggccggagaaggacttcctggcgctccacccggtcgccctgagagcttcgccttcgtggacgaagacgaggatgaagatctgtctggcaaaagcgagttgcccccaagccttgccctgcatccatctacaactgccccactgagccccgaagaacctaacggccctctgcctgggcacaaacagcagccagaggcaccggagccagcaggccagcgcccaagcatttttcagagtcttctgcattgcttgctcggcagggcgagaccaactaaaaaaaaaactacacaagatagtacagacctcgtcgacaatatgagccctgaggagatcgaagcctgggaacaggaacaacttagccagcctgtgtgtttcgactcctgctgcatcgatcagagcccctttcagctggtcgaacagactacgctgcataagacacacacgctgtttagcctccttggtctgcaccttgcatacgtgacatctatgggcaagctgcgcggagtccttgccttagaggaattgcagaaagccatcgaggggcacacaaagtcaggagtccagcttcgaccgccattggcatcctttaggaatacaacaagcacaagaaagtctactggggctccacctagctccgccgagaattggaacttaccagaagacagacccggtgcaaccggaaccggagatgttatcgccgctagtcctgagacaccagttccaagtccctcacccgagccacctttaagtcttgctcctggcaaggtagaaggcgagctcgaagagctggagctggttgagtcaccaggactggaagaagagttagccgacattctgcaaggtccaagtctgagaagtactgatgaggaggacgaagacgagctgatcctgtag

SEQ ID NO: 1232 - DNA, 3172 bp, Artificial Sequence
  derived and/or modified sequence
agcaagagcagaggcttaaggagctacactgggggaaggacaggggcaagcaggccaaggcctggccggggctcggggggagggaatatggagcaatcccggtcacagcagcgtgggggtgaacaaagctggtggggtagtgacccccagtaccagtatatgccctttgaacactgcaccagctacggactgccctctgagaatgggggcctccagcacaggctccggaaggatgcaggcccccgccacaacgtccaccccacacagatttatggccatcacaaagaacaattctcagacagggagcaggacatagggatgcccaagaagacaggctccagttctaccgtggacagcaaggatgaggatcactattctaaatgtcaagattgtatccaccgcctgggacaggtggtgagaagaaaattaggggaagacgggatctttctggtgcttctgggactgctgatggctctggtcagctggagcatggactacgtcagtgccaaaagccttcaggcctacaagtggtcctacgcgcagatgcagcccagccttcctctgcagttcctggtctgggtcaccttcccactagtcctcatcctcttcagcgccctcttctgccacctcatctctccccaggctgttggctctggaatccccgaaatgaagacaatacttcgtggggttgtcctgaaggaatacctcacaatgaaagcctttgtggccaaggttgtcgccctgactgcgggcctgggcagtggcatccccgtggggaaagagggccccttcgtccacattgccagcatctgtgctgctgtcctcagcaaattcatgtctgtgttctgcggggtatatgagcagccatactactactctgatatcctgacggtgggctgtgctgtgggagtcggctgttgttttgggacaccacttggaggagtgctatttagcatcgaggtcacctccacctactttgctgttcggaactactggagaggattctttgcagccacgttcagcgcctttgtgtttcgagtgctggcagtgtggaacaaggatgctgtcaccatcactgctctgttcagaaccaatttccgaatggatttcccctttgacctgaaggaactaccagcttttgctgccatcgggatttgctgtgggctcctgggagctgtatttgtgtatctgcatcgccaagtcatgctcggtgtccgaaagcacaaggccctcagccagtttcttgctaagcaccgcctgctgtatcctggaattgttacctttgtcattgcctcattcaccttcccaccaggaatgggtcaattcatggctggagagttgatgccccgcgaagccatcagtactttgtttgacaacaatacatgggtgaaacacgcgggtgatcctgagagcctgggccagtcagctgtgtggattcacccccgggtcaacgttgtcatcatcatctttctcttcttcgtcatgaagttctggatgtccatcgtggccaccactatgcccataccctgcggaggcttcatgcctgtgtttgtgctaggagctgcatttggaaggctggtaggagaaatcatggccatgctctttcctgatggtattttgtttgatgacatcatctacaagatcctacctgggggctatgcagtaattggagcagcagcgctgactggtgccgtttcccacacagtctccacagctgtgatttgcttcgaattaacgggtcagattgctcacatcctgcccatgatggtggctgttatcttggccaacatggtggcccagagcctgcagccctctctctatgacagcatcatccaggtcaagaagctaccctacttgcctgaccttggctggaaccagctcagcaaatataccatctttgttgaggacatcatggtacgtgatgtgaagtttgtttcagcttcttacacatatggggagttgcgaaccctgctccagaccaccacagtcaagactttaccactggttgactcaaaagattcaatgatcctgctgggctcggtggagcggtcggaactgcaggccctcctgcagcgccacctgtgtcctgagcgcaggctgcgcgcagcccaagagatggcgcggaagttgtcggagctgccttacgacgggaaggcgcggctggctggggaggggctccccggcgcgcctccaggccggcccgagtccttcgcctttgtggatgaggatgaggacgaagacctctctggcaagagcgagcttcctccttcccttgctctccacccctctactactgcccctctgtccccagaagagcccaatgggcctctgcctggccacaaacagcagccggaagcaccagagcctgcaggtcaaagaccctccatcttccagtccctgcttcactgcttgctgggcagagctcgccccacaaagaagaaaacaacccaggattccacagatttagtggataacatgtcacctgaagagattgaggcctgggagcaggagcagctgagccagcctgtctgttttgattcctgctgtattgaccagtctcccttccagctggtggagcagacaaccctgcacaagactcataccctgttttcactccttggcctccacctcgcttacgtgaccagcatggggaagctcaggggcgtcctggccctggaggagctacagaaggccattgaggggcacaccaagtctggggtgcagctccgccctccccttgccagcttccggaacacgacttcaactcgaaagagtaccggggcacctccatcttctgcagagaactggaacctgcctgaggacaggcctggggccactggaacaggggatgtgattgctgcctccccagagacccctgtgccatctccttccccagagccccctctctccctggccccaggcaaggtagagggcgagttggaggagctggagctggtggagagtccagggctggaagaggagctggccgacatcttgcagggccccagcctgcgatccacagacgaggaggatgaggatgaactgatcctttgaccccctcccacgacctcctcataaagaccgtggagaggcccagcctgagggtgaacttgtgtggggcagggtgcgtcctgaatgtggcgaggtcatgccaatgtcgtggcctcttcca

SEQ ID NO: 1233 - DNA, 2967 bp, Artificial Sequence
  derived and/or modified sequence
atggagcagagcagaagccagcagagaggcggcgagcagagctggtggggcagcgacccccagtaccagtacatgcccttcgagcactgcaccagctacggcctgcccagcgagaacggcggcctgcagcacagactgagaaaggacgccggccccagacacaacgtgcaccccacccagatctacggccaccacaaggagcagttcagcgacagagagcaggacatcggcatgcccaagaagaccggcagcagcagcaccgtggacagcaaggacgaggaccactacagcaagtgccaggactgcatccacagactgggccaggtggtgagaagaaagctgggcgaggacggcatcttcctggtgctgctgggcctgctgatggccctggtgagctggagcatggactacgtgagcgccaagagcctgcaggcctacaagtggagctacgcccagatgcagcccagcctgcccctgcagttcctggtgtgggtgaccttccccctggtgctgatcctgttcagcgccctgttctgccacctgatcagcccccaggccgtgggcagcggcatccccgagatgaagaccatcctgagaggcgtggtgctgaaggagtacctgaccatgaaggccttcgtggccaaggtggtggccctgaccgccggcctgggcagcggcatccccgtgggcaaggagggccccttcgtgcacatcgccagcatctgcgccgccgtgctgagcaagttcatgagcgtgttctgcggcgtgtacgagcagccctactactacagcgacatcctgaccgtgggctgcgccgtgggcgtgggctgctgcttcggcacccccctgggcggcgtgctgttcagcatcgaggtgaccagcacctacttcgccgtgagaaactactggagaggcttcttcgccgccaccttcagcgccttcgtgttcagagtgctggccgtgtggaacaaggacgccgtgaccatcaccgccctgttcagaaccaacttcagaatggacttccccttcgacctgaaggagctgcccgccttcgccgccatcggcatctgctgcggcctgctgggcgccgtgttcgtgtacctgcacagacaggtgatgctgggcgtgagaaagcacaaggccctgagccagttcctggccaagcacagactgctgtaccccggcatcgtgaccttcgtgatcgccagcttcaccttcccccccggcatgggccagttcatggccggcgagctgatgcccagagaggccatcagcaccctgttcgacaacaacacctgggtgaagcacgccggcgaccccgagagcctgggccagagcgccgtgtggatccaccccagagtgaacgtggtgatcatcatcttcctgttcttcgtgatgaagttctggatgagcatcgtggccaccaccatgcccatcccctgcggcggcttcatgcccgtgttcgtgctgggcgccgccttcggcagactggtgggcgagatcatggccatgctgttccccgacggcatcctgttcgacgacatcatctacaagatcctgcccggcggctacgccgtgatcggcgccgccgccctgaccggcgccgtgagccacaccgtgagcaccgccgtgatctgcttcgagctgaccggccagatcgcccacatcctgcccatgatggtggccgtgatcctggccaacatggtggcccagagcctgcagcccagcctgtacgacagcatcatccaggtgaagaagctgccctacctgcccgacctgggctggaaccagctgagcaagtacaccatcttcgtggaggacatcatggtgagagacgtgaagttcgtgagcgccagctacacctacggcgagctgagaaccctgctgcagaccaccaccgtgaagaccctgcccctggtggacagcaaggacagcatgatcctgctgggcagcgtggagagaagcgagctgcaggccctgctgcagagacacctgtgccccgagagaagactgagagccgcccaggagatggccagaaagctgagcgagctgccctacgacggcaaggccagactggccggcgagggcctgcccggcgccccccccggcagacccgagagcttcgccttcgtggacgaggacgaggacgaggacctgagcggcaagagcgagctgccccccagcctggccctgcaccccagcaccaccgcccccctgagccccgaggagcccaacggccccctgcccggccacaagcagcagcccgaggcccccgagcccgccggccagagacccagcatcttccagagcctgctgcactgcctgctgggcagagccagacccaccaagaagaagaccacccaggacagcaccgacctggtggacaacatgagccccgaggagatcgaggcctgggagcaggagcagctgagccagcccgtgtgcttcgacagctgctgcatcgaccagagccccttccagctggtggagcagaccaccctgcacaagacccacaccctgttcagcctgctgggcctgcacctggcctacgtgaccagcatgggcaagctgagaggcgtgctggccctggaggagctgcagaaggccatcgagggccacaccaagagcggcgtgcagctgagaccccccctggccagcttcagaaacaccaccagcaccagaaagagcaccggcgccccccccagcagcgccgagaactggaacctgcccgaggacagacccggcgccaccggcaccggcgacgtgatcgccgccagccccgagacccccgtgcccagccccagccccgagccccccctgagcctggcccccggcaaggtggagggcgagctggaggagctggagctggtggagagccccggcctggaggaggagctggccgacatcctgcagggccccagcctgagaagcaccgacgaggaggacgaggacgagctgatcctgtag

SEQ ID NO: 1234 - protein, 438 aa, Artificial Sequence
  derived and/or modified sequence
MGGCAGSRRRFSDSEGEETVPEPRLPLLDHQGAHWKNAVGFWLLGLCNNFSYVVMLSAAHDILSHKRTSGNQSHVDPGPTPIPHNSSSRFDCNSVSTAAVLLADILPTLVIKLLAPLGLHLLPYSPRVLVSGICAAGSFVLVAFSHSVGTSLCGVVFASISSGLGEVTFLSLTAFYPRAVISWWSSGTGGAGLLGALSYLGLTQAGLSPQQTLLSMLGIPALLLASYFLLLTSPEAQDPGGEEEAESAARQPLIRTEAPESKPGSSSSLSLRERWTVFKGLLWYIVPLVVVYFAEYFINQGLFELLFFWNTSLSHAQQYRWYQMLYQAGVFASRSSLRCCRIRFTWALALLQCLNLVFLLADVWFGFLPSIYLVFLIILYEGLLGGAAYVNTFHNIALETSDEHREFAMAATCISDTLGISLSGLLALPLHDFLCQLS

SEQ ID NO: 1235 - protein, 421 aa, Artificial Sequence
  derived and/or modified sequence
MGGCAGSRRRFSDSEGEETVPEPRLPLLDHQGAHWKNAVGFWLLGLCNNFSYVVMLSAAHDILSHKRTSGNQSHVDPGPTPIPHNSSSRFDCNSVSTAAVLLADILPTLVIKLLAPLGLHLLPYSPRVLVSGICAAGSFVLVAFSHSVGTSLCGVVFASISSGLGEVTFLSLTAFYPRAVISWWSSGTGGAGLLGALSYLGLTQAGLSPQQTLLSMLGIPALLLASYFLLLTSPEAQDPGGEEEAESAARQPLIRTEAPESKPGSSSSLSLRERWTVFKVRMMAGFELLFFWNTSLSHAQQYRWYQMLYQAGVFASRSSLRCCRIRFTWALALLQCLNLVFLLADVWFGFLPSIYLVFLIILYEGLLGGAAYVNTFHNIALETSDEHREFAMAATCISDTLGISLSGLLALPLHDFLCQLS

SEQ ID NO: 1236 - protein, 390 aa, Artificial Sequence
  derived and/or modified sequence
MGGCAGSRRRFSDSEGEETVPEPRLPLLDHQGAHWKNAVGFWLLGLCNNFSYVVMLSAAHDILSHKRTSGNQSHVDPGPTPIPHNSSSRFDCNSVSTAAVLLADILPTLVIKLLAPLGLHLLPYSPRVLVSGICAAGSFVLVAFSHSVGTSLCGVVFASISSGLGEVTFLSLTAFYPSYFLLLTSPEAQDPGGEEEAESAARQPLIRTEAPESKPGSSSSLSLRERWTVFKGLLWYIVPLVVVYFAEYFINQGLFELLFFWNTSLSHAQQYRWYQMLYQAGVFASRSSLRCCRIRFTWALALLQCLNLVFLLADVWFGFLPSIYLVFLIILYEGLLGGAAYVNTFHNIALETSDEHREFAMAATCISDTLGISLSGLLALPLHDFLCQLS

SEQ ID NO: 1237 - protein, 253 aa, Artificial Sequence
  derived and/or modified sequence
MGGCAGSRRRFSDSEGEETVPEPRLPLLDHQGAHWKNAVGFWLLGLCNNFSYVVMLSAAHDILSHKRTSGNQSHVDPGPTPIPHNSSSRFDCNSVSTAAVLLADILPTLVIKLLAPLGLHLLPYSPRVLVSGICAAGSFVLVAFSHSVGTSLCGSSSSLSLRERWTVFKGLLWYIVPLVVVYFAEYFINQGLFELLFFWNTSLSHAQQYRWYQMLYQAGVFASRSSLRCCRIRFTWALALLQMESRSVAQAGM

SEQ ID NO: 1238 - DNA, 1317 bp, Artificial Sequence
  derived and/or modified sequence
atgggcggctgcgccggcagcagaagaagattcagcgacagcgagggcgaggagaccgtgcccgagcccagactgcccctgctggaccaccagggcgcccactggaagaacgccgtgggcttctggctgctgggcctgtgcaacaacttcagctacgtggtgatgctgagcgccgcccacgacatcctgagccacaagagaaccagcggcaaccagagccacgtggaccccggccccacccccatcccccacaacagcagcagcagattcgactgcaacagcgtgagcaccgccgccgtgctgctggccgacatcctgcccaccctggtgatcaagctgctggcccccctgggcctgcacctgctgccctacagccccagagtgctggtgagcggcatctgcgccgccggcagcttcgtgctggtggccttcagccacagcgtgggcaccagcctgtgcggcgtggtgttcgccagcatcagcagcggcctgggcgaggtgaccttcctgagcctgaccgccttctaccccagagccgtgatcagctggtggagcagcggcaccggcggcgccggcctgctgggcgccctgagctacctgggcctgacccaggccggcctgagcccccagcagaccctgctgagcatgctgggcatccccgccctgctgctggccagctacttcctgctgctgaccagccccgaggcccaggaccccggcggcgaggaggaggccgagagcgccgccagacagcccctgatcagaaccgaggcccccgagagcaagcccggcagcagcagcagcctgagcctgagagagagatggaccgtgttcaagggcctgctgtggtacatcgtgcccctggtggtggtgtacttcgccgagtacttcatcaaccagggcctgttcgagctgctgttcttctggaacaccagcctgagccacgcccagcagtacagatggtaccagatgctgtaccaggccggcgtgttcgccagcagaagcagcctgagatgctgcagaatcagattcacctgggccctggccctgctgcagtgcctgaacctggtgttcctgctggccgacgtgtggttcggcttcctgcccagcatctacctggtgttcctgatcatcctgtacgagggcctgctgggcggcgccgcctacgtgaacaccttccacaacatcgccctggagaccagcgacgagcacagagagttcgccatggccgccacctgcatcagcgacaccctgggcatcagcctgagcggcctgctggccctgcccctgcacgacttcctgtgccagctgagctag

SEQ ID NO: 1239 - DNA, 1266 bp, Artificial Sequence
  derived and/or modified sequence
atgggcggctgcgccggcagcagaagaagattcagcgacagcgagggcgaggagaccgtgcccgagcccagactgcccctgctggaccaccagggcgcccactggaagaacgccgtgggcttctggctgctgggcctgtgcaacaacttcagctacgtggtgatgctgagcgccgcccacgacatcctgagccacaagagaaccagcggcaaccagagccacgtggaccccggccccacccccatcccccacaacagcagcagcagattcgactgcaacagcgtgagcaccgccgccgtgctgctggccgacatcctgcccaccctggtgatcaagctgctggcccccctgggcctgcacctgctgccctacagccccagagtgctggtgagcggcatctgcgccgccggcagcttcgtgctggtggccttcagccacagcgtgggcaccagcctgtgcggcgtggtgttcgccagcatcagcagcggcctgggcgaggtgaccttcctgagcctgaccgccttctaccccagagccgtgatcagctggtggagcagcggcaccggcggcgccggcctgctgggcgccctgagctacctgggcctgacccaggccggcctgagcccccagcagaccctgctgagcatgctgggcatccccgccctgctgctggccagctacttcctgctgctgaccagccccgaggcccaggaccccggcggcgaggaggaggccgagagcgccgccagacagcccctgatcagaaccgaggcccccgagagcaagcccggcagcagcagcagcctgagcctgagagagagatggaccgtgttcaaggtgagaatgatggccggcttcgagctgctgttcttctggaacaccagcctgagccacgcccagcagtacagatggtaccagatgctgtaccaggccggcgtgttcgccagcagaagcagcctgagatgctgcagaatcagattcacctgggccctggccctgctgcagtgcctgaacctggtgttcctgctggccgacgtgtggttcggcttcctgcccagcatctacctggtgttcctgatcatcctgtacgagggcctgctgggcggcgccgcctacgtgaacaccttccacaacatcgccctggagaccagcgacgagcacagagagttcgccatggccgccacctgcatcagcgacaccctgggcatcagcctgagcggcctgctggccctgcccctgcacgacttcctgtgccagctgagctag

SEQ ID NO: 1240 - DNA, 1173 bp, Artificial Sequence
  derived and/or modified sequence
atgggcggctgcgccggcagcagaagaagattcagcgacagcgagggcgaggagaccgtgcccgagcccagactgcccctgctggaccaccagggcgcccactggaagaacgccgtgggcttctggctgctgggcctgtgcaacaacttcagctacgtggtgatgctgagcgccgcccacgacatcctgagccacaagagaaccagcggcaaccagagccacgtggaccccggccccacccccatcccccacaacagcagcagcagattcgactgcaacagcgtgagcaccgccgccgtgctgctggccgacatcctgcccaccctggtgatcaagctgctggcccccctgggcctgcacctgctgccctacagccccagagtgctggtgagcggcatctgcgccgccggcagcttcgtgctggtggccttcagccacagcgtgggcaccagcctgtgcggcgtggtgttcgccagcatcagcagcggcctgggcgaggtgaccttcctgagcctgaccgccttctaccccagctacttcctgctgctgaccagccccgaggcccaggaccccggcggcgaggaggaggccgagagcgccgccagacagcccctgatcagaaccgaggcccccgagagcaagcccggcagcagcagcagcctgagcctgagagagagatggaccgtgttcaagggcctgctgtggtacatcgtgcccctggtggtggtgtacttcgccgagtacttcatcaaccagggcctgttcgagctgctgttcttctggaacaccagcctgagccacgcccagcagtacagatggtaccagatgctgtaccaggccggcgtgttcgccagcagaagcagcctgagatgctgcagaatcagattcacctgggccctggccctgctgcagtgcctgaacctggtgttcctgctggccgacgtgtggttcggcttcctgcccagcatctacctggtgttcctgatcatcctgtacgagggcctgctgggcggcgccgcctacgtgaacaccttccacaacatcgccctggagaccagcgacgagcacagagagttcgccatggccgccacctgcatcagcgacaccctgggcatcagcctgagcggcctgctggccctgcccctgcacgacttcctgtgccagctgagctag

SEQ ID NO: 1241 - DNA, 762 bp, Artificial Sequence
  derived and/or modified sequence
atgggcggctgcgccggcagcagaagaagattcagcgacagcgagggcgaggagaccgtgcccgagcccagactgcccctgctggaccaccagggcgcccactggaagaacgccgtgggcttctggctgctgggcctgtgcaacaacttcagctacgtggtgatgctgagcgccgcccacgacatcctgagccacaagagaaccagcggcaaccagagccacgtggaccccggccccacccccatcccccacaacagcagcagcagattcgactgcaacagcgtgagcaccgccgccgtgctgctggccgacatcctgcccaccctggtgatcaagctgctggcccccctgggcctgcacctgctgccctacagccccagagtgctggtgagcggcatctgcgccgccggcagcttcgtgctggtggccttcagccacagcgtgggcaccagcctgtgcggcagcagcagcagcctgagcctgagagagagatggaccgtgttcaagggcctgctgtggtacatcgtgcccctggtggtggtgtacttcgccgagtacttcatcaaccagggcctgttcgagctgctgttcttctggaacaccagcctgagccacgcccagcagtacagatggtaccagatgctgtaccaggccggcgtgttcgccagcagaagcagcctgagatgctgcagaatcagattcacctgggccctggccctgctgcagatggagagcagaagcgtggcccaggccggcatgtag

SEQ ID NO: 1242 - DNA, 1317 bp, Artificial Sequence
  derived and/or modified sequence
atgggaggttgtgccggatccaggaggcgatttagcgattcagaaggcgaggagacagtacccgagcctcggttgcctctacttgaccatcaaggagcccattggaaaaatgccgtgggtttttggctcttgggtctctgcaataacttctcctacgtggtcatgctgagcgctgcacacgacatcttgtctcacaaacgcacatccggaaaccagagtcacgtggaccctggaccaacgccaatcccacacaattcatcgtcacgctttgattgtaactcagtgtctacagccgctgttttattagcagatatactgcccacactggttataaagctcttggcacccctcgggcttcacttactgccatacagtccgagagttctggtgtctggaatctgcgcagcaggatcttttgttctggtggctttttcccatagcgtcgggacctcattatgtggtgtcgtcttcgccagcatttcatcagggctgggggaagtgacatttctcagcctgaccgccttctatccgagagccgtgatcagttggtggtcgtctgggactgggggagcaggactgctcggggcactgtcctatctcggtcttacacaggccgggctttctccccaacagacattactcagcatgctcggcatacccgcccttttgctggcctcttactttctgctgctgacttccccagaagctcaggatcctggtggggaagaggaagcagaatccgctgctcggcaacccttgatcagaactgaggcgccagagtctaaaccaggatcctcatctagcttgagcttgcgagaacgctggaccgtgttcaaggggttactctggtatatcgttcctctggtcgtggtttattttgccgaatacttcattaatcaggggttgtttgagctgctcttcttttggaacacatcgctgtcccatgcccagcagtaccgatggtaccagatgctctaccaggccggagtcttcgccagtcgatcatcactaaggtgttgtcgtatccgcttcacctgggccttggcgctgctccagtgtcttaacttggtcttcctgctggccgatgtatggtttggtttcctcccttctatctacctcgttttccttattattctgtatgagggtctgctaggaggggctgcatatgtgaatactttccataatattgctctagaaacctctgatgagcacagggaatttgcaatggccgcaacatgcatctctgacaccctaggcatctccctctcaggcttgctggccttgcctctccatgacttcctgtgccagcttagttag

SEQ ID NO: 1243 - DNA, 1266 bp, Artificial Sequence
  derived and/or modified sequence
atgggaggttgcgcagggtcccgccgtcgattttcagattccgaaggcgaggagaccgtgcccgaaccgagactgccacttctggaccatcagggtgctcattggaaaaacgccgttggtttttggctgctggggctatgcaacaatttttcatacgtggtcatgttatcagcggcacatgacattctctcccataaacgaacttcaggaaatcagtcccatgtggaccctgggccaacgcccatcccgcacaactcctcctcacgattcgactgcaacagcgtgtctacggctgcagttctcttagccgacattctgcccaccctcgtaattaagctgctggcccctctgggacttcacctgctaccgtattccccgcgcgttctggtcagcggaatttgcgccgctggtagtttcgtgttggtagctttcagccactccgtgggcacttcactgtgcggcgtggtctttgctagcatttcctcaggtttaggagaagtcacttttctgtccctcaccgctttttatccccgggccgtgataagttggtggagtagtggcacaggtggtgctgggctgctgggggccttatcatacctggggttgacacaggcaggcctatctccccagcagacgctgctgagcatgttaggcattcccgccctcctcctcgcttcctactttctgctgttaacatcacccgaggcacaggacccaggcggcgaggaggaggccgagagcgctgcccggcagcctctcatcaggactgaggcacctgaaagcaagccagggtctagctcttcattgagtctgcgcgagcggtggaccgtgtttaaagtcagaatgatggccggattcgaacttctcttcttttggaatactagcttgagccatgctcaacaatatcgatggtaccagatgttgtaccaggcaggagttttcgcttccaggtctagcctacgatgctgtagaattcgcttcacctgggcactcgctctcctgcagtgtctcaatctcgtgtttcttctggctgatgtgtggttcggcttcctgccgtccatctacctggtgttccttattattctgtacgagggacttctcgggggtgccgcctatgtgaacaccttccataatatcgccctcgaaacatccgacgaacatcgtgagtttgccatggccgcgacttgcatcagtgacaccctgggaatctccctttctggactgttagctcttccattgcacgatttcttatgtcagctctcctag

SEQ ID NO: 1244 - DNA, 1173 bp, Artificial Sequence
  derived and/or modified sequence
atgggcggctgtgccgggtcacgacgacggtttagcgactctgaaggggaggaaactgtgccggagcctcggctgccactattggaccatcagggtgcccattggaaaaatgccgtaggattttggttgctgggtttgtgtaataacttttcatacgtcgtgatgctgtctgccgcacatgacattttgagtcataaaaggactagcggaaatcagtcccacgtcgatcctgggcccacacccattccacataactcatcttctagatttgattgcaatagcgtgtccaccgctgcagtgctgctcgcagatattttacctactttggtgattaaactgctcgcccctcttggcctgcacctactcccctattcaccaagggtgctggtaagtggcatctgtgctgccgggagctttgtcttagttgccttttcccactcggttggaaccagtctgtgcggcgttgtgttcgcttcaattagtagtggactgggggaggtaacattcctttcactcactgcgttttatcccagctattttctgctattaaccagtccagaggctcaagaccctggcggcgaggaggaggcggagagcgccgccagacaaccactcatccgaacagaggctccagagagcaagcctgggtcgtcctcttctctttccctacgagaaaggtggacagttttcaagggtctgctatggtatatagtgcctcttgtcgtcgtatacttcgcagaatatttcatcaaccaagggctcttcgagttgctgttcttttggaacacatcattatctcacgcccagcaatataggtggtatcagatgctttatcaggcaggagtgttcgcttctcgatcttcactgcggtgctgtaggatcaggtttacgtgggcactcgccctactccaatgcctgaatctcgtgttcctcctggcagatgtttggtttgggtttttgccttccatctacctggtgttcttgataattttgtatgaaggcctcctgggaggggcggcgtacgtgaatactttccataacattgccctcgaaacatccgacgaacacagggaatttgcgatggccgctacttgcatatcagacacactgggcatatcactgagcggcctcctggccttgccgctgcatgatttcttgtgccagctgtcttag

SEQ ID NO: 1245 - DNA, 762 bp, Artificial Sequence
  derived and/or modified sequence
atgggcggttgtgccgggagtcgtcggcgtttctcggatagtgagggtgaggaaaccgttcctgaacctaggttacccctgctggaccaccagggcgcccactggaagaatgccgtgggtttttggctgttgggcctgtgtaacaatttctcttatgtcgtaatgctgtccgccgctcatgatatactcagtcataaacggacttccgggaatcagtcacacgtggatccagggccaactcctattccacacaactcctccagtaggtttgactgcaatagtgttagtactgcggcagtcctgcttgctgacatcctgcctacactagtcattaaactgctagccccacttggactgcaccttctgccttatagtcctagagtcctcgtaagcgggatttgtgctgccgggagcttcgtcttggttgccttttcccactcagtgggtacgagtctgtgcggaagctcttctagcctgtcgctcagggagcggtggaccgtgttcaagggactgctgtggtacatagtgcccttggttgtggtctacttcgccgaatactttatcaaccagggcctcttcgaactactattcttttggaacacctccctgagccacgcacagcagtacaggtggtaccagatgctctatcaggccggagtctttgcaagtcggtcatccctgaggtgttgccgaatccggtttacatgggctctggctctgctgcagatggaatcgagaagcgtggctcaggcaggtatgtag

SEQ ID NO: 1246 - DNA, 1317 bp, Artificial Sequence
  derived and/or modified sequence
atgggggggtgtgctggcagccggcgccgcttttccgacagcgaaggggaagaaacggttcccgagccaaggctgcctctgctggaccatcagggtgctcactggaagaatgcagtgggtttctggcttctgggactttgcaacaatttcagttatgttgtaatgttaagtgctgcacacgacattctatcccacaagcggacctccgggaaccagtcccacgtcgatcccgggccaacacccatccctcacaactctagctcgcgctttgactgtaactccgtgagcactgcagctgtgctgttggcagacatactgccaacactcgttatcaaactgctggctccactcggtttacacttgctaccttactctcctagagtgcttgtgtccggaatttgcgctgcaggcagtttcgtgctagtcgccttcagccatagtgtaggaacatcattgtgcggggttgttttcgctagtatttcttccggtctgggcgaggtcacctttctatccttaactgccttctatccgcgcgccgtaatttcctggtggagctcaggtaccggaggcgctggtctgttgggtgccctgtcgtacttaggattgactcaggcaggactctcaccccaacagactttgctgtctatgctgggcattcccgccttgcttctggcctcctactttctgctgctgacctcaccagaggctcaggaccccggcggggaggaggaggctgagtctgccgcccgtcagcctctcatcaggaccgaggctccagagtctaagcccggttcctcttccagtcttagcttaagggaacggtggacagtgtttaaagggctcctgtggtacatcgtgcccttggtcgtcgtgtacttcgccgagtattttatcaatcaggggctgtttgaactgctgttcttctggaatacttcactttcgcacgctcagcaataccgctggtatcaaatgctttaccaggccggtgtctttgcttctcgttcctcattgcggtgttgcagaattcgattcacctgggccctcgctctgctccagtgtctgaacctggtctttctgctcgcagatgtttggttcggattcttgccaagcatatacctggtgtttcttatcattctgtatgaggggctgcttggaggcgctgcatacgtcaatacattccataatatcgccctcgagacctccgatgaacacagggagttcgccatggccgccacctgcatttctgacaccctggggatcagtcttagcgggttgctggcactccctttacacgattttctgtgccagctgtcctag

SEQ ID NO: 1247 - DNA, 1317 bp, Artificial Sequence
  derived and/or modified sequence
atgggcgggtgcgccggatctcgaaggagattcagtgactctgagggggaggagaccgtgccagaaccgcgcttacctcttctcgatcatcaaggcgcccattggaagaatgctgttggtttttggcttctgggtctctgcaataacttttcctacgtggtcatgctctcagccgcacacgacatactttctcataagcgtacttcgggcaaccaatcccacgttgacccaggtccgacgcctataccccataattcttcttcacggttcgactgcaatagtgttagcactgctgctgtgctcctggccgacatcctgcctacactcgtgattaagcttttagcgcctctgggattgcacctcctcccctattctccacgggttcttgtcagtggcatatgtgccgctggtagtttcgtactcgttgcgttttcccactcggtaggtacaagtctttgtggagttgtatttgcctctatatcaagtggactaggagaagtcacgttcctgtccctgaccgccttttaccctcgggctgtgatttcatggtggtcttccggaacggggggagcaggcctgctgggggcactctcatacctggggctgactcaggctggtcttagtccccagcagacactactctctatgctggggattccggccctactgcttgctagctacttcctgcttttgacatcccccgaggcccaggatcccggcggcgaagaagaggccgagtccgcagccagacagccattaattaggactgaggcacctgaaagcaagccaggtagctccagttcactctctctgcgcgagcgatggacagtgtttaagggtctgctttggtacatagtcccgctcgtggtggtgtattttgccgagtatttcattaatcaggggcttttcgagctgctatttttttggaatactagcctgtcccacgcccaacagtatcgctggtaccagatgctttaccaggccggcgtgttcgccagtcggtcctctcttcggtgctgtagaattcgctttacatgggccctagcactcctgcaatgcctgaatctcgtgtttcttcttgcagatgtgtggttcggctttctgccatccatttacctggtatttttaattatcctttatgaaggcttgctgggaggggctgcctacgtgaacactttccacaacattgccttggaaacctctgatgaacaccgggagtttgcaatggccgccacctgcatcagcgatacgctgggcattagcctaagcggattgcttgcccttcctctccacgatttcctgtgccagctcagttag

SEQ ID NO: 1248 - DNA, 1317 bp, Artificial Sequence
  derived and/or modified sequence
atgggcggctgtgccggcagcagaagacgcttcagtgacagcgagggggaggagaccgtgcctgagccccggctgcccctgctggaccaccagggcgcccactggaagaatgctgtgggcttctggctgctgggcctgtgcaacaacttctcctatgtggtgatgctgtctgctgcccatgacatcctgagccacaagaggaccagcggcaaccagagccacgtggaccccggccccacccccatcccccacaacagcagcagcagatttgactgcaacagcgtgtccacagctgctgtgctgctggccgacatcctgcccaccctggtgatcaagctgctggcccccctgggcctgcacctgctgccctacagcccccgggtgctggtgtctggcatctgtgccgccggcagctttgtgctggtggccttcagccacagcgtgggcaccagcctgtgtggggtggtgtttgccagcatcagcagcggcctgggggaggtgaccttcctgagcctgacagccttctaccccagggctgtgatctcctggtggagcagcggcaccggcggggccggcctgctgggcgccctgagctacctgggcctgacccaggccggcctgagcccccagcagaccctgctgtccatgctgggcatcccagccctgctgctggccagctacttcctgctgctgaccagccctgaggcccaggaccctggaggagaggaggaggccgagagcgctgcccggcagcccctcatcagaacagaggcccctgagagcaagccaggcagcagcagcagcctgagcctgcgggagcgctggacagtgttcaagggcctgctgtggtacatcgtgcccctggtggtggtgtactttgctgagtacttcatcaaccagggcctgtttgagctgctcttcttctggaacaccagcctgagccacgcccagcagtaccgctggtaccagatgctgtaccaggccggcgtgtttgccagccgcagcagcctgcgctgctgccgcatccgcttcacctgggccctggccctgctgcagtgcctgaacctggtgttcctgctggctgatgtgtggtttggcttcctgcccagcatctacctggtgttcctgatcatcctgtatgagggcctgctgggcggggccgcctacgtgaacaccttccacaacatcgccctggagaccagtgatgagcaccgggagtttgccatggccgccacctgcatcagtgacaccctgggcatcagcctgagcggcctgctggccctgcccctgcatgacttcctgtgccagctgtcctag

SEQ ID NO: 1249 - DNA, 1266 bp, Artificial Sequence
  derived and/or modified sequence
atgggcggctgtgccggcagcagaagacgcttcagtgacagcgagggggaggagaccgtgcctgagccccggctgcccctgctggaccaccagggcgcccactggaagaatgctgtgggcttctggctgctgggcctgtgcaacaacttctcctatgtggtgatgctgtctgctgcccatgacatcctgagccacaagaggaccagcggcaaccagagccacgtggaccccggccccacccccatcccccacaacagcagcagcagatttgactgcaacagcgtgtccacagctgctgtgctgctggccgacatcctgcccaccctggtgatcaagctgctggcccccctgggcctgcacctgctgccctacagcccccgggtgctggtgtctggcatctgtgccgccggcagctttgtgctggtggccttcagccacagcgtgggcaccagcctgtgtggggtggtgtttgccagcatcagcagcggcctgggggaggtgaccttcctgagcctgacagccttctaccccagggctgtgatctcctggtggagcagcggcaccggcggggccggcctgctgggcgccctgagctacctgggcctgacccaggccggcctgagcccccagcagaccctgctgtccatgctgggcatcccagccctgctgctggccagctacttcctgctgctgaccagccctgaggcccaggaccctggaggagaggaggaggccgagagcgctgcccggcagcccctcatcagaacagaggcccctgagagcaagccaggcagcagcagcagcctgagcctgcgggagcgctggacagtgttcaaggtgaggatgatggccggctttgagctgctcttcttctggaacaccagcctgagccacgcccagcagtaccgctggtaccagatgctgtaccaggccggcgtgtttgccagccgcagcagcctgcgctgctgccgcatccgcttcacctgggccctggccctgctgcagtgcctgaacctggtgttcctgctggctgatgtgtggtttggcttcctgcccagcatctacctggtgttcctgatcatcctgtatgagggcctgctgggcggggccgcctacgtgaacaccttccacaacatcgccctggagaccagtgatgagcaccgggagtttgccatggccgccacctgcatcagtgacaccctgggcatcagcctgagcggcctgctggccctgcccctgcatgacttcctgtgccagctgtcctag

SEQ ID NO: 1250 - DNA, 1173 bp, Artificial Sequence
  derived and/or modified sequence
atgggcggctgtgccggcagcagaagacgcttcagtgacagcgagggggaggagaccgtgcctgagccccggctgcccctgctggaccaccagggcgcccactggaagaatgctgtgggcttctggctgctgggcctgtgcaacaacttctcctatgtggtgatgctgtctgctgcccatgacatcctgagccacaagaggaccagcggcaaccagagccacgtggaccccggccccacccccatcccccacaacagcagcagcagatttgactgcaacagcgtgtccacagctgctgtgctgctggccgacatcctgcccaccctggtgatcaagctgctggcccccctgggcctgcacctgctgccctacagcccccgggtgctggtgtctggcatctgtgccgccggcagctttgtgctggtggccttcagccacagcgtgggcaccagcctgtgtggggtggtgtttgccagcatcagcagcggcctgggggaggtgaccttcctgagcctgacagccttctaccccagctacttcctgctgctgaccagccctgaggcccaggaccctggaggagaggaggaggccgagagcgctgcccggcagcccctcatcagaacagaggcccctgagagcaagccaggcagcagcagcagcctgagcctgcgggagcgctggacagtgttcaagggcctgctgtggtacatcgtgcccctggtggtggtgtactttgctgagtacttcatcaaccagggcctgtttgagctgctcttcttctggaacaccagcctgagccacgcccagcagtaccgctggtaccagatgctgtaccaggccggcgtgtttgccagccgcagcagcctgcgctgctgccgcatccgcttcacctgggccctggccctgctgcagtgcctgaacctggtgttcctgctggctgatgtgtggtttggcttcctgcccagcatctacctggtgttcctgatcatcctgtatgagggcctgctgggcggggccgcctacgtgaacaccttccacaacatcgccctggagaccagtgatgagcaccgggagtttgccatggccgccacctgcatcagtgacaccctgggcatcagcctgagcggcctgctggccctgcccctgcatgacttcctgtgccagctgtcctag

SEQ ID NO: 1251 - DNA, 762 bp, Artificial Sequence
  derived and/or modified sequence
atgggcggctgtgccggcagcagaagacgcttcagtgacagcgagggggaggagaccgtgcctgagccccggctgcccctgctggaccaccagggcgcccactggaagaatgctgtgggcttctggctgctgggcctgtgcaacaacttctcctatgtggtgatgctgtctgctgcccatgacatcctgagccacaagaggaccagcggcaaccagagccacgtggaccccggccccacccccatcccccacaacagcagcagcagatttgactgcaacagcgtgtccacagctgctgtgctgctggccgacatcctgcccaccctggtgatcaagctgctggcccccctgggcctgcacctgctgccctacagcccccgggtgctggtgtctggcatctgtgccgccggcagctttgtgctggtggccttcagccacagcgtgggcaccagcctgtgtggcagcagcagcagcctgagcctgcgggagcgctggacagtgttcaagggcctgctgtggtacatcgtgcccctggtggtggtgtactttgctgagtacttcatcaaccagggcctgtttgagctgctcttcttctggaacaccagcctgagccacgcccagcagtaccgctggtaccagatgctgtaccaggccggcgtgtttgccagccgcagcagcctgcgctgctgccgcatccgcttcacctgggccctggccctgctgcagatggagagccgctctgtggcccaggccggcatgtag

SEQ ID NO: 1252 - DNA, 1317 bp, Artificial Sequence
  derived and/or modified sequence
atgggcggctgcgccggcagccggcggcggttcagcgacagcgagggtgaagagacagtgccagaaccccgactccccttactggatcaccagggagcccactggaagaatgcagtgggcttctggcttctcggcctgtgtaataacttttcctatgttgtgatgcttagcgccgctcatgacatcctttctcataagcgcacttcaggtaaccaatctcatgtggacccagggcctactccaatcccacacaattcctcatcacggtttgattgcaactctgtgtcgacagcagccgttctgctggcggacatactccccaccctggtcattaagctgttggccccactcgggctgcacctgctgccctatagccctagagtgctggtctcagggatttgtgccgctggatcctttgtgcttgttgcattttctcactcagtggggacctccctgtgcggcgtggtgtttgcatcaatctcctcggggcttggcgaggtgacattcctcagcctgactgctttctaccccagagccgtgataagctggtggagttcagggaccggaggggccgggctgttgggggccctgagttatttgggactgacccaagccggcctatcaccccaacagactctgctgagtatgctcggaatccctgcgcttctattggccagctatttcttgctgctgacatcaccagaagcccaggacccaggcggagaagaggaggcagagagcgccgctcgacagcctttgatcaggacagaggccccagagagtaagcccggttctagctcttcactctcgctaagagagcggtggaccgtgttcaaaggactcctctggtatatcgtgcctctggtcgtcgtttatttcgccgagtactttattaatcaaggacttttcgaactgttattcttctggaacaccagcctgagccatgcccagcagtatagatggtatcagatgctgtatcaagcaggggtctttgcctcacggagctccctgcgctgctgtcgaatcagattcacttgggccctggcccttctgcaatgccttaacctagtatttctgctggcagacgtgtggttcgggttcctgcctagcatctacctggtattcctaatcatcctctatgagggcctactcggcggtgccgcttatgtgaacacttttcataacatcgcactcgagacatcggacgagcaccgcgagtttgccatggcagcaacctgtatctcagacaccctgggaatcagcctctctgggttacttgcactccccctccacgatttcctgtgtcaactcagctag

SEQ ID NO: 1253 - DNA, 1266 bp, Artificial Sequence
  derived and/or modified sequence
atgggcggctgcgccggcagccggcggcggttcagcgacagcgagggtgaggagaccgtacccgaacctagactgcctttgcttgaccatcagggggcacattggaaaaacgcagttggattttggctgcttggtctgtgtaacaattttagctacgtcgtgatgctcagcgccgcacatgacattctttcccataaacgaacaagcggaaatcaaagccatgtggaccccggccccacgcctatcccccacaacagcagcagcagatttgactgtaattctgtctccaccgctgctgtccttctggccgacatactcccgactttggtcattaagctgcttgctcccctgggattacacctgctcccatactcccctcgagtactggtctcagggatctgcgccgctggctcctttgtcctagtggccttttctcactctgtcgggacctcactttgtggcgtcgtcttcgcaagtataagcagtggcctcggcgaggttacgttcctttcccttaccgccttttaccctcgcgcagtgatatcctggtggtccagtggaaccgggggagccggccttctcggagccttaagttaccttggcctcacccaggccggcttatccccacagcagacattgctgagtatgctgggaatacccgcattgcttctcgcctcttacttcttactcttgaccagtcccgaggcccaggatccaggcggggaggaagaggctgagagcgcggcccgtcagccacttatcaggactgaggcacctgagtcgaagcctgggtcttcttctagcctatcactccgagagaggtggaccgtgtttaaagtccggatgatggccgggtttgaactgctctttttctggaataccagcctcagtcatgcacaacagtacagatggtaccagatgctgtaccaggccggtgtatttgcttctcggtcatcgctgagatgttgtcgtatcagatttacctgggcattagctttgcttcagtgcctcaacctggtgttcctgctagcagacgtctggtttggctttctaccaagcatctatctggtcttcctcataatcttatacgaaggtttactgggtggcgccgcctacgtgaatacgttccataacatcgccttagagacatccgacgagcaccgagagttcgcaatggcggcgacctgtatttccgacacgctgggcatttccctcagcggcctgctggcacttccactgcacgattttctgtgccagctctcttag

SEQ ID NO: 1254 - DNA, 1173 bp, Artificial Sequence
  derived and/or modified sequence
atgggcggctgcgccggcagccggcggcggttcagcgacagcgagggcgaagagaccgttccggagcccagacttccactgctggaccaccagggggctcactggaagaacgcggtgggcttctggctccttggactgtgcaacaacttttcctatgttgtgatgttatcagccgcacatgacatcttaagccacaaaaggaccagcggaaatcagagccatgtcgatccaggtcctacccctatccctcacaactcgagctcccgttttgattgtaatagcgtttcaactgctgctgtgctgctagccgatatcctccctactctcgtgatcaagctcttagccccactaggtttgcacctactcccttacagcccccgggtactagtgtccggtatttgtgcggctgggtcattcgtgttagtggccttttctcactccgtcggcacgtccctgtgtggtgtggtgtttgcctccatctcttcgggcctgggggaagttactttcctctctctcaccgccttctatcccagttactttctcctgctgacgtctcctgaagctcaagatcctggaggggaagaggaagccgagagcgccgctcgacaaccactcataaggaccgaggcacccgagtctaaaccagggtcgtccagtagtctttcacttcgcgaaaggtggacggtcttcaagggtctgctctggtacattgtaccgctggtggttgtgtattttgccgagtattttattaatcaaggcctgtttgagctgcttttcttttggaacacctcactctctcacgcccaacagtatcgctggtatcaaatgctgtaccaggctggagtgttcgcatctcgttctagcctgaggtgctgtagaatcagatttacatgggccctggctctgctccaatgtctgaacctggtgttccttctcgctgacgtatggttcggctttctaccttctatttacctcgtgtttctcatcatcctgtacgagggcctgttaggaggcgccgcctatgtgaacacatttcacaatattgccctcgaaacaagcgacgagcatcgagagttcgcaatggctgctacttgcatctccgacacactgggcatctccctgtccggcttgctggctctgcccttgcatgactttctgtgccagctttcctag

SEQ ID NO: 1255 - DNA, 762 bp, Artificial Sequence
  derived and/or modified sequence
atgggcggctgcgccggcagccggcggcggttcagcgacagcgagggagaggaaaccgtaccagaacctaggctgccattattggatcatcagggtgcgcactggaagaacgctgttggtttttggctgctcggcctctgtaacaacttctcatatgttgtgatgttgtcagctgcacacgacatcctgtcacataagcgtacttctgggaatcagagtcatgtggaccctggtcccaccccaatcccccacaattcttcatcacgatttgattgcaactcagtgagtacagccgccgtgctgctggcggatatcttacctactctggtaattaagctccttgcccctctcggcctccacctgctaccctatagcccccgagtactcgtatcaggcatctgcgccgctggcagtttcgtactggtggctttttctcatagtgtgggtacaagcttgtgcggctcatcctcctcattgtccctcagagaacgttggacagtgttcaaaggcctgctctggtacattgttcccctggtggtcgtatatttcgccgaatatttcatcaatcagggactgtttgagctgttatttttttggaacacctctctgagccacgctcagcagtacagatggtatcaaatgctgtaccaggccggggtgttcgccagccgatctagtctgaggtgctgcagaattcgattcacctgggctctggctctacttcagatggagtccagatcggtggcacaggccgggatgtag

SEQ ID NO: 1256 - DNA, 1317 bp, Artificial Sequence
  derived and/or modified sequence
atgggcggctgcgccggcagccggcggcggttcagcgacagcgagggagaagaaaccgttcccgagcctcggcttccacttttggatcatcagggggcccattggaaaaatgcagtcgggttctggctcctggggctctgtaataatttctcatatgtcgtgatgctttctgccgcacacgatattctttcacataaacgcacatccggtaaccagtcacacgtcgaccctggaccgacgccaatcccacataacagttcttctcggttcgactgtaatagcgtatccactgccgcagtgctgctggccgatatcctgccaaccctcgttatcaagctgctcgccccattgggactgcatctcctcccgtactccccacgggtacttgtttccggaatctgcgccgcaggttcctttgtgctggtggcattctcccactccgtcggaacatctctgtgtggagtagttttcgccagtatttcaagtgggttgggcgaggtgactttcttgagcctaaccgcgttctatccaagagcagtcatcagctggtggtccagcggtacaggaggggctggtttactgggggctctcagctacttggggcttacccaggcaggtttatcccctcagcagacacttctgtctatgctgggcatccccgccctgcttttagcctcatacttcttgctccttacaagtcctgaggcacaagaccctggtggggaagaagaggcggaatccgcagcccgtcagccgctgattagaacagaggctcccgagagcaagccaggaagcagctccagcctatccctcagagaaaggtggacagtctttaaaggcctgctgtggtacattgttccccttgtcgtggtatatttcgccgagtactttatcaaccaaggtctgttcgaactcctgttcttctggaacacgagtctctcacacgcccaacagtataggtggtaccagatgctctatcaagctggcgtttttgccagtcggagtagcctgcgctgctgcagaatacgatttacctgggcattggctttactgcagtgtcttaacctggtgtttctcctggcagacgtttggttcgggttcctccccagcatttatctcgtttttctgataattctgtatgagggtctcctcgggggtgcagcttatgtcaataccttccataatatagccctggaaacaagtgatgaacacagagagttcgcgatggccgcaacatgtattagcgatacccttggaataagtctgagcggtctcctggcccttcccctgcatgattttctgtgccaactaagttag

SEQ ID NO: 1257 - DNA, 1317 bp, Artificial Sequence
  derived and/or modified sequence
atgggcggctgcgccggcagccggcggcggttcagcgacagcgagggagaggaaacagtgcccgaacccaggctgccattgctcgatcaccagggcgcccattggaagaacgccgtcggcttctggctgctaggcctgtgtaacaatttttcatacgtcgtgatgctttccgccgctcacgacatcctgagccataagaggaccagcggcaatcaaagccatgtcgatcctggacctaccccaatccctcacaattcttcctctagattcgactgcaacagcgtgtctaccgccgctgtgttactggcggacatcctgccaactctggtcatcaaattgctggccccattaggcttgcatctcctcccatatagcccaagggtgctcgtctcaggtatttgcgcagctggctccttcgtgctggtggcattttctcattcagtgggcacgtccctatgcggcgttgtgtttgcttccatctcctcaggactgggagaggtaacgtttctctcactgaccgctttttaccccagagctgtgatctcttggtggtcatctggcactggaggggcaggcctgctcggtgctctgtcctatctgggattgactcaagccgggttgagcccccaacagacactattgtccatgctgggcatacctgctctgttgctcgcaagttatttcctgttactcacaagtccagaggcccaggatccaggaggggaggaagaagcggaatccgccgcgaggcagcccctgatacggactgaggcacctgagagtaaacctgggagttcgtcatcgctatcactgcgcgaacgatggactgtatttaaaggacttctgtggtacattgtgcccctggtggttgtctactttgcagaatactttatcaatcagggtcttttcgaactgctcttcttctggaatacctcattgagccatgcccagcaataccgatggtaccagatgttgtaccaggctggcgttttcgcatccaggtccagtttacgctgctgccggattaggttcacttgggccctggctctgttgcagtgtttaaatctcgtctttctcttagctgatgtgtggtttggtttcctcccgtctatttacttggtgttcctgataatactctacgagggtttgctgggtggcgccgcttacgtgaacacttttcataacatagccctggaaacaagcgacgagcacagggagtttgctatggccgctacatgcatcagcgatactctcgggatttccctgtccggattgctggccttgcccctccatgatttcctgtgccagctcagctag

SEQ ID NO: 1258 - DNA, 1317 bp, Artificial Sequence
  derived and/or modified sequence
atgggcggttgtgcgggatctcgaagaagattttctgactcagagggtgaggagaccgtgcctgagccacggctgccactgctggaccaccagggtgcccattggaagaacgctgtcgggttttggctgctgggactttgcaataatttttcctatgtagtgatgttaagcgccgctcatgatattctgtcacacaaaaggacttctggaaaccagagccacgtggatcctggccctacccccattcctcataatagctcctcaaggttcgactgtaacagcgtcagtactgccgctgtgctgctcgccgacatcctccccacacttgttattaaacttctggcccctctagggctgcacctgttgccttattctcctcgcgttctcgtatccggaatctgcgccgcaggatccttcgtgttggttgccttcagtcacagtgtggggacttctctgtgcggagtggtatttgcaagcatatcttcgggtttgggggaggtgacgttccttagcctgacagccttttatccacgcgcagtcatttcatggtggagttccggcacaggcggagctgggctgcttggggctctgtcctaccttggattgacccaagccggacttagcccccagcagactcttctttccatgcttggaatcccagctctcctgctggctagctactttctactattaactagccccgaagcgcaggatcccggaggagaagaggaggctgaatctgccgctaggcagccactgatccggaccgaggctcctgagagcaaacccggatcttctagctccctgtctctgagggagcgctggactgttttcaaggggcttctgtggtacattgtgcccctcgtagtggtttacttcgccgagtactttattaatcagggcctgtttgaattgctcttcttctggaacaccagtctgagccacgctcagcagtataggtggtaccagatgctgtatcaggccggtgtctttgccagcaggtccagtctgcgctgctgccgcatacggttcacatgggccctggcactcctacagtgcctgaatcttgtctttctcctggccgatgtgtggtttggcttcctgccgagtatctatctcgtatttctcatcatcctctacgaggggctgctagggggagccgcatatgtaaacaccttccacaacatcgcccttgaaacctcagacgagcaccgagagttcgctatggccgcaacctgcatatcagataccctcgggatctctctgtcgggactcctcgccttgcccttgcatgacttcttatgtcagctgagttag

SEQ ID NO: 1259 - DNA, 1266 bp, Artificial Sequence
  derived and/or modified sequence
atgggcggttgcgccggttcaagacgtcgcttcagcgactccgagggtgaggagaccgtgcctgagcccagattaccgttgttggaccaccagggagcacattggaagaacgctgtcggcttctggcttctggggctttgcaataacttttcatatgtggtgatgctgtcagcagcacacgacatcttgtctcataaaaggactagcggcaatcagtctcacgtagatccaggacccacccccattccacacaattcgtccagcaggttcgactgcaattccgtctcaacagcagcggtgctgctcgcggatatcctcccaaccttagtgatcaagttgctggcccctctggggctccacctcctgccttactcaccacgggtcctggtttctggcatatgcgcggcaggctccttcgttctcgtcgccttcagtcattccgtcggaacctccctttgcggagtggtcttcgcttctatcagctccggcttgggtgaggttacttttctaagtctcacagccttctacccgagggctgtgataagctggtggtcctcaggaacagggggagccggactcctcggagcactttcatacctgggattgacgcaggccggactaagtcctcagcagaccttactgagcatgctcggcattcctgccctgctattagcttcatatttcttgctgctcaccagccccgaggcacaagacccaggaggagaagaagaggctgagagcgccgcacggcagccactcatccgcaccgaagcgcctgagtccaaacccggtagcagcagttctcttagcctccgggaacgatggacggtctttaaagtgaggatgatggctggttttgaacttctgtttttttggaacacttctctgtctcatgctcaacagtaccgatggtatcagatgctctatcaggccggagtgtttgcatcccgttctagtctgcgctgctgccggattagatttacttgggccctcgcactccttcagtgtcttaatctggtgtttctgttagcggacgtttggttcgggttccttccttccatctacctcgtcttcctcatcatcctgtacgagggcctcctgggtggtgctgcctacgtgaatacctttcacaacatcgccctggagacttcagacgagcacagggaattcgcaatggctgctacgtgtatctctgacaccctgggaatttccctgtcaggcctcctggcattgcccttgcatgattttctatgccaactttcttag

SEQ ID NO: 1260 - DNA, 1173 bp, Artificial Sequence
  derived and/or modified sequence
atgggcggatgtgccggaagtcggaggaggttctcagacagtgagggcgaggagactgtccctgagcctcgcctgcctcttctggatcaccagggagcacactggaaaaatgcggtcggcttctggctcttaggtctttgtaacaacttctcctacgttgtaatgctcagcgctgcacacgacattttgagccataagcggacctccggtaatcagtcacacgttgaccccggacccactcccataccacataattctagttcccggttcgattgcaattctgtgtctactgcagctgtcctgttggctgacatcctacccactctggtcatcaagctgctggctcctttggggctgcatttgctgccttatagccctcgggtattggtgtctggcatatgtgcagcaggcagtttcgtattggttgcgtttagccactcggtgggaacctccctgtgcggggtggttttcgcctcaattagttccggcctgggagaggtgaccttcttgtccttaacggctttctaccctagttactttctcctgcttaccagccccgaagcacaagatcctggaggagaggaggaggctgaatcagctgccagacagccattaatcagaaccgaagcccctgagagcaagcccggatcgagttcatcactcagcctacgcgaaaggtggacagtctttaaaggcctgctctggtacatcgtgccgcttgtggtggtgtacttcgctgaatactttatcaaccagggactgttcgaactacttttcttttggaacacctcgttgtcccacgcgcagcagtaccgctggtatcaaatgctctatcaggcgggagtgtttgcaagtaggagctctctccgctgttgtcgcatccggtttacgtgggccttggcattactgcaatgcctaaatctggtattcctcttggccgatgtttggtttggcttccttcccagcatttacctcgtattcttaattatactgtacgaaggccttttgggtggagccgcttatgtgaacaccttccataatattgctctcgaaacttccgacgaacacagggagttcgccatggcagccacatgtatcagtgacacgctgggcatctccctgagtggcttattagccctgcctttacatgatttcctgtgccagttaagctag

SEQ ID NO: 1261 - DNA, 762 bp, Artificial Sequence
  derived and/or modified sequence
atgggcggatgcgccggtagccggaggagattctccgactccgaaggcgaggaaactgtgccggagcctcggcttcccctactagaccaccagggcgctcattggaagaacgccgtcggcttttggttgttaggcctatgtaataatttcagttacgtggtaatgcttagtgccgctcacgatatactctcacataagcgcacctctggcaaccagtcccatgtcgacccaggccctacacctattcctcacaactctagcagtcgctttgactgcaacagtgtgtccaccgcagctgtccttcttgctgacatcctacccaccctggtcattaaactgctcgcgcctctgggtttacatctattgccatacagtccaagagttctcgtgagcggaatatgcgccgctgggtcctttgtccttgtggccttctcacatagcgtgggcactagtctttgtggctcctcttcaagccttagtctcagggagcgctggacagtgttcaagggactgctgtggtacatcgtcccattagtcgtcgtctacttcgcggaatattttattaaccagggtctgtttgagcttctttttttttggaacacctctctgtcccacgctcagcagtacaggtggtaccagatgctttaccaagcaggagtgtttgcaagccgctcctcacttagatgctgtaggataagattcacatgggcacttgccctcctccagatggaaagccgctctgtcgctcaggctggtatgtag

SEQ ID NO: 1262 - DNA, 1317 bp, Artificial Sequence
  derived and/or modified sequence
atggggggatgtgccggatctaggcgtcggttctctgattcagagggcgaagaaacggtaccagagcccagactgccacttcttgaccatcagggggctcactggaaaaacgcggtgggcttttggctgcttgggctgtgcaataacttcagttacgttgtaatgctgagcgcagcacacgacattctgagtcataagcggacatctggcaaccagtctcatgtggatcccggacctactccaatcccgcataatagcagctcgcggtttgactgtaactccgtgtccacagccgcagtcctgctggcagatattctgcccacactcgtgatcaagctgttggcccctctgggactgcacctcttgccctattcacctagggtgctggtgagtggcatctgtgctgctggatcctttgtcttggtagctttctcccattccgtcggaacgagtctgtgtggcgtggtgtttgcctctatatccagcggcttaggtgaggtgactttcctgtctttgacagcgttttacccacgcgctgtcatctcatggtggtctagcggtacaggaggggctggcttgctgggggcactttcttacctcggccttactcaggctggcctgagtcctcaacagacccttctcagtatgctgggaattcccgctctgctgctggcctcatatttcctcctgcttaccagtccagaggctcaagaccccggaggagaagaggaggcggagtccgccgcaagacaaccactcatccggacggaggctcccgagtcaaagcccggttcatcttcgtccctgtccctcagagagagatggactgtgtttaaaggcctcctgtggtacattgttccgctcgtcgtggtgtattttgcagagtattttatcaaccagggcctcttcgaattgctgttcttctggaatacgtctctttcacacgcccagcagtatagatggtatcagatgttgtaccaggctggagtgtttgcctcacgatcatccttacggtgctgtcgcatccggtttacctgggctctggctctcctgcagtgccttaatctggtttttctcctagccgacgtgtggttcggtttcctaccgtccatctacctggtgtttctgatcattctgtatgagggtcttctgggcggagctgcctacgtcaataccttccacaacattgccctggaaacaagcgacgaacacagagaattcgcgatggccgcaacctgtatttctgataccctggggatctcactgtcaggacttcttgccctaccgttacatgatttcctctgccagctgagctag

SEQ ID NO: 1263 - DNA, 1317 bp, Artificial Sequence
  derived and/or modified sequence
atgggcggatgcgccggtagccggcgaaggttttccgactccgagggggaggagacagtccccgaaccgagactacctctgctggatcaccagggggctcattggaaaaatgcagtgggattttggttgctcgggctatgtaataactttagctacgtggtaatgctttcagctgcccatgacattctgtcgcataaaagaacctcagggaatcagtcacatgttgatcctggccctacaccaatacctcataacagctcctcccggtttgattgtaatagtgtgtctactgccgctgtactcctggcagatattctccccactctagttattaagctgctcgctccgttgggactccacttgctgccatactcccctcgcgtacttgtgagtgggatctgcgctgcaggctcttttgttctggtggcattctcccactccgtgggaacgtcactgtgtggcgtggtttttgcatcaatcagttccgggctgggcgaagtgaccttcttgtctctgaccgccttttaccctcgagcagtcatctcatggtggagttcaggtactggtggtgcaggacttctcggggctctgtcctacctagggttaacacaagcgggtctgtcacctcagcagacattgctgtccatgctcggaattccagctctgctgctcgcttcatatttcctgttgttgacaagtccagaggctcaggacccaggcggtgaggaggaagctgagtccgccgcacgccagccacttatccgcacagaggctcctgaaagcaagcctggaagcagcagtagcttgtccctgagggagcggtggacagttttcaaagggcttctctggtatatcgtgccattggtggtggtgtatttcgccgaatacttcattaaccaaggcctgtttgaacttctgttcttttggaacactagtctttctcacgcacagcagtatagatggtaccaaatgctataccaggccggtgttttcgccagcagatcatcattacgctgttgcaggattaggttcacctgggccctagccctactgcagtgtttgaaccttgtgttcctactcgccgatgtttggttcggattcctgccatctatttacctcgtgtttctaataatcctgtatgagggactgttgggaggcgctgcctatgtcaatacattccataacattgcactagagacgtcggacgagcaccgtgagtttgcgatggccgctacgtgcatctccgatactcttggcataagtttgtccgggttgctcgcactgccgctccacgacttcctgtgtcaattgtcttag

SEQ ID NO: 1264 - DNA, 2374 bp, Artificial Sequence
  derived and/or modified sequence
gctcatgggactcctgcctctcctgggcttggccgctcctgtcttggcaagccccagaccctgccttggatttctttctggcctccaagtgggcgcttggctcctggcacctggcagccttggctgtctccccagccccactgtcctgcctctctgcttgggacccatgggagctgccatctccccagccccagtgctgggatgacaggcatgagccaccacacccagacgagagggcacatttccaactgcattctgaaggcctggtggtgagaaagagcatatagaggtggcacagcccatagcagagatgaggccaaggacaagaagagaatgcaggatgccgctttccacctagaagaagtttaaaacctgcggttccagggttctccagcccctccctttttcacgctccgaagccgagaaggcccaaagcgaagacagagaggacccggaagtagggaaaacctctgagcacgtgatgggggaacacgcgggtgctgtcacgtgatccgacaaacggcctctgcatagtgcagaacattctgctgctcttaaaggtacaggcctcagggtccctgctgtagacggggcgggggagagtacgatgggtggggcgtggtgggtcgtagggcgctcgagatggagcccccagcttccttgatggatcgcggggcgcgagtgccctagacaagccggagctgggaccggcaatcgggcgttgatccttgtcacctgtcgcagaccctcatccctcccgtgggagccccctttggacactctatgaccctggaccctcgggggacctgaacttgatgcgatgggaggctgtgcaggctcgcggcggcgcttttcggattccgagggggaggagaccgtcccggagccccggctccctctgttggaccatcagggcgcgcattggaagaacgcggtgggcttctggctgctgggcctttgcaacaacttctcttatgtggtgatgctgagtgccgcccacgacatccttagccacaagaggacatcgggaaaccagagccatgtggacccaggcccaacgccgatcccccacaacagctcatcacgatttgactgcaactctgtctctacggctgctgtgctcctggcggacatcctccccacactcgtcatcaaattgttggctcctcttggccttcacctgctgccctacagcccccgggttctcgtcagtgggatttgtgctgctggaagcttcgtcctggttgccttttctcattctgtggggaccagcctgtgtggtgtggtcttcgctagcatctcatcaggccttggggaggtcaccttcctctccctcactgccttctaccccagggccgtgatctcctggtggtcctcagggactgggggagctgggctgctgggggccctgtcctacctgggcctcacccaggccggcctctcccctcagcagaccctgctgtccatgctgggtatccctgccctgctgctggccagctatttcttgttgctcacatctcctgaggcccaggaccctggaggggaagaagaagcagagagcgcagcccggcagcccctcataagaaccgaggccccggagtcgaagccaggctccagctccagcctctcccttcgggaaaggtggacagtgttcaagggtctgctgtggtacattgttcccttggtcgtagtttactttgccgagtatttcattaaccagggactttttgaactcctctttttctggaacacttccctgagtcacgctcagcaataccgctggtaccagatgctgtaccaggctggcgtctttgcctcccgctcttctctccgctgctgtcgcatccgtttcacctgggccctggccctgctgcagtgcctcaacctggtgttcctgctggcagacgtgtggttcggctttctgccaagcatctacctcgtcttcctgatcattctgtatgaggggctcctgggaggcgcagcctacgtgaacaccttccacaacatcgccctggagaccagtgatgagcaccgggagtttgcaatggcggccacctgcatctctgacacactggggatctccctgtcggggctcctggctttgcctctgcatgacttcctctgccagctctcctgatactcgggatcctcaggacgcaggtcacattcacctgtgggcagagggacaggtcagacacccaggcccaccccagagaccctccatgaactgtgctcccagccttcccggcaggtctgggagtagggaagggctgaagccttgtttcccttgcaggggggccagccattgtctcccacttggggagtttcttcctggcatcatgccttctgaataaatgccgattttatccatgga

SEQ ID NO: 1265 - DNA, 1619 bp, Artificial Sequence
  derived and/or modified sequence
acggcctctgcatagtgcagaacattctgctgctcttaaagaccctcatccctcccgtgggagccccctttggacactctatgaccctggaccctcgggggacctgaacttgatgcgatgggaggctgtgcaggctcgcggcggcgcttttcggattccgagggggaggagaccgtcccggagccccggctccctctgttggaccatcagggcgcgcattggaagaacgcggtgggcttctggctgctgggcctttgcaacaacttctcttatgtggtgatgctgagtgccgcccacgacatccttagccacaagaggacatcgggaaaccagagccatgtggacccaggcccaacgccgatcccccacaacagctcatcacgatttgactgcaactctgtctctacggctgctgtgctcctggcggacatcctccccacactcgtcatcaaattgttggctcctcttggccttcacctgctgccctacagcccccgggttctcgtcagtgggatttgtgctgctggaagcttcgtcctggttgccttttctcattctgtggggaccagcctgtgtggtgtggtcttcgctagcatctcatcaggccttggggaggtcaccttcctctccctcactgccttctaccccagggccgtgatctcctggtggtcctcagggactgggggagctgggctgctgggggccctgtcctacctgggcctcacccaggccggcctctcccctcagcagaccctgctgtccatgctgggtatccctgccctgctgctggccagctatttcttgttgctcacatctcctgaggcccaggaccctggaggggaagaagaagcagagagcgcagcccggcagcccctcataagaaccgaggccccggagtcgaagccaggctccagctccagcctctcccttcgggaaaggtggacagtgttcaaggttcggatgatggctgggtttgaactcctctttttctggaacacttccctgagtcacgctcagcaataccgctggtaccagatgctgtaccaggctggcgtctttgcctcccgctcttctctccgctgctgtcgcatccgtttcacctgggccctggccctgctgcagtgcctcaacctggtgttcctgctggcagacgtgtggttcggctttctgccaagcatctacctcgtcttcctgatcattctgtatgaggggctcctgggaggcgcagcctacgtgaacaccttccacaacatcgccctggagaccagtgatgagcaccgggagtttgcaatggcggccacctgcatctctgacacactggggatctccctgtcggggctcctggctttgcctctgcatgacttcctctgccagctctcctgatactcgggatcctcaggacgcaggtcacattcacctgtgggcagagggacaggtcagacacccaggcccaccccagagaccctccatgaactgtgctcccagccttcccggcaggtctgggagtagggaagggctgaagccttgtttcccttgcaggggggccagccattgtctcccacttggggagtttcttcctggcatcatgccttctgaataaatgccgattttatccatgg

SEQ ID NO: 1266 - DNA, 1526 bp, Artificial Sequence
  derived and/or modified sequence
acggcctctgcatagtgcagaacattctgctgctcttaaagaccctcatccctcccgtgggagccccctttggacactctatgaccctggaccctcgggggacctgaacttgatgcgatgggaggctgtgcaggctcgcggcggcgcttttcggattccgagggggaggagaccgtcccggagccccggctccctctgttggaccatcagggcgcgcattggaagaacgcggtgggcttctggctgctgggcctttgcaacaacttctcttatgtggtgatgctgagtgccgcccacgacatccttagccacaagaggacatcgggaaaccagagccatgtggacccaggcccaacgccgatcccccacaacagctcatcacgatttgactgcaactctgtctctacggctgctgtgctcctggcggacatcctccccacactcgtcatcaaattgttggctcctcttggccttcacctgctgccctacagcccccgggttctcgtcagtgggatttgtgctgctggaagcttcgtcctggttgccttttctcattctgtggggaccagcctgtgtggtgtggtcttcgctagcatctcatcaggccttggggaggtcaccttcctctccctcactgccttctaccccagctatttcttgttgctcacatctcctgaggcccaggaccctggaggggaagaagaagcagagagcgcagcccggcagcccctcataagaaccgaggccccggagtcgaagccaggctccagctccagcctctcccttcgggaaaggtggacagtgttcaagggtctgctgtggtacattgttcccttggtcgtagtttactttgccgagtatttcattaaccagggactttttgaactcctctttttctggaacacttccctgagtcacgctcagcaataccgctggtaccagatgctgtaccaggctggcgtctttgcctcccgctcttctctccgctgctgtcgcatccgtttcacctgggccctggccctgctgcagtgcctcaacctggtgttcctgctggcagacgtgtggttcggctttctgccaagcatctacctcgtcttcctgatcattctgtatgaggggctcctgggaggcgcagcctacgtgaacaccttccacaacatcgccctggagaccagtgatgagcaccgggagtttgcaatggcggccacctgcatctctgacacactggggatctccctgtcggggctcctggctttgcctctgcatgacttcctctgccagctctcctgatactcgggatcctcaggacgcaggtcacattcacctgtgggcagagggacaggtcagacacccaggcccaccccagagaccctccatgaactgtgctcccagccttcccggcaggtctgggagtagggaagggctgaagccttgtttcccttgcaggggggccagccattgtctcccacttggggagtttcttcctggcatcatgccttctgaataaatgccgattttatccatgg

SEQ ID NO: 1267 - DNA, 879 bp, Artificial Sequence
  derived and/or modified sequence
acggcctctgcatagtgcagaacattctgctgctcttaaagaccctcatccctcccgtgggagccccctttggacactctatgaccctggaccctcgggggacctgaacttgatgcgatgggaggctgtgcaggctcgcggcggcgcttttcggattccgagggggaggagaccgtcccggagccccggctccctctgttggaccatcagggcgcgcattggaagaacgcggtgggcttctggctgctgggcctttgcaacaacttctcttatgtggtgatgctgagtgccgcccacgacatccttagccacaagaggacatcgggaaaccagagccatgtggacccaggcccaacgccgatcccccacaacagctcatcacgatttgactgcaactctgtctctacggctgctgtgctcctggcggacatcctccccacactcgtcatcaaattgttggctcctcttggccttcacctgctgccctacagcccccgggttctcgtcagtgggatttgtgctgctggaagcttcgtcctggttgccttttctcattctgtggggaccagcctgtgtggctccagctccagcctctcccttcgggaaaggtggacagtgttcaagggtctgctgtggtacattgttcccttggtcgtagtttactttgccgagtatttcattaaccagggactttttgaactcctctttttctggaacacttccctgagtcacgctcagcaataccgctggtaccagatgctgtaccaggctggcgtctttgcctcccgctcttctctccgctgctgtcgcatccgtttcacctgggccctggccctgctgcagatggagtctcgctctgttgcccaggctggaatgtag

SEQ ID NO: 1268 - DNA, 1720 bp, Artificial Sequence
  derived and/or modified sequence
gtccctgctgtagacggggcgggggagagtacgatgggtggggcgtggtgggtcgtagggcgctcgagatggagcccccagcttccttgatggatcgcggggcgcgagtgccctagacaagccggagctgggaccggcaatcgggcgttgatccttgtcacctgtcgcagaccctcatccctcccgtgggagccccctttggacactctatgaccctggaccctcgggggacctgaacttgatgcgatgggaggctgtgcaggctcgcggcggcgcttttcggattccgagggctgctgggcctttgcaacaacttctcttatgtggtgatgctgagtgccgcccacgacatccttagccacaagaggacatcgggaaaccagagccatgtggacccaggcccaacgccgatcccccacaacagctcatcacgatttgactgcaactctgtctctacggctgctgtgctcctggcggacatcctccccacactcgtcatcaaattgttggctcctcttggccttcacctgctgccctacagcccccgggttctcgtcagtgggatttgtgctgctggaagcttcgtcctggttgccttttctcattctgtggggaccagcctgtgtggtgtggtcttcgctagcatctcatcaggccttggggaggtcaccttcctctccctcactgccttctaccccagggccgtgatctcctggtggtcctcagggactgggggagctgggctgctgggggccctgtcctacctgggcctcacccaggccggcctctcccctcagcagaccctgctgtccatgctgggtatccctgccctgctgctggccagctatttcttgttgctcacatctcctgaggcccaggaccctggaggggaagaagaagcagagagcgcagcccggcagcccctcataagaaccgaggccccggagtcgaagccaggctccagctccagcctctcccttcgggaaaggtggacagtgttcaagggtctgctgtggtacattgttcccttggtcgtagtttactttgccgagtatttcattaaccagggactttttgaactcctctttttctggaacacttccctgagtcacgctcagcaataccgctggtaccagatgctgtaccaggctggcgtctttgcctcccgctcttctctccgctgctgtcgcatccgtttcacctgggccctggccctgctgcagtgcctcaacctggtgttcctgctggcagacgtgtggttcggctttctgccaagcatctacctcgtcttcctgatcattctgtatgaggggctcctgggaggcgcagcctacgtgaacaccttccacaacatcgccctggagaccagtgatgagcaccgggagtttgcaatggcggccacctgcatctctgacacactggggatctccctgtcggggctcctggctttgcctctgcatgacttcctctgccagctctcctgatactcgggatcctcaggacgcaggtcacattcacctgtgggcagagggacaggtcagacacccaggcccaccccagagaccctccatgaactgtgctcccagccttcccggcaggtctgggagtagggaagggctgaagccttgtttcccttgcaggggggccagccattgtctcccacttggggagtttcttcctggcatcatgccttctgaataaatgccgattttatccatgg

SEQ ID NO: 1269 - DNA, 1827 bp, Artificial Sequence
  derived and/or modified sequence
gctgctcttaaaggtacaggcctcagggtccctgctgtagacggggcgggggagagtacgatgggtggggcgtggtgggtcgtagggcgctcgagatggagcccccagcttccttgatggatcgcggggcgcgagtgccctagacaagccggagctgggaccggcaatcgggcgttgatccttgtcacctgtcgcagaccctcatccctcccgtgggagccccctttggacactctatgaccctggaccctcgggggacctgaacttgatgcgatgggaggctgtgcaggctcgcggcggcgcttttcggattccgagggggaggagaccgtcccggagccccggctccctctgttggaccatcagggcgcgcattggaagaacgcggtgggcttctggctgctgggcctttgcaacaacttctcttatgtggtgatgctgagtgccgcccacgacatccttagccacaagaggacatcgggaaaccagagccatgtggacccaggcccaacgccgatcccccacaacagctcatcacgatttgactgcaactctgtctctacggctgctgtgctcctggcggacatcctccccacactcgtcatcaaattgttggctcctcttggccttcacctgctgccctacagcccccgggttctcgtcagtgggatttgtgctgctggaagcttcgtcctggttgccttttctcattctgtggggaccagcctgtgtggtgtggtcttcgctagcatctcatcaggccttggggaggtcaccttcctctccctcactgccttctaccccagggccgtgatctcctggtggtcctcagggactgggggagctgggctgctgggggccctgtcctacctgggcctcacccaggccggcctctcccctcagcagaccctgctgtccatgctgggtatccctgccctgctgctggccagctatttcttgttgctcacatctcctgaggcccaggaccctggaggggaagaagaagcagagagcgcagcccggcagcccctcataagaaccgaggccccggagtcgaagccaggctccagctccagcctctcccttcgggaaaggtggacagtgttcaagggtctgctgtggtacattgttcccttggtcgtagtttactttgccgagtatttcattaaccagggactttttgaactcctctttttctggaacacttccctgagtcacgctcagcaataccgctggtaccagatgctgtaccaggctggcgtctttgcctcccgctcttctctccgctgctgtcgcatccgtttcacctgggccctggccctgctgcagtgcctcaacctggtgttcctgctggcagacgtgtggttcggctttctgccaagcatctacctcgtcttcctgatcattctgtatgaggggctcctgggaggcgcagcctacgtgaacaccttccacaacatcgccctggagaccagtgatgagcaccgggagtttgcaatggcggccacctgcatctctgacacactggggatctccctgtcggggctcctggctttgcctctgcatgacttcctctgccagctctcctgatactcgggatcctcaggacgcaggtcacattcacctgtgggcagagggacaggtcagacacccaggcccaccccagagaccctccatgaactgtgctcccagccttcccggcaggtctgggagtagggaagggctgaagccttgtttcccttgcaggggggccagccattgtctcccacttggggagtttcttcctggcatcatgccttctgaataaatgccgattttatccatgga

SEQ ID NO: 1270 - DNA, 1913 bp, Artificial Sequence
  derived and/or modified sequence
ataactggtgctggcaggctactgtctcggtcttgggcgccactgatctaaggtcacggctctgcttgctgctcccacccgctccagtttaaaacctgcggttccagggttctccagcccctccctttttcacgctccgaagccgagaaggcccaaagcgaagacagagaggacccggaagtagggaaaacctctgagcacgtgatgggggaacacgcgggtgctgtcacgtgatccgacaaacggcctctgcatagtgcagaacattctgctgctcttaaagaccctcatccctcccgtgggagccccctttggacactctatgaccctggaccctcgggggacctgaacttgatgcgatgggaggctgtgcaggctcgcggcggcgcttttcggattccgagggggaggagaccgtcccggagccccggctccctctgttggaccatcagggcgcgcattggaagaacgcggtgggcttctggctgctgggcctttgcaacaacttctcttatgtggtgatgctgagtgccgcccacgacatccttagccacaagaggacatcgggaaaccagagccatgtggacccaggcccaacgccgatcccccacaacagctcatcacgatttgactgcaactctgtctctacggctgctgtgctcctggcggacatcctccccacactcgtcatcaaattgttggctcctcttggccttcacctgctgccctacagcccccgggttctcgtcagtgggatttgtgctgctggaagcttcgtcctggttgccttttctcattctgtggggaccagcctgtgtggtgtggtcttcgctagcatctcatcaggccttggggaggtcaccttcctctccctcactgccttctaccccagggccgtgatctcctggtggtcctcagggactgggggagctgggctgctgggggccctgtcctacctgggcctcacccaggccggcctctcccctcagcagaccctgctgtccatgctgggtatccctgccctgctgctggccagctatttcttgttgctcacatctcctgaggcccaggaccctggaggggaagaagaagcagagagcgcagcccggcagcccctcataagaaccgaggccccggagtcgaagccaggctccagctccagcctctcccttcgggaaaggtggacagtgttcaagggtctgctgtggtacattgttcccttggtcgtagtttactttgccgagtatttcattaaccagggactttttgaactcctctttttctggaacacttccctgagtcacgctcagcaataccgctggtaccagatgctgtaccaggctggcgtctttgcctcccgctcttctctccgctgctgtcgcatccgtttcacctgggccctggccctgctgcagtgcctcaacctggtgttcctgctggcagacgtgtggttcggctttctgccaagcatctacctcgtcttcctgatcattctgtatgaggggctcctgggaggcgcagcctacgtgaacaccttccacaacatcgccctggagaccagtgatgagcaccgggagtttgcaatggcggccacctgcatctctgacacactggggatctccctgtcggggctcctggctttgcctctgcatgacttcctctgccagctctcctgatactcgggatcctcaggacgcaggtcacattcacctgtgggcagagggacaggtcagacacccaggcccaccccagagaccctccatgaactgtgctcccagccttcccggcaggtctgggagtagggaagggctgaagccttgtttcccttgcaggggggccagccattgtctcccacttggggagtttcttcctggcatcatgccttctgaataaatgccgattttatccatgga

SEQ ID NO: 1271 - protein, 1464 aa, Artificial Sequence
  derived and/or modified sequence
MFSFVDLRLLLLLAATALLTHGQEEGQVEGQDEDIPPITCVQNGLRYHDRDVWKPEPCRICVCDNGKVLCDDVICDETKNCPGAEVPEGECCPVCPDGSESPTDQETTGVEGPKGDTGPRGPRGPAGPPGRDGIPGQPGLPGPPGPPGPPGPPGLGGNFAPQLSYGYDEKSTGGISVPGPMGPSGPRGLPGPPGAPGPQGFQGPPGEPGEPGASGPMGPRGPPGPPGKNGDDGEAGKPGRPGERGPPGPQGARGLPGTAGLPGMKGHRGFSGLDGAKGDAGPAGPKGEPGSPGENGAPGQMGPRGLPGERGRPGAPGPAGARGNDGATGAAGPPGPTGPAGPPGFPGAVGAKGEAGPQGPRGSEGPQGVRGEPGPPGPAGAAGPAGNPGADGQPGAKGANGAPGIAGAPGFPGARGPSGPQGPGGPPGPKGNSGEPGAPGSKGDTGAKGEPGPVGVQGPPGPAGEEGKRGARGEPGPTGLPGPPGERGGPGSRGFPGADGVAGPKGPAGERGSPGPAGPKGSPGEAGRPGEAGLPGAKGLTGSPGSPGPDGKTGPPGPAGQDGRPGPPGPPGARGQAGVMGFPGPKGAAGEPGKAGERGVPGPPGAVGPAGKDGEAGAQGPPGPAGPAGERGEQGPAGSPGFQGLPGPAGPPGEAGKPGEQGVPGDLGAPGPSGARGERGFPGERGVQGPPGPAGPRGANGAPGNDGAKGDAGAPGAPGSQGAPGLQGMPGERGAAGLPGPKGDRGDAGPKGADGSPGKDGVRGLTGPIGPPGPAGAPGDKGESGPSGPAGPTGARGAPGDRGEPGPPGPAGFAGPPGADGQPGAKGEPGDAGAKGDAGPPGPAGPAGPPGPIGNVGAPGAKGARGSAGPPGATGFPGAAGRVGPPGPSGNAGPPGPPGPAGKEGGKGPRGETGPAGRPGEVGPPGPPGPAGEKGSPGADGPAGAPGTPGPQGIAGQRGVVGLPGQRGERGFPGLPGPSGEPGKQGPSGASGERGPPGPMGPPGLAGPPGESGREGAPGAEGSPGRDGSPGAKGDRGETGPAGPPGAPGAPGAPGPVGPAGKSGDRGETGPAGPTGPVGPVGARGPAGPQGPRGDKGETGEQGDRGIKGHRGFSGLQGPPGPPGSPGEQGPSGASGPAGPRGPPGSAGAPGKDGLNGLPGPIGPPGPRGRTGDAGPVGPPGPPGPPGPPGPPSAGFDFSFLPQPPQEKAHDGGRYYRADDANVVRDRDLEVDTTLKSLSQQIENIRSPEGSRKNPARTCRDLKMCHSDWKSGEYWIDPNQGCNLDAIKVFCNMETGETCVYPTQPSVAQKNWYISKNPKDKRHVWFGESMTDGFQFEYGGQGSDPADVAIQLTFLRLMSTEASQNITYHCKNSVAYMDQQTGNLKKALLLQGSNEIEIRAEGNSRFTYSVTVDGCTSHTGAWGKTVIEYKTTKTSRLPIIDVAPLDVGAPDQEFGFDVGPVCFL

SEQ ID NO: 1272 - protein, 1366 aa, Artificial Sequence
  derived and/or modified sequence
MLSFVDTRTLLLLAVTLCLATCQSLQEETVRKGPAGDRGPRGERGPPGPPGRDGEDGPTGPPGPPGPPGPPGLGGNFAAQYDGKGVGLGPGPMGLMGPRGPPGAAGAPGPQGFQGPAGEPGEPGQTGPAGARGPAGPPGKAGEDGHPGKPGRPGERGVVGPQGARGFPGTPGLPGFKGIRGHNGLDGLKGQPGAPGVKGEPGAPGENGTPGQTGARGLPGERGRVGAPGPAGARGSDGSVGPVGPAGPIGSAGPPGFPGAPGPKGEIGAVGNAGPAGPAGPRGEVGLPGLSGPVGPPGNPGANGLTGAKGAAGLPGVAGAPGLPGPRGIPGPVGAAGATGARGLVGEPGPAGSKGESGNKGEPGSAGPQGPPGPSGEEGKRGPNGEAGSAGPPGPPGLRGSPGSRGLPGADGRAGVMGPPGSRGASGPAGVRGPNGDAGRPGEPGLMGPRGLPGSPGNIGPAGKEGPVGLPGIDGRPGPIGPAGARGEPGNIGFPGPKGPTGDPGKNGDKGHAGLAGARGAPGPDGNNGAQGPPGPQGVQGGKGEQGPPGPPGFQGLPGPSGPAGEVGKPGERGLHGEFGLPGPAGPRGERGPPGESGAAGPTGPIGSRGPSGPPGPDGNKGEPGVVGAVGTAGPSGPSGLPGERGAAGIPGGKGEKGEPGLRGEIGNPGRDGARGAPGAVGAPGPAGATGDRGEAGAAGPAGPAGPRGSPGERGEVGPAGPNGFAGPAGAAGQPGAKGERGAKGPKGENGVVGPTGPVGAAGPAGPNGPPGPAGSRGDGGPPGMTGFPGAAGRTGPPGPSGISGPPGPPGPAGKEGLRGPRGDQGPVGRTGEVGAVGPPGFAGEKGPSGEAGTAGPPGTPGPQGLLGAPGILGLPGSRGERGLPGVAGAVGEPGPLGIAGPPGARGPPGAVGSPGVNGAPGEAGRDGNPGNDGPPGRDGQPGHKGERGYPGNIGPVGAAGAPGPHGPVGPAGKHGNRGETGPSGPVGPAGAVGPRGPSGPQGIRGDKGEPGEKGPRGLPGLKGHNGLQGLPGIAGHHGDQGAPGSVGPAGPRGPAGPSGPAGKDGRTGHPGTVGPAGIRGPQGHQGPAGPPGPPGPPGPPGVSGGGYDFGYDGDFYRADQPRSAPSLRPKDYEVDATLKSLNNQIETLLTPEGSRKNPARTCRDLRLSHPEWSSGYYWIDPNQGCTMDAIKVYCDFSTGETCIRAQPENIPAKNWYRSSKDKKHVWLGETINAGSQFEYNVEGVTSKEMATQLAFMRLLANYASQNITYHCKNSIAYMDEETGNLKKAVILQGSNDVELVAEGNSRFTYTVLVDGCSKKTNEWGKTIIEYKTNKPSRLPFLDIAPLDIGGADQEFFVDIGPVCFK

SEQ ID NO: 1273 - protein, 1367 aa, Artificial Sequence
  derived and/or modified sequence
MLSFVDTRTLLLLAVTLCLATCQCTLGGQTLSKFPPYLHIERSEQGPPGPPGRDGEDGPTGPPGPPGPPGPPGLGGNFAAQYDGKGVGLGPGPMGLMGPRGPPGAAGAPGPQGFQGPAGEPGEPGQTGPAGARGPAGPPGKAGEDGHPGKPGRPGERGVVGPQGARGFPGTPGLPGFKGIRGHNGLDGLKGQPGAPGVKGEPGAPGENGTPGQTGARGLPGERGRVGAPGPAGARGSDGSVGPVGPAGPIGSAGPPGFPGAPGPKGEIGAVGNAGPAGPAGPRGEVGLPGLSGPVGPPGNPGANGLTGAKGAAGLPGVAGAPGLPGPRGIPGPVGAAGATGARGLVGEPGPAGSKGESGNKGEPGSAGPQGPPGPSGEEGKRGPNGEAGSAGPPGPPGLRGSPGSRGLPGADGRAGVMGPPGSRGASGPAGVRGPNGDAGRPGEPGLMGPRGLPGSPGNIGPAGKEGPVGLPGIDGRPGPIGPAGARGEPGNIGFPGPKGPTGDPGKNGDKGHAGLAGARGAPGPDGNNGAQGPPGPQGVQGGKGEQGPPGPPGFQGLPGPSGPAGEVGKPGERGLHGEFGLPGPAGPRGERGPPGESGAAGPTGPIGSRGPSGPPGPDGNKGEPGVVGAVGTAGPSGPSGLPGERGAAGIPGGKGEKGEPGLRGEIGNPGRDGARGAPGAVGAPGPAGATGDRGEAGAAGPAGPAGPRGSPGERGEVGPAGPNGFAGPAGAAGQPGAKGERGAKGPKGENGVVGPTGPVGAAGPAGPNGPPGPAGSRGDGGPPGMTGFPGAAGRTGPPGPSGISGPPGPPGPAGKEGLRGPRGDQGPVGRTGEVGAVGPPGFAGEKGPSGEAGTAGPPGTPGPQGLLGAPGILGLPGSRGERGLPGVAGAVGEPGPLGIAGPPGARGPPGAVGSPGVNGAPGEAGRDGNPGNDGPPGRDGQPGHKGERGYPGNIGPVGAAGAPGPHGPVGPAGKHGNRGETGPSGPVGPAGAVGPRGPSGPQGIRGDKGEPGEKGPRGLPGLKGHNGLQGLPGIAGHHGDQGAPGSVGPAGPRGPAGPSGPAGKDGRTGHPGTVGPAGIRGPQGHQGPAGPPGPPGPPGPPGVSGGGYDFGYDGDFYRADQPRSAPSLRPKDYEVDATLKSLNNQIETLLTPEGSRKNPARTCRDLRLSHPEWSSGYYWIDPNQGCTMDAIKVYCDFSTGETCIRAQPENIPAKNWYRSSKDKKHVWLGETINAGSQFEYNVEGVTSKEMATQLAFMRLLANYASQNITYHCKNSIAYMDEETGNLKKAVILQGSNDVELVAEGNSRFTYTVLVDGCSKKTNEWGKTIIEYKTNKPSRLPFLDIAPLDIGGADQEFFVDIGPVCFK

SEQ ID NO: 1274 - DNA, 69 bp, Artificial Sequence
  derived and/or modified sequence
atgctgagctttgtggatacccgcaccctgctgctgctggcggtgaccagctgcctggcgacctgccag

SEQ ID NO: 1275 - DNA, 4101 bp, Artificial Sequence
  derived and/or modified sequence
atgctgagcttcgtggacaccagaaccctgctgctgctggccgtgaccctgtgcctggccacctgccagagcctgcaggaggagaccgtgagaaagggccccgccggcgacagaggccccagaggcgagagaggcccccccggcccccccggcagagacggcgaggacggccccaccggcccccccggcccccccggcccccccggcccccccggcctgggcggcaacttcgccgcccagtacgacggcaagggcgtgggcctgggccccggccccatgggcctgatgggccccagaggcccccccggcgccgccggcgcccccggcccccagggcttccagggccccgccggcgagcccggcgagcccggccagaccggccccgccggcgccagaggccccgccggcccccccggcaaggccggcgaggacggccaccccggcaagcccggcagacccggcgagagaggcgtggtgggcccccagggcgccagaggcttccccggcacccccggcctgcccggcttcaagggcatcagaggccacaacggcctggacggcctgaagggccagcccggcgcccccggcgtgaagggcgagcccggcgcccccggcgagaacggcacccccggccagaccggcgccagaggcctgcccggcgagagaggcagagtgggcgcccccggccccgccggcgccagaggcagcgacggcagcgtgggccccgtgggccccgccggccccatcggcagcgccggcccccccggcttccccggcgcccccggccccaagggcgagatcggcgccgtgggcaacgccggccccgccggccccgccggccccagaggcgaggtgggcctgcccggcctgagcggccccgtgggcccccccggcaaccccggcgccaacggcctgaccggcgccaagggcgccgccggcctgcccggcgtggccggcgcccccggcctgcccggccccagaggcatccccggccccgtgggcgccgccggcgccaccggcgccagaggcctggtgggcgagcccggccccgccggcagcaagggcgagagcggcaacaagggcgagcccggcagcgccggcccccagggcccccccggccccagcggcgaggagggcaagagaggccccaacggcgaggccggcagcgccggcccccccggcccccccggcctgagaggcagccccggcagcagaggcctgcccggcgccgacggcagagccggcgtgatgggcccccccggcagcagaggcgccagcggccccgccggcgtgagaggccccaacggcgacgccggcagacccggcgagcccggcctgatgggccccagaggcctgcccggcagccccggcaacatcggccccgccggcaaggagggccccgtgggcctgcccggcatcgacggcagacccggccccatcggccccgccggcgccagaggcgagcccggcaacatcggcttccccggccccaagggccccaccggcgaccccggcaagaacggcgacaagggccacgccggcctggccggcgccagaggcgcccccggccccgacggcaacaacggcgcccagggcccccccggcccccagggcgtgcagggcggcaagggcgagcagggcccccccggcccccccggcttccagggcctgcccggccccagcggccccgccggcgaggtgggcaagcccggcgagagaggcctgcacggcgagttcggcctgcccggccccgccggccccagaggcgagagaggcccccccggcgagagcggcgccgccggccccaccggccccatcggcagcagaggccccagcggcccccccggccccgacggcaacaagggcgagcccggcgtggtgggcgccgtgggcaccgccggccccagcggccccagcggcctgcccggcgagagaggcgccgccggcatccccggcggcaagggcgagaagggcgagcccggcctgagaggcgagatcggcaaccccggcagagacggcgccagaggcgcccccggcgccgtgggcgcccccggccccgccggcgccaccggcgacagaggcgaggccggcgccgccggccccgccggccccgccggccccagaggcagccccggcgagagaggcgaggtgggccccgccggccccaacggcttcgccggccccgccggcgccgccggccagcccggcgccaagggcgagagaggcgccaagggccccaagggcgagaacggcgtggtgggccccaccggccccgtgggcgccgccggccccgccggccccaacggcccccccggccccgccggcagcagaggcgacggcggcccccccggcatgaccggcttccccggcgccgccggcagaaccggcccccccggccccagcggcatcagcggcccccccggcccccccggccccgccggcaaggagggcctgagaggccccagaggcgaccagggccccgtgggcagaaccggcgaggtgggcgccgtgggcccccccggcttcgccggcgagaagggccccagcggcgaggccggcaccgccggcccccccggcacccccggcccccagggcctgctgggcgcccccggcatcctgggcctgcccggcagcagaggcgagagaggcctgcccggcgtggccggcgccgtgggcgagcccggccccctgggcatcgccggcccccccggcgccagaggcccccccggcgccgtgggcagccccggcgtgaacggcgcccccggcgaggccggcagagacggcaaccccggcaacgacggcccccccggcagagacggccagcccggccacaagggcgagagaggctaccccggcaacatcggccccgtgggcgccgccggcgcccccggcccccacggccccgtgggccccgccggcaagcacggcaacagaggcgagaccggccccagcggccccgtgggccccgccggcgccgtgggccccagaggccccagcggcccccagggcatcagaggcgacaagggcgagcccggcgagaagggccccagaggcctgcccggcctgaagggccacaacggcctgcagggcctgcccggcatcgccggccaccacggcgaccagggcgcccccggcagcgtgggccccgccggccccagaggccccgccggccccagcggccccgccggcaaggacggcagaaccggccaccccggcaccgtgggccccgccggcatcagaggcccccagggccaccagggccccgccggcccccccggcccccccggcccccccggcccccccggcgtgagcggcggcggctacgacttcggctacgacggcgacttctacagagccgaccagcccagaagcgcccccagcctgagacccaaggactacgaggtggacgccaccctgaagagcctgaacaaccagatcgagaccctgctgacccccgagggcagcagaaagaaccccgccagaacctgcagagacctgagactgagccaccccgagtggagcagcggctactactggatcgaccccaaccagggctgcaccatggacgccatcaaggtgtactgcgacttcagcaccggcgagacctgcatcagagcccagcccgagaacatccccgccaagaactggtacagaagcagcaaggacaagaagcacgtgtggctgggcgagaccatcaacgccggcagccagttcgagtacaacgtggagggcgtgaccagcaaggagatggccacccagctggccttcatgagactgctggccaactacgccagccagaacatcacctaccactgcaagaacagcatcgcctacatggacgaggagaccggcaacctgaagaaggccgtgatcctgcagggcagcaacgacgtggagctggtggccgagggcaacagcagattcacctacaccgtgctggtggacggctgcagcaagaagaccaacgagtggggcaagaccatcatcgagtacaagaccaacaagcccagcagactgcccttcctggacatcgcccccctggacatcggcggcgccgaccaggagttcttcgtggacatcggccccgtgtgcttcaagtag

SEQ ID NO: 1276 - DNA, 4104 bp, Artificial Sequence
  derived and/or modified sequence
atgctgagcttcgtggacaccagaaccctgctgctgctggccgtgaccctgtgcctggccacctgccagtgcaccctgggcggccagaccctgagcaagttccccccctacctgcacatcgagagaagcgagcagggcccccccggcccccccggcagagacggcgaggacggccccaccggcccccccggcccccccggcccccccggcccccccggcctgggcggcaacttcgccgcccagtacgacggcaagggcgtgggcctgggccccggccccatgggcctgatgggccccagaggcccccccggcgccgccggcgcccccggcccccagggcttccagggccccgccggcgagcccggcgagcccggccagaccggccccgccggcgccagaggccccgccggcccccccggcaaggccggcgaggacggccaccccggcaagcccggcagacccggcgagagaggcgtggtgggcccccagggcgccagaggcttccccggcacccccggcctgcccggcttcaagggcatcagaggccacaacggcctggacggcctgaagggccagcccggcgcccccggcgtgaagggcgagcccggcgcccccggcgagaacggcacccccggccagaccggcgccagaggcctgcccggcgagagaggcagagtgggcgcccccggccccgccggcgccagaggcagcgacggcagcgtgggccccgtgggccccgccggccccatcggcagcgccggcccccccggcttccccggcgcccccggccccaagggcgagatcggcgccgtgggcaacgccggccccgccggccccgccggccccagaggcgaggtgggcctgcccggcctgagcggccccgtgggcccccccggcaaccccggcgccaacggcctgaccggcgccaagggcgccgccggcctgcccggcgtggccggcgcccccggcctgcccggccccagaggcatccccggccccgtgggcgccgccggcgccaccggcgccagaggcctggtgggcgagcccggccccgccggcagcaagggcgagagcggcaacaagggcgagcccggcagcgccggcccccagggcccccccggccccagcggcgaggagggcaagagaggccccaacggcgaggccggcagcgccggcccccccggcccccccggcctgagaggcagccccggcagcagaggcctgcccggcgccgacggcagagccggcgtgatgggcccccccggcagcagaggcgccagcggccccgccggcgtgagaggccccaacggcgacgccggcagacccggcgagcccggcctgatgggccccagaggcctgcccggcagccccggcaacatcggccccgccggcaaggagggccccgtgggcctgcccggcatcgacggcagacccggccccatcggccccgccggcgccagaggcgagcccggcaacatcggcttccccggccccaagggccccaccggcgaccccggcaagaacggcgacaagggccacgccggcctggccggcgccagaggcgcccccggccccgacggcaacaacggcgcccagggcccccccggcccccagggcgtgcagggcggcaagggcgagcagggcccccccggcccccccggcttccagggcctgcccggccccagcggccccgccggcgaggtgggcaagcccggcgagagaggcctgcacggcgagttcggcctgcccggccccgccggccccagaggcgagagaggcccccccggcgagagcggcgccgccggccccaccggccccatcggcagcagaggccccagcggcccccccggccccgacggcaacaagggcgagcccggcgtggtgggcgccgtgggcaccgccggccccagcggccccagcggcctgcccggcgagagaggcgccgccggcatccccggcggcaagggcgagaagggcgagcccggcctgagaggcgagatcggcaaccccggcagagacggcgccagaggcgcccccggcgccgtgggcgcccccggccccgccggcgccaccggcgacagaggcgaggccggcgccgccggccccgccggccccgccggccccagaggcagccccggcgagagaggcgaggtgggccccgccggccccaacggcttcgccggccccgccggcgccgccggccagcccggcgccaagggcgagagaggcgccaagggccccaagggcgagaacggcgtggtgggccccaccggccccgtgggcgccgccggccccgccggccccaacggcccccccggccccgccggcagcagaggcgacggcggcccccccggcatgaccggcttccccggcgccgccggcagaaccggcccccccggccccagcggcatcagcggcccccccggcccccccggccccgccggcaaggagggcctgagaggccccagaggcgaccagggccccgtgggcagaaccggcgaggtgggcgccgtgggcccccccggcttcgccggcgagaagggccccagcggcgaggccggcaccgccggcccccccggcacccccggcccccagggcctgctgggcgcccccggcatcctgggcctgcccggcagcagaggcgagagaggcctgcccggcgtggccggcgccgtgggcgagcccggccccctgggcatcgccggcccccccggcgccagaggcccccccggcgccgtgggcagccccggcgtgaacggcgcccccggcgaggccggcagagacggcaaccccggcaacgacggcccccccggcagagacggccagcccggccacaagggcgagagaggctaccccggcaacatcggccccgtgggcgccgccggcgcccccggcccccacggccccgtgggccccgccggcaagcacggcaacagaggcgagaccggccccagcggccccgtgggccccgccggcgccgtgggccccagaggccccagcggcccccagggcatcagaggcgacaagggcgagcccggcgagaagggccccagaggcctgcccggcctgaagggccacaacggcctgcagggcctgcccggcatcgccggccaccacggcgaccagggcgcccccggcagcgtgggccccgccggccccagaggccccgccggccccagcggccccgccggcaaggacggcagaaccggccaccccggcaccgtgggccccgccggcatcagaggcccccagggccaccagggccccgccggcccccccggcccccccggcccccccggcccccccggcgtgagcggcggcggctacgacttcggctacgacggcgacttctacagagccgaccagcccagaagcgcccccagcctgagacccaaggactacgaggtggacgccaccctgaagagcctgaacaaccagatcgagaccctgctgacccccgagggcagcagaaagaaccccgccagaacctgcagagacctgagactgagccaccccgagtggagcagcggctactactggatcgaccccaaccagggctgcaccatggacgccatcaaggtgtactgcgacttcagcaccggcgagacctgcatcagagcccagcccgagaacatccccgccaagaactggtacagaagcagcaaggacaagaagcacgtgtggctgggcgagaccatcaacgccggcagccagttcgagtacaacgtggagggcgtgaccagcaaggagatggccacccagctggccttcatgagactgctggccaactacgccagccagaacatcacctaccactgcaagaacagcatcgcctacatggacgaggagaccggcaacctgaagaaggccgtgatcctgcagggcagcaacgacgtggagctggtggccgagggcaacagcagattcacctacaccgtgctggtggacggctgcagcaagaagaccaacgagtggggcaagaccatcatcgagtacaagaccaacaagcccagcagactgcccttcctggacatcgcccccctggacatcggcggcgccgaccaggagttcttcgtggacatcggccccgtgtgcttcaagtag

SEQ ID NO: 1277 - DNA, 5411 bp, Artificial Sequence
  derived and/or modified sequence
gtgtcccatagtgtttccaaacttggaaagggcgggggagggcgggaggatgcggagggcggaggtatgcagacaacgagtcagagtttccccttgaaagcctcaaaagtgtccacgtcctcaaaaagaatggaaccaatttaagaagccagccccgtggccacgtcccttcccccattcgctccctcctctgcgcccccgcaggctcctcccagctgtggctgcccgggcccccagccccagccctcccattggtggaggcccttttggaggcaccctagggccagggaaacttttgccgtataaatagggcagatccgggctttattattttagcaccacggcagcaggaggtttcggctaagttggaggtactggccacgactgcatgcccgcgcccgccaggtgatacctccgccggtgacccaggggctctgcgacacaaggagtctgcatgtctaagtgctagacatgctcagctttgtggatacgcggactttgttgctgcttgcagtaaccttatgcctagcaacatgccaatctttacaagaggaaactgtaagaaagggcccagccggagatagaggaccacgtggagaaaggggtccaccaggccccccaggcagagatggtgaagatggtcccacaggccctcctggtccacctggtcctcctggcccccctggtctcggtgggaactttgctgctcagtatgatggaaaaggagttggacttggccctggaccaatgggcttaatgggacctagaggcccacctggtgcagctggagccccaggccctcaaggtttccaaggacctgctggtgagcctggtgaacctggtcaaactggtcctgcaggtgctcgtggtccagctggccctcctggcaaggctggtgaagatggtcaccctggaaaacccggacgacctggtgagagaggagttgttggaccacagggtgctcgtggtttccctggaactcctggacttcctggcttcaaaggcattaggggacacaatggtctggatggattgaagggacagcccggtgctcctggtgtgaagggtgaacctggtgcccctggtgaaaatggaactccaggtcaaacaggagcccgtgggcttcctggtgagagaggacgtgttggtgcccctggcccagctggtgcccgtggcagtgatggaagtgtgggtcccgtgggtcctgctggtcccattgggtctgctggccctccaggcttcccaggtgcccctggccccaagggtgaaattggagctgttggtaacgctggtcctgctggtcccgccggtccccgtggtgaagtgggtcttccaggcctctccggccccgttggacctcctggtaatcctggagcaaacggccttactggtgccaagggtgctgctggccttcccggcgttgctggggctcccggcctccctggaccccgcggtattcctggccctgttggtgctgccggtgctactggtgccagaggacttgttggtgagcctggtccagctggctccaaaggagagagcggtaacaagggtgagcccggctctgctgggccccaaggtcctcctggtcccagtggtgaagaaggaaagagaggccctaatggggaagctggatctgccggccctccaggacctcctgggctgagaggtagtcctggttctcgtggtcttcctggagctgatggcagagctggcgtcatgggccctcctggtagtcgtggtgcaagtggccctgctggagtccgaggacctaatggagatgctggtcgccctggggagcctggtctcatgggacccagaggtcttcctggttcccctggaaatatcggccccgctggaaaagaaggtcctgtcggcctccctggcatcgacggcaggcctggcccaattggcccagctggagcaagaggagagcctggcaacattggattccctggacccaaaggccccactggtgatcctggcaaaaacggtgataaaggtcatgctggtcttgctggtgctcggggtgctccaggtcctgatggaaacaatggtgctcagggacctcctggaccacagggtgttcaaggtggaaaaggtgaacagggtccccctggtcctccaggcttccagggtctgcctggcccctcaggtcccgctggtgaagttggcaaaccaggagaaaggggtctccatggtgagtttggtctccctggtcctgctggtccaagaggggaacgcggtcccccaggtgagagtggtgctgccggtcctactggtcctattggaagccgaggtccttctggacccccagggcctgatggaaacaagggtgaacctggtgtggttggtgctgtgggcactgctggtccatctggtcctagtggactcccaggagagaggggtgctgctggcatacctggaggcaagggagaaaagggtgaacctggtctcagaggtgaaattggtaaccctggcagagatggtgctcgtggtgctcctggtgctgtaggtgcccctggtcctgctggagccacaggtgaccggggcgaagctggggctgctggtcctgctggtcctgctggtcctcggggaagccctggtgaacgtggtgaggtcggtcctgctggccccaatggatttgctggtcctgctggtgctgctggtcaacctggtgctaaaggagaaagaggagccaaagggcctaagggtgaaaacggtgttgttggtcccacaggccccgttggagctgctggcccagctggtccaaatggtccccccggtcctgctggaagtcgtggtgatggaggcccccctggtatgactggtttccctggtgctgctggacggactggtcccccaggaccctctggtatttctggccctcctggtccccctggtcctgctgggaaagaagggcttcgtggtcctcgtggtgaccaaggtccagttggccgaactggagaagtaggtgcagttggtccccctggcttcgctggtgagaagggtccctctggagaggctggtactgctggacctcctggcactccaggtcctcagggtcttcttggtgctcctggtattctgggtctccctggctcgagaggtgaacgtggtctaccaggtgttgctggtgctgtgggtgaacctggtcctcttggcattgccggccctcctggggcccgtggtcctcctggtgctgtgggtagtcctggagtcaacggtgctcctggtgaagctggtcgtgatggcaaccctgggaacgatggtcccccaggtcgcgatggtcaacccggacacaagggagagcgcggttaccctggcaatattggtcccgttggtgctgcaggtgcacctggtcctcatggccccgtgggtcctgctggcaaacatggaaaccgtggtgaaactggtccttctggtcctgttggtcctgctggtgctgttggcccaagaggtcctagtggcccacaaggcattcgtggcgataagggagagcccggtgaaaaggggcccagaggtcttcctggcttaaagggacacaatggattgcaaggtctgcctggtatcgctggtcaccatggtgatcaaggtgctcctggctccgtgggtcctgctggtcctaggggccctgctggtccttctggccctgctggaaaagatggtcgcactggacatcctggtacagttggacctgctggcattcgaggccctcagggtcaccaaggccctgctggcccccctggtccccctggccctcctggacctccaggtgtaagcggtggtggttatgactttggttacgatggagacttctacagggctgaccagcctcgctcagcaccttctctcagacccaaggactatgaagttgatgctactctgaagtctctcaacaaccagattgagacccttcttactcctgaaggctctagaaagaacccagctcgcacatgccgtgacttgagactcagccacccagagtggagcagtggttactactggattgaccctaaccaaggatgcactatggatgctatcaaagtatactgtgatttctctactggcgaaacctgtatccgggcccaacctgaaaacatcccagccaagaactggtataggagctccaaggacaagaaacacgtctggctaggagaaactatcaatgctggcagccagtttgaatataatgtagaaggagtgacttccaaggaaatggctacccaacttgccttcatgcgcctgctggccaactatgcctctcagaacatcacctaccactgcaagaacagcattgcatacatggatgaggagactggcaacctgaaaaaggctgtcattctacagggctctaatgatgttgaacttgttgctgagggcaacagcaggttcacttacactgttcttgtagatggctgctctaaaaagacaaatgaatggggaaagacaatcattgaatacaaaacaaataagccatcacgcctgcccttccttgatattgcacctttggacatcggtggtgctgaccaggaattctttgtggacattggcccagtctgtttcaaataaatgaactcaatctaaattaaaaaagaaagaaatttgaaaaaactttctctttgccatttcttcttcttcttttttaactgaaagctgaatccttccatttcttctgcacatctacttgcttaaattgtgggcaaaagagaaaaagaaggattgatcagagcattgtgcaatacagtttcattaactccttcccccgctcccccaaaaatttgaatttttttttcaacactcttacacctgttatggaaaatgtcaacctttgtaagaaaaccaaaataaaaattgaaaaataaaaaccataaacatttgcaccacttgtggcttttgaatatcttccacagagggaagtttaaaacccaaacttccaaaggtttaaactacctcaaaacactttcccatgagtgtgatccacattgttaggtgctgacctagacagagatgaactgaggtccttgttttgttttgttcataatacaaaggtgctaattaatagtatttcagatacttgaagaatgttgatggtgctagaagaatttgagaagaaatactcctgtattgagttgtatcgtgtggtgtattttttaaaaaatttgatttagcattcatattttccatcttattcccaattaaaagtatgcagattatttgcccaaatcttcttcagattcagcatttgttctttgccagtctcattttcatcttcttccatggttccacagaagctttgtttcttgggcaagcagaaaaattaaattgtacctattttgtatatgtgagatgtttaaataaattgtgaaaaaaatgaaataaagcatgtttggttttccaaaagaacatat

SEQ ID NO: 1278 - DNA, 5414 bp, Artificial Sequence
  derived and/or modified sequence
gtgtcccatagtgtttccaaacttggaaagggcgggggagggcgggaggatgcggagggcggaggtatgcagacaacgagtcagagtttccccttgaaagcctcaaaagtgtccacgtcctcaaaaagaatggaaccaatttaagaagccagccccgtggccacgtcccttcccccattcgctccctcctctgcgcccccgcaggctcctcccagctgtggctgcccgggcccccagccccagccctcccattggtggaggcccttttggaggcaccctagggccagggaaacttttgccgtataaatagggcagatccgggctttattattttagcaccacggcagcaggaggtttcggctaagttggaggtactggccacgactgcatgcccgcgcccgccaggtgatacctccgccggtgacccaggggctctgcgacacaaggagtctgcatgtctaagtgctagacatgctcagctttgtggatacgcggactttgttgctgcttgcagtaaccttatgcctagcaacatgccaatgtacacttggagggcagactctcagtaaatttccaccctacttgcacatagaaaggtctgaacaaggtccaccaggccccccaggcagagatggtgaagatggtcccacaggccctcctggtccacctggtcctcctggcccccctggtctcggtgggaactttgctgctcagtatgatggaaaaggagttggacttggccctggaccaatgggcttaatgggacctagaggcccacctggtgcagctggagccccaggccctcaaggtttccaaggacctgctggtgagcctggtgaacctggtcaaactggtcctgcaggtgctcgtggtccagctggccctcctggcaaggctggtgaagatggtcaccctggaaaacccggacgacctggtgagagaggagttgttggaccacagggtgctcgtggtttccctggaactcctggacttcctggcttcaaaggcattaggggacacaatggtctggatggattgaagggacagcccggtgctcctggtgtgaagggtgaacctggtgcccctggtgaaaatggaactccaggtcaaacaggagcccgtgggcttcctggtgagagaggacgtgttggtgcccctggcccagctggtgcccgtggcagtgatggaagtgtgggtcccgtgggtcctgctggtcccattgggtctgctggccctccaggcttcccaggtgcccctggccccaagggtgaaattggagctgttggtaacgctggtcctgctggtcccgccggtccccgtggtgaagtgggtcttccaggcctctccggccccgttggacctcctggtaatcctggagcaaacggccttactggtgccaagggtgctgctggccttcccggcgttgctggggctcccggcctccctggaccccgcggtattcctggccctgttggtgctgccggtgctactggtgccagaggacttgttggtgagcctggtccagctggctccaaaggagagagcggtaacaagggtgagcccggctctgctgggccccaaggtcctcctggtcccagtggtgaagaaggaaagagaggccctaatggggaagctggatctgccggccctccaggacctcctgggctgagaggtagtcctggttctcgtggtcttcctggagctgatggcagagctggcgtcatgggccctcctggtagtcgtggtgcaagtggccctgctggagtccgaggacctaatggagatgctggtcgccctggggagcctggtctcatgggacccagaggtcttcctggttcccctggaaatatcggccccgctggaaaagaaggtcctgtcggcctccctggcatcgacggcaggcctggcccaattggcccagctggagcaagaggagagcctggcaacattggattccctggacccaaaggccccactggtgatcctggcaaaaacggtgataaaggtcatgctggtcttgctggtgctcggggtgctccaggtcctgatggaaacaatggtgctcagggacctcctggaccacagggtgttcaaggtggaaaaggtgaacagggtccccctggtcctccaggcttccagggtctgcctggcccctcaggtcccgctggtgaagttggcaaaccaggagaaaggggtctccatggtgagtttggtctccctggtcctgctggtccaagaggggaacgcggtcccccaggtgagagtggtgctgccggtcctactggtcctattggaagccgaggtccttctggacccccagggcctgatggaaacaagggtgaacctggtgtggttggtgctgtgggcactgctggtccatctggtcctagtggactcccaggagagaggggtgctgctggcatacctggaggcaagggagaaaagggtgaacctggtctcagaggtgaaattggtaaccctggcagagatggtgctcgtggtgctcctggtgctgtaggtgcccctggtcctgctggagccacaggtgaccggggcgaagctggggctgctggtcctgctggtcctgctggtcctcggggaagccctggtgaacgtggtgaggtcggtcctgctggccccaatggatttgctggtcctgctggtgctgctggtcaacctggtgctaaaggagaaagaggagccaaagggcctaagggtgaaaacggtgttgttggtcccacaggccccgttggagctgctggcccagctggtccaaatggtccccccggtcctgctggaagtcgtggtgatggaggcccccctggtatgactggtttccctggtgctgctggacggactggtcccccaggaccctctggtatttctggccctcctggtccccctggtcctgctgggaaagaagggcttcgtggtcctcgtggtgaccaaggtccagttggccgaactggagaagtaggtgcagttggtccccctggcttcgctggtgagaagggtccctctggagaggctggtactgctggacctcctggcactccaggtcctcagggtcttcttggtgctcctggtattctgggtctccctggctcgagaggtgaacgtggtctaccaggtgttgctggtgctgtgggtgaacctggtcctcttggcattgccggccctcctggggcccgtggtcctcctggtgctgtgggtagtcctggagtcaacggtgctcctggtgaagctggtcgtgatggcaaccctgggaacgatggtcccccaggtcgcgatggtcaacccggacacaagggagagcgcggttaccctggcaatattggtcccgttggtgctgcaggtgcacctggtcctcatggccccgtgggtcctgctggcaaacatggaaaccgtggtgaaactggtccttctggtcctgttggtcctgctggtgctgttggcccaagaggtcctagtggcccacaaggcattcgtggcgataagggagagcccggtgaaaaggggcccagaggtcttcctggcttaaagggacacaatggattgcaaggtctgcctggtatcgctggtcaccatggtgatcaaggtgctcctggctccgtgggtcctgctggtcctaggggccctgctggtccttctggccctgctggaaaagatggtcgcactggacatcctggtacagttggacctgctggcattcgaggccctcagggtcaccaaggccctgctggcccccctggtccccctggccctcctggacctccaggtgtaagcggtggtggttatgactttggttacgatggagacttctacagggctgaccagcctcgctcagcaccttctctcagacccaaggactatgaagttgatgctactctgaagtctctcaacaaccagattgagacccttcttactcctgaaggctctagaaagaacccagctcgcacatgccgtgacttgagactcagccacccagagtggagcagtggttactactggattgaccctaaccaaggatgcactatggatgctatcaaagtatactgtgatttctctactggcgaaacctgtatccgggcccaacctgaaaacatcccagccaagaactggtataggagctccaaggacaagaaacacgtctggctaggagaaactatcaatgctggcagccagtttgaatataatgtagaaggagtgacttccaaggaaatggctacccaacttgccttcatgcgcctgctggccaactatgcctctcagaacatcacctaccactgcaagaacagcattgcatacatggatgaggagactggcaacctgaaaaaggctgtcattctacagggctctaatgatgttgaacttgttgctgagggcaacagcaggttcacttacactgttcttgtagatggctgctctaaaaagacaaatgaatggggaaagacaatcattgaatacaaaacaaataagccatcacgcctgcccttccttgatattgcacctttggacatcggtggtgctgaccaggaattctttgtggacattggcccagtctgtttcaaataaatgaactcaatctaaattaaaaaagaaagaaatttgaaaaaactttctctttgccatttcttcttcttcttttttaactgaaagctgaatccttccatttcttctgcacatctacttgcttaaattgtgggcaaaagagaaaaagaaggattgatcagagcattgtgcaatacagtttcattaactccttcccccgctcccccaaaaatttgaatttttttttcaacactcttacacctgttatggaaaatgtcaacctttgtaagaaaaccaaaataaaaattgaaaaataaaaaccataaacatttgcaccacttgtggcttttgaatatcttccacagagggaagtttaaaacccaaacttccaaaggtttaaactacctcaaaacactttcccatgagtgtgatccacattgttaggtgctgacctagacagagatgaactgaggtccttgttttgttttgttcataatacaaaggtgctaattaatagtatttcagatacttgaagaatgttgatggtgctagaagaatttgagaagaaatactcctgtattgagttgtatcgtgtggtgtattttttaaaaaatttgatttagcattcatattttccatcttattcccaattaaaagtatgcagattatttgcccaaatcttcttcagattcagcatttgttctttgccagtctcattttcatcttcttccatggttccacagaagctttgtttcttgggcaagcagaaaaattaaattgtacctattttgtatatgtgagatgtttaaataaattgtgaaaaaaatgaaataaagcatgtttggttttccaaaagaacatat

SEQ ID NO: 1279 - DNA, 4101 bp, Artificial Sequence
  derived and/or modified sequence
atgctgtctttcgtggatactcggaccttacttctgctggcggtgacgctgtgcttagctacttgccagtctttacaggaagaaacagtgcggaagggaccggctggcgaccggggaccccggggcgagcggggccctcctggcccacctggtcgcgatggggaggacggccctactggacccccaggcccaccaggtccccccggcccccctggactgggtggtaattttgccgcacaatacgatggcaaaggagttggtttagggcctggccctatgggcctgatgggccccagaggccctcctggggcagccggagcaccgggtccacagggttttcaaggccccgccggtgaacccggcgaacccggacagactggtcccgcaggtgcccgaggccctgccggccccccaggtaaagccggggaagacggacacccgggaaagccaggccgccccggcgaaaggggagtcgtcggacctcagggcgcgcgggggttccccggcactcccggactacccggcttcaaggggatacggggtcacaatggcttggatgggctcaagggccaaccgggggcaccaggagtaaagggggagcctggtgctcccggagagaacgggacgcctggtcaaactggggctcgggggctgcccggcgagaggggacgcgtaggcgctcctggacccgcgggggcacgtggttcagatgggtccgtggggcctgtaggccctgcgggccccataggttcggctgggccgcccggattcccaggtgcccccgggcctaagggagagataggtgcagtcggcaatgccggccctgctggccccgctggacctcgtggggaagtaggtctgccaggactgtcagggcccgtcggacctcctggcaaccccggcgctaacggactgaccggcgcaaagggagctgccggactgccaggcgtggccggagctcctggattgccaggccctcgtgggatacctgggcctgtgggggccgctggtgccacaggagcacgtgggctggtgggagaaccgggacccgccgggagtaagggcgaaagcggtaataagggcgagcccggttccgctggcccacaaggcccgcccggtccctcgggtgaagaaggaaagcggggcccaaatggggaggctggctcagctggtccccctgggcctccggggctccgagggtccccagggtccagaggactccccggagcagacggacgcgccggagtgatgggacctccaggttcccggggggcaagcggtcccgcaggggtcagagggcccaacggtgacgctgggaggccgggggagccaggactgatggggcctcgaggcttacccggttctccaggtaatattgggcctgctgggaaagaaggccccgtcggcctgcccgggattgatgggagacctggacccatcgggccggccggggcaaggggcgagcctgggaatattggattccccggccccaagggcccaactggcgaccctggaaagaacggagataaggggcacgctggtttggctggcgctcgcggagcccctggtccggacggcaataatggggcacagggccctcccggtcctcagggagtgcagggcgggaagggcgaacagggccctcccggacctcccggctttcaaggcctaccaggcccaagtggcccagccggagaagtggggaagccgggcgagcgaggcctgcatggcgagttcgggttacccgggcccgcagggccccgaggggaacgcgggccccctggcgagagcggggcagcaggcccaactggacccataggttcaagggggcccagtggcccaccggggcctgatgggaataaaggggagccaggagtagtgggcgctgtgggaactgcaggacccagcggaccttctggcctgccaggcgagcgtggcgctgccggcatccccggcggcaaaggcgaaaagggcgaacctgggctgcgaggggagattgggaacccagggagagatggcgccagaggagcgcctggagccgtgggcgctcctggaccggcgggcgcgaccggggatagaggcgaggctggcgcggcgggccctgccggacccgcggggccacgcggctctcctggcgaaaggggtgaggtgggccctgctggcccgaacgggtttgccggaccagccggtgcggctggccaaccaggagctaagggcgaacgaggcgcaaaaggacctaaaggggaaaacggtgtagtgggccccacaggaccagtcggggctgcgggaccagcaggaccaaacggaccgcctggtcccgctggcagcaggggagatggaggtccgcccggtatgaccgggttcccaggggcagcaggacggacgggccctccaggtccctccgggattagcggaccacctggaccaccgggaccagctggtaaggaagggctgaggggacctcgtggcgatcaaggacccgtaggacgcactggggaagtcggagcggtcgggcctccgggcttcgccggggaaaaaggcccttccggcgaggccggcacagcgggtcccccgggtacccccgggccgcagggactgctgggcgcccccggcatccttggcctgcctggttcccggggggaaaggggcctgccaggcgttgctggagcagtaggcgagcccggaccgttggggatagccggcccccccggcgctagggggccacctggggccgtcggcagcccgggggtcaacggtgctccgggagaagccggaagggacggtaaccctggtaatgatggtcctccagggcgggacggccagcctgggcacaagggcgagcgcgggtaccccggtaatattggacccgtcggcgcagccggtgcgccaggtccccacggcccagtcggccccgctggaaaacacggaaatcggggtgagaccgggccttccgggcccgtgggtcctgccggtgccgtgggccctcgcggaccctcaggtccccagggaatccgcggggataaaggagaacccggcgagaaaggcccccggggactgccaggattaaagggtcacaatggcctgcaaggactccccggaattgctggccatcatggcgatcaaggcgctccgggctccgtggggccagcaggcccccggggacctgcagggccatccggtcctgcgggcaaggatggaaggaccggccatcctgggacagttggtcccgctggaataagggggccgcagggtcaccaaggtcctgctggcccacctggaccaccaggcccacccggacctcctggagtttctggaggtgggtatgactttggctatgatggcgatttctacagggccgaccaaccaagaagtgcacccagcctccggcccaaagactatgaagtggacgctaccttgaagagcctcaataaccagatagagacattattaactcccgaaggcagcagaaagaacccagcaagaacctgtcgtgaccttcggttaagtcaccctgaatggtcaagtggctactactggattgatcccaaccagggctgcacaatggatgctattaaggtctactgcgatttcagtacaggggagacgtgcatcagagcccagcctgaaaatatcccagccaagaactggtacaggtccagtaaggataagaaacatgtgtggttgggcgagacaattaatgcaggttctcagtttgagtataacgttgaaggcgttacttcaaaagagatggcgactcaactggcttttatgaggctgctcgctaattatgcatcgcagaatatcacgtaccattgcaagaatagcatcgcgtacatggatgaagagactggaaacctgaagaaagcagtaatcctgcagggctctaacgacgtggagttagtcgcggaagggaacagccggttcacgtatacagtgctagttgacggttgtagtaagaagacaaatgagtggggcaaaacaattatcgagtataagacaaataagccatcccgactacccttcctggatattgcccccctggacattggtggcgctgatcaggagtttttcgttgatattgggccagtttgcttcaagtag

SEQ ID NO: 1280 - DNA, 4104 bp, Artificial Sequence
  derived and/or modified sequence
atgttgtcatttgtggacacgcgcacactgctgctcttagctgtgactctgtgtctggccacatgtcagtgcacccttggcggccagacactgagcaagttccctccataccttcacatcgagcgctccgaacagggccctcccggaccccctggtcgcgacggcgaagatggccctacggggccaccggggccaccaggccctccaggaccaccgggcttgggcgggaactttgccgcgcagtatgacgggaagggcgtgggtcttggacctggacccatgggccttatggggcctcgcggtccgcccggcgccgcaggggcccccgggccacagggctttcaaggacccgcaggcgaacccggtgaacccggccagacaggtccagccggagcccgcgggcccgctggcccacccggaaaggccggcgaggacggccaccctggaaagcctgggcgacccggtgagcgcggcgtagtcgggcctcagggcgcccggggttttcctggtacaccaggcttacccggtttcaagggtatccgaggacataatggacttgacggtcttaagggtcaacctggagcacctggggtgaagggggaaccgggcgcccccggtgagaatggcacaccaggccaaactggggcccgcggcttgccgggtgagcgtggaagggtgggggcacctggccctgccggtgcccgcggctcagacgggagcgtaggccccgttggccctgcggggcccatcgggtctgcaggtccgcccgggtttccaggagctccaggtcccaagggggaaatcggagccgtgggcaatgcagggcccgccggccctgcgggtccaagaggtgaagtaggactgcctggcctgtccggtccagtcgggcctccaggaaatcccggggcaaatggccttacaggcgcaaagggagcggccggccttcccggagtggccggtgccccgggattgcccggcccacgcggaattccaggcccggtaggggcggccggagctaccggcgcacgcgggttggtaggcgagccaggcccagctgggagtaagggcgaatccgggaataaaggtgagcctggtagtgcgggaccacaaggtcccccaggcccatcaggtgaagaaggtaagagagggcccaatggggaggccggttcagcgggacctccgggccctccgggtctccgagggtcccctgggagtagagggctgcctggagccgatggccgagccggcgtcatgggcccgcccggatcccggggcgctagtggacccgcaggagtgcgaggacctaatggcgatgcaggcagaccgggcgaaccggggctgatgggaccaaggggactgcccggatcccctgggaatatcggccccgccggcaaagagggacctgtcggactaccaggtatagatggccggcccgggcctatcggtcccgccggcgctcgcggagagcccggaaacatcggcttcccaggcccgaagggccctactggagatcccgggaaaaacggtgataagggacacgccggcctggctggcgcgagaggtgcccccggacccgatggcaacaacggcgcccagggcccacccggccctcagggggtccaaggcggaaagggggagcagggcccccccggcccacccggatttcagggactgcctgggccctcaggccctgctggagaagttggcaagccaggggaaagaggtctgcatggagaatttgggctgccgggccccgccggacctagaggcgaacgcggacccccaggggagagtggcgcagctggccctactggtcctattggctccagaggtccgtcagggcctcccggacccgatggaaataagggagagcccggggttgtgggggctgtaggtaccgctggacctagtggacccagcggactcccaggggagaggggggccgcaggcattccaggaggcaagggcgagaagggtgagccaggcttgcgtggcgagatcgggaatccaggccgggatggagctcgaggagcgcccggagcagtaggagccccaggtcccgcgggggccactggcgaccgaggagaggcaggagctgctggaccggccggccccgccggcccacgaggctcgccaggagaacgcggggaggtggggccagcgggacccaacggcttcgccggaccagccggcgctgcgggccaacctggcgccaaaggagagcgtggggccaaaggacccaagggagaaaacggtgttgttggccccaccggcccggtgggcgctgcaggcccagccgggcctaacggcccaccaggcccagcaggatccaggggtgacgggggtccccctggaatgactggattcccgggcgcagcaggccgcactggtccacctgggcccagcggcatttccggtcccccggggcctcctgggcctgccggcaaagaaggactgaggggacctcgcggggatcaaggtcccgtgggtcggacgggagaagtgggggccgttggaccccccggcttcgctggtgaaaaagggcccagtggggaggcaggaaccgccggccctccggggactcctggtccgcaggggttattgggcgcccctgggattctaggactcccaggcagccggggtgaacgaggtctccctggtgttgccggagctgtaggagaacccggaccactgggaattgccggcccccccggcgccaggggcccacccggcgcggtgggatctcccggcgtgaacggtgcaccaggggaagcaggcagggatggaaatcccggaaacgatgggccacctgggcgcgacggtcaaccagggcacaagggcgagcgcgggtatcctggtaacatcggccccgtaggggccgcgggtgcacccggaccccacgggcccgtggggccagctggtaagcatggcaatcgcggtgaaaccggcccctccggacccgtgggcccagcaggcgcagttggtcctagaggcccatccggcccccagggcattcgcggggataagggagaaccgggggagaagggcccaaggggtttacctggtctgaaaggccataacggactgcaggggctccctggaattgctggacatcacggcgaccaaggagcccctgggtcagttgggccagcaggcccgaggggtccagcaggtcctagcggtccggccggtaaggatggccggactggccaccccggcacagtcgggccggcaggcattagagggccccagggccaccagggacctgccgggcctcccggcccgcccggtccccctggcccacctggagttagtgggggggggtacgactttgggtatgatggtgacttttaccgggcagatcagccaagaagcgcaccaagcctccgtcccaaagattacgaggtggatgccaccctcaagagcctaaacaatcagatcgagaccctattgacaccagagggatcccgtaagaaccccgcccgtacatgccgggacctgcgactttcccatccagagtggtcgagcggatattactggattgatccaaatcaagggtgtactatggatgcgataaaggtgtactgcgatttcagcaccggagagacctgcattcgggcccaaccggagaatatcccggctaaaaattggtatcgaagctccaaggacaagaagcacgtctggcttggcgagacaattaatgctggatcacaattcgagtataacgtggagggcgttacgagcaaagaaatggccacacagctggcatttatgcggctgctggcaaattacgcctctcaaaatataacttaccattgtaaaaattcgatcgcctatatggacgaagagaccgggaacttgaaaaaggctgtaattttgcaagggtcaaatgatgtagagctagtggctgaggggaatagtcgttttacttacactgtcctggtggacggttgttcaaagaagaccaacgaatggggcaaaactattatagagtacaagactaataagccatccaggctgccttttctcgacatcgccccattagacatcggcggcgccgaccaggagttttttgtggatatcggaccagtgtgttttaaatag

SEQ ID NO: 1281 - DNA, 4101 bp, Artificial Sequence
  derived and/or modified sequence
atgctgagctttgtggacaccaggaccctgctgctgctggccgtgaccctgtgcctggccacctgccagagcctgcaggaggagaccgtgaggaagggccctgctggggaccggggccccagaggagagcggggccccccaggccccccaggaagagatggagaagatggccccactggacctcctggccccccaggccccccaggccccccaggcctgggcggcaactttgctgcccagtatgatggcaagggcgtgggcctgggccctggccccatgggcctgatgggcccccggggccccccaggagctgctggggcccctggcccccagggcttccagggccctgctggggagcccggggagcccggccagacaggccctgctggggcccggggccctgctggccccccaggcaaggctggagaagatggccaccctgggaagccaggccggcctggagagcggggcgtggtgggcccccagggcgcccggggcttccctggcaccccaggcctgcccggcttcaagggcatccggggccacaacggcctggatggcctgaagggccagcccggggcccctggggtgaagggggagcccggggcccctggagaaaatggcaccccaggccagacaggagcccggggcctgcctggagagcggggccgggtgggcgcccctggccctgctggggcccggggcagtgatggctctgtgggccctgtgggccctgctggccccatcggcagcgctggccccccaggcttccctggggcccctggccccaagggggagattggagctgtgggcaatgccggccctgctggccctgctggccccagaggagaggtgggcctgcccggcctgagcggccctgtgggccccccaggcaaccctggggccaacggcctgaccggggccaagggagctgctggcctgcccggggtggccggggcccctggcctgcccggcccccggggcatccctggccctgtgggcgccgccggggccactggagcccggggcctggtgggggagcccggccctgctggcagcaagggggagagcggcaacaagggggagcccggcagcgctggcccccagggccccccaggccccagcggggaggagggcaagaggggccccaacggggaggccggcagcgctggccccccaggccccccaggcctgcggggcagccctggcagccggggcctgcccggggctgatggccgggccggcgtgatgggccccccaggcagcagaggagccagcggccctgctggggtgcggggccccaatggagatgctggccggcctggagagcccggcctgatgggcccccggggcctgcccggcagccctggcaacatcggccctgctgggaaggagggccctgtgggcctgcccggcattgatggccggcccggccccatcggccctgctggggcccggggggagcccggcaacatcggcttccctggccccaagggccccactggagaccccgggaagaatggagacaagggccatgctggcctggccggggcccggggggcccctggcccagatggcaacaacggggcccagggccccccaggcccccagggcgtgcagggcggcaaaggagagcagggccccccaggccccccaggcttccagggcctgcccggccccagcggccctgctggggaggtgggcaagccaggagagcggggcctgcacggggagtttggcctgcccggccctgctggccccagaggagagcggggccccccaggagagagcggggccgccggccccaccggccccatcggcagccggggccccagcggccccccaggcccagatggcaacaagggggagcccggggtggtgggcgctgtgggcacagctggccccagcggccccagcggcctgcccggggagagaggagctgctggcatccctgggggcaagggggagaagggggagcccggcctgcggggggagatcggcaaccctggaagagatggagcccggggggcccctggagctgtgggcgcccctggccctgctggggccaccggggacagaggagaggccggggctgctggccctgctggccctgctggcccccggggcagccctggagagcggggggaggtgggccctgctggccccaatggatttgctggccctgctggagctgctggccagcccggggccaagggggagcggggggccaagggccccaagggagaaaatggagtggtgggccccaccggccctgtgggcgccgccggccctgctggccccaacggccccccaggccctgctggcagcagaggagatggcggccccccaggcatgacaggcttccctggagctgctggccgcactggacctcctggccccagcggcatcagcggccccccaggccccccaggccctgctgggaaggagggcctgcggggccccaggggggaccagggccctgtgggccgcactggagaggtgggcgctgtgggccccccaggctttgctggggagaagggccccagcggggaggccggcacagctggccccccaggcaccccaggcccccagggcctgctgggcgcccctggcatcctgggcctgcccggcagcagaggagagcggggcctgcccggggtggccggggctgtgggggagcccggccccctgggcattgctggccccccaggggcccggggccccccaggagctgtgggcagccctggggtgaatggagcccctggagaggccggcagagatggcaaccctggaaatgatggccccccaggaagagatggccagcccggccacaagggggagcggggctacccaggcaacatcggccctgtgggcgccgccggggcccctggcccccacggccctgtgggccctgctgggaagcacggcaacagaggagaaacaggccccagcggccctgtgggccctgctggagctgtgggcccccggggccccagcggcccccagggcatccggggggacaagggggagcctggagagaagggcccccggggcctgcccggcctgaagggccacaacggcctgcagggcctgcccggcattgctggccaccacggggaccagggcgcccctggctctgtgggccctgctggcccccggggccctgctggccccagcggccctgctgggaaggatggccgcacaggccaccctggcaccgtgggccctgctggcatccggggcccccagggccaccagggccctgctggccccccaggccccccaggccccccaggccccccaggagtgtctgggggcggctatgactttggctatgatggagacttctacagagctgaccagcccaggtctgcccccagcctgcggcccaaggactatgaggtggatgccaccctgaagagcctgaacaaccagatcgagaccctgctgaccccagagggcagcaggaagaacccagcccggacctgccgggacctgcggctgagccaccctgagtggagcagcggctactactggattgaccccaaccagggctgcaccatggatgccatcaaggtgtactgtgacttcagcactggagagacctgcatccgggcccagcctgagaacatcccagccaagaactggtaccgcagcagcaaggacaagaagcacgtgtggctgggggagaccatcaatgccggcagccagtttgagtacaacgtggagggcgtgaccagcaaggagatggccacccagctggccttcatgaggctgctggccaactatgccagccagaacatcacctaccactgcaagaacagcatcgcctacatggatgaggagactggaaacctgaagaaggctgtgatcctgcagggcagcaatgatgtggagctggtggccgagggcaacagccgcttcacctacacagtgctggtggatggctgcagcaagaagaccaatgagtggggcaagaccatcatcgagtacaagaccaacaagcccagccggctgcccttcctggacatcgcccccctggacattggaggagctgaccaggagttctttgtggacatcggccctgtgtgcttcaagtag

SEQ ID NO: 1282 - DNA, 4104 bp, Artificial Sequence
  derived and/or modified sequence
atgctgagctttgtggacaccaggaccctgctgctgctggccgtgaccctgtgcctggccacctgccagtgcaccctgggcggccagaccctgagcaagtttcctccctacctgcacatcgagaggtctgagcagggccccccaggccccccaggaagagatggagaagatggccccaccggccccccaggccccccaggccccccaggccccccaggcctgggcggcaactttgctgcccagtatgatggaaaaggagtgggcctgggccctggccccatgggcctgatgggcccccggggccccccaggagctgctggggcccctggcccccagggcttccagggccctgctggggagcctggagagcccggccagacaggccctgctggggcccggggccctgctggccccccaggcaaggccggggaggatggccaccctgggaagccaggccggcctggagagcggggcgtggtgggcccccagggcgcccggggcttccctggcaccccaggcctgcccggcttcaagggcatccggggccacaacggcctggatggcctgaagggccagcccggggcccctggggtgaagggggagcccggggcccctggagaaaatggcaccccaggccagacaggagcccggggcctgcccggggagcggggccgggtgggcgcccctggccctgctggggcccggggcagtgatggctctgtgggccctgtgggccctgctggccccatcggcagcgctggccccccaggcttccctggggcccctggccccaagggggagatcggggctgtgggcaatgccggccctgctggccctgctggccccagaggagaggtgggcctgcccggcctgagcggccctgtgggccccccaggcaaccctggggccaacggcctgactggagccaagggagctgctggcctgcccggggtggccggggcccctggcctgcccggcccccggggcatccctggccctgtgggcgctgctggggccaccggggcccggggcctggtgggggagcccggccctgctggcagcaaaggagagagcggcaacaagggggagcccggcagcgctggcccccagggccccccaggccccagcggggaggagggcaagaggggccccaatggagaggccggcagcgctggccccccaggccccccaggcctgcggggcagccctggcagccggggcctgcctggagcagatggccgggccggcgtgatgggccccccaggcagcagaggagccagcggccctgctggggtgcggggccccaatggagatgctggccggcctggagagcccggcctgatgggcccccggggcctgcccggcagccctggcaacatcggccctgctgggaaggagggccctgtgggcctgcccggcattgatggccggcccggccccatcggccctgctggggcccggggggagcccggcaacatcggcttccctggccccaagggccccaccggggaccccgggaagaatggagacaagggccacgccggcctggccggggcccggggggcccctggcccagatggcaacaatggagcccagggccccccaggcccccagggcgtgcagggcggcaagggggagcagggccccccaggccccccaggcttccagggcctgcccggccccagcggccctgctggggaggtgggcaagccaggagagcggggcctgcatggagaatttggcctgcccggccctgctggccccagaggagagcggggccccccaggagagagcggggctgctggccccaccggccccatcggcagccggggccccagcggccccccaggcccagatggcaacaagggggagcccggggtggtgggcgctgtgggcacagctggccccagcggccccagcggcctgcctggagagagaggagctgctggcatccctgggggcaaaggagagaagggggagcccggcctgcggggggagatcggcaaccctggaagagatggagcccggggggcccctggagctgtgggcgcccctggccctgctggggccactggagacagaggagaggccggggccgccggccctgctggccctgctggcccccggggcagccctggagagcggggggaggtgggccctgctggccccaacggctttgctggccctgctggagctgctggccagcccggggccaagggggagcggggggccaagggccccaagggggagaatggagtggtgggccccactggacctgtgggcgctgctggccctgctggccccaatggacctcctggccctgctggcagcagaggagatggcggccccccaggcatgacaggcttccctggagctgctggccgcacaggccccccaggccccagcggcatcagcggccccccaggccccccaggccctgctgggaaggagggcctgcggggccccaggggggaccagggccctgtgggccgcactggagaggtgggcgctgtgggccccccaggctttgctggggagaagggccccagcggggaggccggcacagctggccccccaggcaccccaggcccccagggcctgctgggcgcccctggcatcctgggcctgcccggcagcagaggagagcggggcctgcccggggtggccggggctgtgggggagcccggccccctgggcattgctggccccccaggggcccggggccccccaggagctgtgggcagccctggggtgaatggagcccctggagaggccggcagagatggcaaccctggaaatgatggccccccaggaagagatggccagcccggccacaagggggagcggggctacccaggcaacatcggccctgtgggcgctgctggggcccctggcccccacggccctgtgggccctgctgggaagcacggcaacagaggagagaccggccccagcggccctgtgggccctgctggagctgtgggcccccggggccccagcggcccccagggcatccggggggacaagggggagcccggggagaagggcccccggggcctgcccggcctgaagggccacaacggcctgcagggcctgcccggcattgctggccaccacggggaccagggcgcccctggctctgtgggccctgctggcccccggggccctgctggccccagcggccctgctgggaaggatggccgcacaggccaccctggcaccgtgggccctgctggcatccggggcccccagggccaccagggccctgctggccccccaggccccccaggccccccaggccccccaggagtgtctgggggcggctatgactttggctatgatggagacttctacagagctgaccagcccaggtctgcccccagcctgcggcccaaggactatgaggtggatgccaccctgaagagcctgaacaaccagatcgagaccctgctgaccccagagggcagcaggaagaacccagcccggacctgccgggacctgcggctgagccaccctgagtggagcagcggctactactggattgaccccaaccagggctgcaccatggatgccatcaaggtgtactgtgacttcagcactggagagacctgcatccgggcccagcctgagaacatcccagccaagaactggtaccgcagcagcaaggacaagaagcacgtgtggctgggggagaccatcaatgccggcagccagtttgagtacaacgtggagggcgtgaccagcaaggagatggccacccagctggccttcatgaggctgctggccaactatgccagccagaacatcacctaccactgcaagaacagcatcgcctacatggatgaggagaccggcaacctgaagaaggccgtcatcctgcagggcagcaatgatgtggagctggtggccgagggcaacagccgcttcacctacacagtgctggtggatggctgcagcaagaagaccaatgagtggggcaagaccatcatcgagtacaagaccaacaagcccagccggctgcccttcctggacatcgcccccctggacatcggcggcgctgaccaggagttctttgtggacatcggccctgtgtgcttcaagtag

SEQ ID NO: 1283 - DNA, 4101 bp, Artificial Sequence
  derived and/or modified sequence
atgctgagcttcgtggacacccggaccctgctgctgctggccgtgaccctctgtcttgcgacgtgccagagcttgcaggaagaaacggtgagaaagggaccggccggagacaggggccctagaggagagcggggacctccagggccacctggaagggacggagaggacggtcccacagggccgcctgggccccccggcccaccaggcccgccgggcctgggcggaaatttcgcagcccagtacgatggcaagggagttgggttgggacctggccccatgggactgatgggacccagaggacccccaggagcagcaggcgcccccggcccccagggatttcagggccccgctggtgagcccggtgagcccggccagactgggccagcaggcgctcgcggcccagcagggcctcccggcaaggctggcgaagatggtcaccctggaaagcccggcaggcccggcgaaaggggcgtggtgggaccacagggagctcgtggcttcccaggaaccccgggtctccctggctttaagggcatccggggccacaatgggctagacggcctaaaggggcagcctggcgccccaggggtcaagggggaacccggtgcaccaggggagaatgggacgccaggtcaaacgggggcacggggactgcccggggagaggggcagagtaggcgctccaggacctgccggtgcacgaggcagcgatggatccgtaggccccgtggggccagctggcccaatcggaagtgccggcccaccaggttttcccggcgctcctggcccgaaaggcgagattggagctgtgggcaacgcaggccccgctggtcctgcagggcctcgcggggaagtcgggctgcctggtttgtccggcccggtcggaccccccggcaaccccggagctaacggtttaacaggtgccaaaggggcagccggtttgcccggtgttgccggggcaccaggcctgccgggacctaggggaatccctggccccgtgggtgccgccggcgcgactggcgcccgggggctcgtgggcgagcccggccccgcagggtccaaaggggagtccgggaataaaggagagccgggaagcgccggtccccagggccccccgggccctagcggtgaggaggggaaaaggggacccaatggtgaggcgggctccgctgggccccccggccctccagggctgaggggctcaccgggtagtcgcggccttcccggagctgacgggcgggccggcgtcatggggcccccagggagccgtggagccagtggaccagctggagtcagaggaccaaacggtgatgcggggaggcccggtgagccaggactgatgggtccacgaggtctgccgggtagccctggcaacatcgggcccgcaggaaaagaaggccctgtgggactaccaggcattgacgggcggccaggcccgattgggcccgccggcgcccgcggagagccagggaacataggattcccaggccctaagggtcctactggcgatcctgggaagaacggggacaaaggtcatgccggactcgcaggtgcacggggagcccccggcccagacggaaacaatggggctcaaggaccaccaggcccacagggcgtgcaaggaggaaaaggagagcagggtccccccggtcctccaggctttcaggggctgcccggaccgagtggccccgccggcgaagtcggtaaaccaggtgagagaggccttcatggcgagttcggccttcctgggcccgcgggaccgagaggggagcgcggtcctcccggagaatccggcgccgctggacctactggtcctatcggctctaggggaccctccgggccccccgggcccgacggcaataaaggcgaacccggggtagtgggtgcggtcgggacagctgggccctccggcccatccgggctccccggtgaacggggcgccgctggaatcccaggaggaaaaggggagaaaggcgagccaggcttaaggggggaaattgggaacccggggcgtgatggagccaggggggctcctggagcagttggagctccaggcccagcgggggctacaggagatagaggcgaagccggtgccgcaggtcctgcagggcccgcagggccccgaggttcgcccggggaacgcggagaggtgggccccgcagggcctaacggatttgctggaccagccggcgccgcaggtcagcctggtgctaaaggtgaaaggggagccaaggggccaaaaggggagaatggggtcgtaggccccaccggacccgtgggcgcagcagggccagccggtcctaatgggccccctggtcccgccggctctcgtggtgatggcggaccccctgggatgactggttttccgggcgcagctgggcgtactgggccacctggcccaagtgggatctcaggccctcccggcccacccggccctgccgggaaggaagggctgagaggccccagaggggaccagggccccgtaggtaggacaggcgaggttggggccgtgggtcccccgggcttcgctggcgaaaaaggacctagcggagaagctggaacagcgggtcctccagggaccccagggcctcagggactgttaggagccccggggatcctgggcctgcccggctcccgaggggagcgtggcctgcccggagtggcaggggctgtgggagaacccggtcccctgggaattgctgggccacccggagccagaggtcccccaggtgcagtcggatccccaggggtcaatggcgctcccggagaggctggacgcgacggtaacccaggtaacgacgggccaccaggcagggatggtcagcccggtcataaaggagagaggggttacccgggaaacatcgggccggttggagccgctggcgcacccggtccacacggcccagtcggcccagctggcaaacacggcaacagaggggagactgggccctccggccctgtggggcccgcgggggctgtaggcccacggggcccttccggcccacagggcattcgaggcgacaaaggtgaacccggcgaaaaaggacctcgcggtctgcccggtttgaagggccacaatggccttcaaggcctgccaggcatcgccgggcaccacggcgaccagggggctccaggctcagttggacctgccggtccgcggggacctgctggtcccagtggaccagccgggaaggatggtcgaacaggccaccccgggactgtaggtccagctgggattagagggccgcaagggcatcagggaccagccggcccacccgggcccccaggacctcccgggcccccgggggtgtccggcggcggatacgacttcggatatgacggagacttctaccgcgccgaccagcctcggtccgctccatcattgaggcctaaggactatgaagtcgacgctactctgaaatccctcaataatcagattgagacactccttactccagagggtagccgaaagaaccccgcccggacatgccgtgacctgcgactgtctcatccagaatggtcatcgggctactactggatcgatcccaatcagggctgtaccatggatgctattaaggtatattgtgacttttctactggagagacctgcatccgcgcgcagccagagaatatccccgccaagaactggtatcggtcatccaaagacaagaagcacgtgtggttaggcgaaacaatcaatgctggttctcagtttgagtacaatgtagagggggtgacatctaaggagatggctacccagctggcatttatgagacttctggctaattatgcctcgcagaatattacctaccactgcaagaactctatcgcttatatggatgaagagacgggaaatttaaagaaggcggtcatcctccaagggtcaaacgatgtggaactggttgccgaagggaattcgcgttttacatacactgtgcttgtggacgggtgctcaaagaaaactaacgagtggggcaaaaccattattgaatacaaaactaataagcccagcaggctgcctttcctggacatcgcaccattagacataggaggcgcagaccaggaattcttcgtggacattggaccagtatgctttaagtag

SEQ ID NO: 1284 - DNA, 4104 bp, Artificial Sequence
  derived and/or modified sequence
atgctgagcttcgtggacacccggaccctgctgctgctggccgtgaccctctgccttgccacatgccagtgcactctaggcggccagacactgtccaagttccccccgtatcttcacattgagcgctccgagcagggcccacccggacccccaggccgagatggagaagacggacccactggccctcccgggccccctggaccccctggtcctccaggcctaggcgggaactttgctgcccagtatgatggaaaaggggtgggtctggggcccggacccatgggcctgatgggccctcgcggaccccctggtgccgcgggggctcccgggccgcaaggcttccagggccctgcaggggagccgggcgagcctggccagaccggacctgctggggcacgcggcccagccggaccaccaggaaaggccggagaggacggacatccaggcaaaccgggacgcccaggcgaacgcggagtggttgggccccagggcgccagaggattccctggtacacctggacttcctggttttaagggaattcgaggacataatggcttggatggactgaagggacagcccggcgcccccggcgtaaaaggggagcctggggcccctggggaaaacggaaccccggggcagactggcgcacgcggtttgccgggggagcgcggccgggtgggtgccccaggccctgcaggagcccgcggatctgacgggagcgtgggacccgtggggcccgctgggcctatcggttctgcagggcctcccgggtttcctggtgcgccaggccctaaaggggagattggcgccgtcggtaacgccggccctgccggtccagcgggcccaaggggcgaggtgggcctcccagggttatcaggtccagtgggcccccctggcaatcccggggccaacggtctaacaggggccaaaggggccgcgggtctgccaggggtagccggcgctccaggtcttcccggacccagggggatcccaggccccgtgggtgccgcgggggccacaggtgctcgcggtctggtgggcgaacctggccccgccgggtctaagggcgagagcgggaataagggcgagccgggctcagctgggcctcagggcccacccggcccatctggcgaggaaggcaagaggggtcccaatggtgaagcgggatccgctggccctccaggaccacctgggttacgcggctcacctggcagtcggggactgcctggagcggatgggcgggccggggtgatggggcctcctggaagcagaggggcgtctgggcctgccggagtgcgcgggcctaacggcgatgctgggagaccaggtgaacccggactgatggggcctagaggcctgccaggcagccccgggaacatcgggcccgctgggaaagaaggccctgtcgggctcccgggcattgacgggagacctggccctataggcccggcgggagctcgcggcgagcccgggaacatcggctttcccggacccaaaggtccgacaggggacccgggaaaaaatggtgataaagggcatgccggtctggccggagccaggggcgccccaggacccgacggaaacaatggagctcaaggaccccccgggccccagggagtgcagggcggcaagggagaacaggggccaccgggtcccccaggcttccaaggtttacccggcccctcagggcctgccggtgaggtgggtaaacccggggaacgaggactgcatggagagttcgggctgccggggcccgccggaccccgcggcgaacgtgggccacccggcgagtctggagccgcaggcccaaccggccccataggcagccgcgggcctagcggacctcccggacccgatggaaacaaaggtgagccaggcgtggttggcgcagtgggcaccgcaggtccaagtgggcctagcggcctgcccggtgagcggggggcagccggaataccaggcgggaagggagagaaaggtgagcctggtctgcggggtgagatcggcaacccaggacgagacggcgcccgaggcgcccctggcgctgtgggagctcctggtccagctggtgcaaccggagacagaggagaggcgggagccgccggcccggctggcccggccggacctcgcggtagccccggtgagcgaggggaggtcggacctgcggggccgaatggctttgcagggcccgcgggggccgccggccagccgggcgcgaagggtgagcggggtgcaaaagggcccaagggggagaacggagtcgtgggcccgaccggacccgttggagccgcaggacccgcagggcccaatggtccgcccggacccgctggatctagaggggacggtggcccacctggaatgaccggatttcccggcgcggccgggagaacgggccctcctggccccagcggtatctccggcccccccggccctccgggccctgctggcaaggagggcctgcggggaccaaggggcgatcaggggccagtcgggaggaccggagaggtgggtgctgtcggaccgccaggatttgcaggcgagaaaggtcctagtggcgaagccgggaccgccgggccacctggaacacctgggccccagggtctattgggcgccccaggaatcttgggactgcccggctctcggggagaaagggggctgcccggtgtggctggtgctgtaggggagcccgggcccctcggcatcgccggacctcctggggccaggggacccccaggagccgtgggcagtcctggcgtgaacggggccccaggagaagctggacgggatggaaatcccggcaatgacgggccccctggtcgagacggccagccgggacataaaggagagcggggctatcccggcaacatcggcccagtgggcgccgcgggagcacccgggcctcacggtccggtcgggcccgccggcaagcacgggaataggggggaaacgggcccctcgggacccgttggacctgcgggagccgtgggacctcgggggccttccgggccgcagggaatcagaggtgacaaaggagaaccaggagaaaagggccctaggggcctgcccggtttaaaaggccacaacggactgcaagggctccctggcattgcagggcaccatggggaccagggtgctcccggcagcgtcggcccagccgggcctagaggccccgcaggaccgtctggccccgccggaaaagacggacgtaccggacacccaggaacagtaggcccagcgggcattcgcgggcctcagggtcaccaggggcccgccgggcctccgggccctccagggcctcctggcccccctggggtgtctggtggcgggtatgacttcggttatgacggagatttctatcgcgccgaccaaccccgatctgctcctagccttcgccctaaggattacgaagtggatgccaccctcaagtctctgaataatcagatcgagacactccttactcctgaagggtccagaaagaacccagctcggacttgcagggacttaaggttgagccaccctgagtggagttccggctactactggatcgaccccaaccagggctgtaccatggacgccatcaaggtgtactgtgatttctcgaccggtgagacttgcatccgggcacagccagaaaatatccccgctaagaattggtaccggagcagcaaggataagaaacatgtgtggctgggcgaaaccatcaacgccggctcccagttcgagtacaacgtcgaaggcgtgacatccaaggaaatggcaacccagctggctttcatgcgcctgctggccaattatgccagccaaaacatcacttaccattgcaagaatagtattgcgtatatggatgaagagaccggcaatctgaagaaggctgtgattctgcagggctcaaacgatgtggaattagtagcagaaggcaattccagattcacttataccgtgctcgtcgacgggtgctccaagaaaacaaatgagtggggaaaaactatcatcgaatataaaaccaacaagccctccaggcttcccttcctcgatatcgcccctctcgacatcggcggggctgaccaagaatttttcgtcgacatcggcccagtgtgttttaagtag

SEQ ID NO: 1285 - DNA, 4101 bp, Artificial Sequence
  derived and/or modified sequence
atgctctccttcgtggacacacgaacgctgctgctgctcgccgttactctgtgtcttgcgacctgccaaagtttacaggaggagacagtccggaaaggtcccgctggcgatcgtggccctcgcggagagcgcggtcccccagggcctcccggtcgcgatggggaggatgggccaactggcccaccgggaccacctggacctccaggcccaccgggactcgggggaaactttgcggctcaatacgatggtaagggggtggggttaggccctgggccaatgggactgatggggccacggggtcctcccggagctgctggagcgccaggtccccagggctttcaggggccagctggggagccgggagagcctggtcagacaggcccagcaggagctcgaggccctgcaggcccacccggaaaggctggggaggatggacatcccggaaaacccggaaggcctggcgagagaggggtggttggaccccagggcgcaagaggattccctggaacccccggactgccgggattcaaaggtatccgtggacacaatggcctggacggattgaagggacagcccggagccccaggggtgaaaggggagcccggagctccgggagagaacggcaccccgggacaaaccggcgctaggggcctacctggtgagcgtgggagagtaggggcacctggtcccgcaggggcaagaggttcggatggctccgtgggcccagtgggccctgcaggccctattgggtctgctggtccccctggctttccaggagctcctggaccaaagggtgaaattggagctgtggggaatgccggacctgcaggacccgcaggcccaagaggggaggtggggctgcccggtctttccggtccagtgggaccaccaggtaatccaggcgcaaacggcctgaccggagcaaagggggcagcgggactcccaggggtcgcgggagctcccggtctgcctggacctcggggaattcccggacccgtcggggcagctggcgcaactggcgcacgcggactggtgggtgagccaggccctgcgggttccaaaggggaaagcggcaacaaaggcgagcctgggtcggctggaccacagggccctccagggccatccggggaagaggggaaacgtggacctaacggggaagctggctccgccggaccccctggtcccccaggcctgagaggtagccctggctctagggggctgcccggtgctgacggccgtgccggtgtcatgggacctcctggatctagaggcgcttctggacctgccggagtgagagggccaaatggcgacgcaggccgacccggagaacctggcctgatgggacccagggggctgccaggttcccccggaaacatcggaccagcagggaaggaagggccagtcggtctccccggaattgatgggcgacctgggcctattggccctgctggcgctaggggcgagcctgggaatattggcttcccaggcccaaagggccctaccggggatcccggaaagaacggcgataaagggcacgcagggcttgctggcgctcggggagcccctggacctgatgggaataatggagcacagggccctcctggacctcagggagtccagggcggaaagggcgagcagggaccccctggtcccccaggattccagggccttccagggccttccgggccagctggagaggtgggtaagcccggagagagaggccttcacggcgaatttgggctgccaggacctgccggacctcggggtgaacgcggaccccctggcgagagcggcgcagcgggacctacaggacctattgggtctcgagggcctagcggccctccaggacccgatgggaacaagggggagcctggagtcgtgggcgcagttggaactgcaggcccatccgggccatctggtctgcctggcgaacgcggtgcggcagggattcccggtggcaagggcgaaaagggcgagccaggcttgagaggcgagatcggaaatccgggaagggatggggctcgaggtgctccaggtgccgtaggagcccctgggccagccggtgccacaggagacaggggggaagcgggagctgcgggaccagctggccctgccggacctagaggatctcctggcgagcgcggagaggtgggtcctgccggtcccaatggttttgccggacccgcaggtgctgcgggtcaaccgggtgctaaaggagagaggggcgctaaggggccaaagggagagaatggtgtggtcgggcctacagggcctgttggagcagccggtcctgccggacccaatggcccaccaggccctgctgggtcgcgaggagatggcggtccccctggaatgacgggcttccctggggctgcgggtaggacggggcctccgggaccatccggcatttctgggcctcccggtcctccaggcccagcaggtaaggagggtctcagagggccacgaggcgaccaaggcccagtgggccgtacaggcgaggtgggcgctgtgggccctccgggtttcgcaggcgagaaaggaccgagtggagaggccggtacagccggacctcccggtacccccggaccacagggactgctgggtgcacctggaatcctaggcctccctgggtctcgtggagagagagggttgccaggcgttgcaggcgctgtaggagaacctggaccgttgggcattgctggccctccaggcgctagagggcctccaggagcggtgggctccccgggagtcaacggggcaccaggagaggccggtcgagacgggaacccaggtaatgacggcccacctggcagagacggccagcctggacacaagggcgagcgtggttaccctggcaatatcgggccagtgggcgctgcaggagcacccggacctcatggacccgttggcccagctggaaagcacgggaacaggggggagactgggccaagcgggcctgtcggtcccgcaggagctgtgggaccaagaggaccatcaggaccccaggggatcaggggggacaaaggcgagccaggcgaaaaaggacccaggggactacctggccttaagggtcacaatgggctgcaagggctccctgggatagccggacatcacggcgaccagggggcacctggttctgtgggtccagctgggccaaggggcccagccggtccttccgggcctgccggtaaagacgggcgtacgggccaccccggaacggtagggcctgcaggcatcagagggccacagggccaccaaggacctgctggtcccccaggaccgcctggccctcctggtcctccgggagtgagcgggggtgggtacgactttgggtatgacggtgacttctatcgggcagaccagccacggtcagctccatctctgcgccctaaggattatgaggtggatgctactctcaagtcactgaataaccagatagagaccctgctgacacccgaaggcagccgtaaaaatccagccaggacctgtcgggacttacggctttcacacccagaatggagcagcggctactattggatcgatccgaatcaaggatgtacaatggatgcaataaaagtctactgcgattttagcaccggcgagacttgtattcgagctcagccagagaatatccctgccaaaaattggtaccgtagcagcaaagacaaaaagcatgtatggctgggggagactattaacgctggaagtcagttcgagtacaacgtcgagggcgttacctccaaggagatggctactcagctggcttttatgagactgctggccaattacgcctcccagaacataacctatcattgtaaaaactccattgcgtatatggacgaggaaaccggcaatctcaaaaaagctgtgatcctacaaggctcaaacgacgtggagcttgtggccgaaggtaacagtcggtttacttacacagttctggtggatggctgcagcaaaaaaactaacgagtgggggaaaactataatcgaatacaaaactaataaaccttcccggctcccgttcctggacattgcacccctggatatcggaggcgctgaccaagaattttttgtggacattggcccagtctgtttcaagtag

SEQ ID NO: 1286 - DNA, 4104 bp, Artificial Sequence
  derived and/or modified sequence
atgctttctttcgtggacacccgtactctgttgctccttgccgtcaccctttgtctggccacctgtcagtgcacgcttgggggacagaccctgtctaaattcccaccttatctccatattgagcggagcgagcaaggacctcctggacccccaggccgtgatggagaagacggacctacaggacccccaggcccaccaggccctcccggaccccctggactgggcggaaatttcgccgcacagtatgacggcaagggcgtgggcctgggacctgggccaatggggctcatgggccctcgtggaccacctggggctgccggtgctcctggtccgcaggggttccagggcccagccggtgagcccggagagccaggtcagaccggcccagcaggagccaggggaccggcaggccctcccggtaaagcaggtgaggacggccacccagggaagcctggccgaccaggagagaggggggtggtggggcctcagggggcacggggattccctggaacaccgggactcccgggatttaaaggcattagaggacataatggactggacgggctgaagggccagcctggcgctccaggcgtaaaaggagagcctggcgctccgggtgagaatggcactcccggtcaaaccggggcaaggggacttcccggagagcgcggtagggtgggtgcgcctggaccagccggagccagaggctcagatggatcggtggggcctgtggggccagctggtcctatcggcagcgcaggacctccagggttccctggtgcaccgggaccaaagggagagataggggcagtggggaacgccggaccagccggacctgcaggtcctcggggtgaggtaggtctccccggactgtctggcccagtcggaccaccgggaaaccccggagcaaacggacttactggcgctaagggagcagccggactgccaggggtggctggagcccctggcctgcccggtcctcgcggtatccctggcccagtcggggcagcaggtgccaccggcgcaagaggcttggtgggggagcctggtcctgctggttccaagggcgaatctggaaataagggcgaaccagggagcgccggaccacaggggccacccggaccctccggcgaggaagggaagaggggccctaatggggaagccggttcggcagggccacccggaccaccgggtcttaggggttctcccggatcacggggattacccggagccgacggtagagccggtgtgatggggccaccaggtagtagaggcgcttcaggccctgccggtgtgcggggaccaaacggcgacgctggaaggccaggtgagccaggcctcatggggcctcgaggtctgcccggaagcccaggtaatattggtccggctggcaaagaggggcctgtgggcctccccggaatcgacggcaggccgggtccaattgggccagctggtgctcgcggtgaaccgggtaacattggcttccccggaccgaagggtcccacaggggatcccggaaagaatggcgataaaggtcacgcaggcttggctggtgctaggggcgctcccggtccagacgggaacaatggtgctcagggcccaccgggaccccagggtgtgcagggcggtaagggcgaacaagggccaccgggtcctccaggatttcagggactgccaggcccaagcggcccagcaggtgaggtcgggaaacctggcgagcggggactccacggagagtttggccttcctggccctgctgggccacgcggtgaaagaggcccaccgggtgagagcggtgctgctggaccaaccggtccaattgggtctcgcggtccaagcggtccacccggacccgatgggaacaaaggggaaccaggtgtggtgggggctgttgggaccgcaggcccatccggaccgtcaggcttacccggagagagaggggctgccggtattccaggcggtaagggtgagaagggtgaacccggactgcgcggtgaaatcggaaaccctggtcgcgacggcgcacgaggtgcgccaggcgctgtgggggctcctggacctgctggcgctaccggcgaccgcggagaggcaggcgctgccggacccgctggccctgccggtccacggggatctcccggagagcggggagaggttggacctgctggcccaaacggttttgccggacctgcaggggctgcgggtcaaccaggagcgaagggagagcggggagcgaaggggcctaagggagagaatggggtagtcggccctactggtcccgttggagccgctggacctgccggacctaacgggcctcccggtcccgctggcagtcgaggggacggcggacctcccggaatgaccgggtttcctggtgcagcaggccgaactggaccacctgggccaagtggaatctccgggccacctggacccccaggtcccgctggtaaggagggactgcgcggaccccgtggagatcagggccctgtcgggagaacgggagaggttggtgcggtgggaccaccgggtttcgccggtgagaaaggcccttccggcgaagccggaaccgctgggccacccggaactccagggcctcaggggctcctcggtgctcccggaatactgggtctcccaggctcgcgcggtgaacgcggtttgcccggtgtggctggcgctgtgggagaacccggtccactggggatcgcaggccctcccggagccaggggaccacccggtgcagtgggctcccctggagtgaatggtgccccaggcgaggctggcagggacggtaacccgggaaatgacgggccacctgggagggacggtcagcctgggcataagggcgagcgcggatacccaggaaatatcgggccagtcggggcagcaggagcccctggcccacatggaccagtggggccagcagggaagcatggaaatagaggcgagaccggcccttccggacccgtaggccctgctggggctgtgggacctagggggccatcaggtccccagggcattagaggcgataagggagagccaggtgaaaagggccctagagggcttcctgggctgaagggacataatggtctccagggattgccgggtatcgcagggcatcatggcgatcagggggctccgggtagcgttggcccagccggacctcggggacccgcaggaccatccggaccagcagggaaggatgggcgaaccggccatccaggtacagtcggaccagccggaattcgtggccctcaagggcatcagggacccgcaggaccccctgggccacccggtcccccaggtccccctggcgtgtcaggcggaggatacgacttcggctacgatggcgatttctaccgcgctgatcagcctcggtctgccccatctctccgacctaaagattatgaggttgacgcaacgctgaagtcgctgaacaaccaaattgagactttactcacccccgaaggcagccggaagaatcctgccaggacttgtagggacctacgccttagtcatccagagtggtcatcaggatactattggattgatccaaaccagggatgcaccatggacgcaatcaaggtgtattgcgatttttccaccggtgaaacctgtattcgagcccagccggaaaatatcccagccaaaaactggtaccgcagcagcaaggacaaaaagcacgtgtggctgggggaaacaattaatgctggcagccaatttgagtacaacgtcgagggagtgacatctaaagaaatggcaacccaactggcctttatgcgacttctggcaaattatgccagtcaaaatattacataccattgcaagaatagtattgcgtacatggacgaagaaacagggaatctgaagaaagcagtcattctccaagggagcaatgatgtggagctggtggctgagggtaatagcaggttcacttacactgtgctagttgatggctgttcaaagaaaacaaatgagtgggggaagacaattattgaatataaaacaaacaagccctctcgattaccatttctcgacattgccccacttgatatcggaggcgctgatcaggagttttttgtggatataggtccagtgtgtttcaagtag

SEQ ID NO: 1287 - DNA, 4101 bp, Artificial Sequence
  derived and/or modified sequence
atgctgtcctttgtcgatactaggacattgctactactggccgtgacattgtgtctggctacatgtcaatctttgcaagaggagactgtgagaaaggggcccgctggcgaccgtgggccccggggagaaagggggccccctggacctccaggcagagatggagaagatggccccaccgggcctcccggtcccccgggcccaccaggccctcctggtctcggaggtaacttcgcagcccagtacgatggcaagggcgtggggctcggtcccggacctatggggctgatggggccacgcgggccgccaggggctgctggcgcgccgggcccccaagggttccaaggccccgctggggagcccggagaaccaggccaaacagggcctgctggagcaagaggccctgcgggacctcctgggaaggctggagaggacgggcacccaggcaagcctgggcggcccggggagcgaggcgtcgtggggccccaaggagccagaggttttcccggtacacccggccttcctggatttaaaggcataaggggtcacaatggacttgacgggttgaaagggcaaccgggcgcaccgggagtgaaaggcgaacccggtgctccaggggagaatggaacgccaggtcagacaggcgccaggggactgccaggggaacgtggaagggtgggagcacccgggcccgccggagccagaggttcagatgggagtgtcggaccagtaggtccggccggccccatcggatcagcaggccctccaggctttccgggagcccctgggcccaaaggcgaaattggagctgtgggcaacgctggaccagccgggcccgctggtccccgtggagaggtaggtcttcctgggttgtcagggcctgtaggtccaccgggcaatcccggcgctaacggtctgaccggcgccaaaggcgcagctgggctgcctggggttgctggggcacccggactgcccggaccccgaggtatccctgggccggtgggtgcggctggcgcgacaggcgccaggggactagttggtgaacccggcccagcgggctccaagggcgagtctggcaataaaggcgaaccagggagcgcggggccacagggcccgcccggccccagcggggaggagggtaagcgtggaccgaatggagaagcgggatcagcaggaccccctggcccccctggactcaggggatctcctggcagcagggggctgcctggggccgatggtagggcaggggttatgggcccaccaggcagtaggggcgcatccggccccgcgggggtccgcggacctaacggtgatgctggacggcccggtgaaccagggctcatgggccctagaggcttacctggcagcccaggcaatattggacctgccggcaaagagggccccgtcgggctaccaggtattgatggacgccccggtccaataggtccagcaggcgcaaggggcgagcctggtaacatcggatttcccggtcccaaaggccccactggggatccaggtaagaacggcgacaagggacacgctggcttggccggagcacgcggagcaccaggtccggatggcaacaacggcgcacagggtccaccagggcctcagggcgtgcagggaggaaaaggagaacaggggccgccaggtcctcccggatttcagggactcccaggcccctcgggaccagctggagaggttggcaaacccggtgaaagaggacttcacggcgaatttggcttacccggtcctgcgggcccccgcggagaacgggggcctcctggtgaaagtggagcagcaggccccactggccccattggcagcagagggcccagcggcccccctggtcccgatgggaataagggcgagccgggggttgtgggcgctgtgggaacagcaggtccgagcggccctagcggcctcccaggcgaacggggagcagcaggaataccgggaggtaaaggggagaagggtgagcctggcctgcgtggcgagatcgggaaccccggacgagatggcgcgcggggggcgcctggagctgtgggagctcccggacccgccggggccaccggagacagaggagaagcaggagctgccggccctgcaggcccagctggtccaaggggcagcccgggcgaacgaggcgaagttggacctgccggccccaacggattcgcaggcccagcaggagccgccgggcagcctggcgccaaaggagaaagaggagctaagggaccaaaaggcgagaatggggtagtgggccccactggtcctgttggggcagcgggcccagccgggcctaacggaccacctggacccgctgggtcccgaggcgacggcggaccccccggaatgacagggttccccggtgccgccggaagaaccggtccacctggtccttctggcattagcgggccacctgggccgcccggaccggccggcaaagaagggctccggggccctcgaggggaccagggtcctgtcgggagaactggagaggtaggggctgtagggcctccaggctttgctggcgagaagggcccaagcggcgaggctggtactgctgggccccccggaacaccagggccacaagggctactgggagccccaggcatcctggggttacctggctcccggggtgagagagggctacctggagttgctggagccgtgggagagcccggccctctcggcatcgccggtccaccaggcgccagaggtccccctggcgccgtgggaagccccggggttaacggagcacctggcgaagcaggacgcgacgggaacccaggaaatgatggtccacccggccgggacggtcaacccgggcataaaggagaaagaggctaccccggcaacataggcccagtgggtgcagcaggagcaccaggccctcatggccctgtgggccccgccggtaaacatggcaaccgcggtgaaaccggcccatctggcccagtgggccccgccggtgcagtcggcccccgcgggccctccggtcctcaaggaatcaggggggataaaggggagccgggagagaaaggacctaggggtctccccggcctcaaaggacataatgggctgcaaggcctgcccggaattgcaggccaccacggagatcaaggggccccaggtagcgtcggtcccgcggggccccgtggccccgccgggccaagcgggcctgccggaaaagatggtcggaccgggcatcctggcaccgtaggaccagctggaatcaggggtccccaaggccatcaaggccccgccggtccacctggccctcccggaccgcctggccctcctggggtctcaggaggcggatatgattttggatacgacggcgatttttaccgggcagatcagcctcggagcgcacctagtttgcggcccaaagattatgaagttgacgccacactgaaaagcctgaataaccagatcgagacgctcctcactccagaaggtagcaggaagaaccctgccaggacatgcagggatcttagactgtcccaccctgaatggtcctccgggtattattggatcgatcccaaccaggggtgcacaatggacgcgatcaaagtctactgtgactttagtacaggtgagacatgcatccgagcacagccagaaaacatccccgccaaaaattggtaccgatccagtaaagataaaaagcatgtctggctgggagagacaataaatgccggatcacaatttgagtacaatgttgaaggcgtcacctcaaaggagatggcaacccaactggcgtttatgagactactggcgaattacgcatcacagaacatcacatatcattgcaagaactccatcgcttatatggacgaagagaccggcaatctgaaaaaggctgttatcctgcagggttcgaacgacgtcgaactcgtggccgaggggaatagtcgttttacatacaccgtcctggtggatggatgctccaagaagaccaatgagtggggtaagactatcatcgaatataaaactaacaagccaagtcgactgcctttcctggacatcgcgccactggatatcggtggcgccgatcaggagtttttcgttgacattggcccagtgtgctttaagtag

SEQ ID NO: 1288 - DNA, 4104 bp, Artificial Sequence
  derived and/or modified sequence
atgctctctttcgtggataccaggacactcctgctcctcgccgtgaccctgtgtctagcaacgtgccagtgcacccttggaggacagacattatctaaattcccgccctacctccacattgagagatctgaacagggtccaccaggcccacctgggagagacggagaagacgggccaacaggccccccaggccctcccggtcctcctgggccccccggcctgggcggaaacttcgctgcacagtatgacggaaaaggagtgggtcttggacctggacctatggggcttatggggcctaggggtccacccggtgccgccggagctcccggcccgcaaggctttcagggccccgctggtgaacccggggaacctggacagaccgggcccgccggcgctcggggaccggccggtccccccggaaaagcgggggaggatggtcatccaggcaagccgggccgtcccggtgaaagaggggtggtagggcctcagggagcgcgcggcttcccgggaacacccggtctgcccgggttcaaaggaatccggggtcacaacggcctagacggccttaaggggcagcctggcgcacctggagttaaaggagaaccaggagctcccggagaaaatggaaccccaggccaaactggcgcccgcggtcttcccggagagcgcggcagggtaggagccccaggacctgccggagcaaggggaagcgacggctctgttggccccgtagggcctgctgggcccattggaagtgcaggaccccccggatttcccggagccccgggtccaaagggcgagatcggggcagtggggaacgcggggccagccggaccagccgggcctagaggagaagttggcctacccggactctccgggcccgtcggcccacccggcaatcctggagccaatggcctgacaggcgcaaaaggagcagctggactcccaggcgtggccggagctcctgggctacctggaccccgcgggatacccggccctgtgggcgctgctggtgcaactggcgcacgaggtctggtgggcgaaccgggacctgcaggttcaaagggggagtctggaaacaagggggagcctggaagcgcagggcctcagggcccaccgggaccgtcaggtgaggaaggaaagcgagggccaaatggagaggctggctcagcggggccacctggaccccccggtctgaggggaagcccaggtagccgcggtctccctggcgccgatggaagggctggggtaatgggcccaccaggcagcagaggagcctcggggcctgcaggagtacggggccccaacggcgacgccggcagaccgggtgagccgggcctgatgggcccccgtggactgcccggttcaccaggcaatattggacctgccgggaaagaaggaccggtcgggcttcctggtatcgacggacgccccggacccattggccccgcaggagcccgaggcgagccaggtaacatcggattccctggccccaagggtccgacaggcgatcctggaaaaaatggagacaagggacacgccggactcgccggagcacgcggagcccctggcccggacggcaataacggagcacagggaccgcctggtccccagggcgtgcagggcggcaaaggagaacagggtcccccagggcccccaggctttcaagggttacccggcccatccggccctgccggggaggtgggcaaacctggggaaagagggctgcatggcgagttcggactccccggccctgccggccctcggggcgaacggggtccgcctggggagagtggagccgccggacctacaggccctataggctcgagagggcctagcggccccccaggtcccgatgggaataaaggagaacccggcgtagtcggcgccgtgggaaccgccgggccttctggaccctctgggttacccggtgagcgcggggccgccggcatacctgggggcaagggagagaagggcgaaccggggctgcgcggggagattgggaatcccggcagagatggggcccgtggagcgcctggtgccgtgggagctccaggcccggcgggcgccaccggcgatcggggagaggcaggcgctgcaggacccgcaggccccgccggacctaggggcagccctggagaaagaggggaagtgggcccggcggggccaaatggatttgccggccccgctggtgccgcaggccagcctggcgctaaaggcgaaagaggtgctaaaggcccaaagggagaaaatggggtagtggggcctacggggccagtgggcgcagctggtccggcaggtccaaatggcccacccggaccagccggaagccgcggggacggagggcctcccggtatgactggatttcccggtgctgccggaaggactgggccacctgggccatctggcatctctggcccacctgggccacccggaccagccggaaaggaaggactccgaggacctagaggagatcaaggccccgtaggccggacaggagaagttggcgccgtggggccccctggtttcgctggggagaaggggccctcgggcgaggcgggtactgcgggtccaccaggtacacccggtcctcaggggcttctcggagcacccggcatcctggggttgcctggaagcaggggagaacgtggcttgcctggggttgcgggagccgtcggagaacccggtcctctcggaattgcagggccacccggcgctcggggcccccctggcgccgtcggcagcccaggcgttaatggcgctcccggggaagccggtcgagatggcaatcccggtaacgatggacctcctggcagggatggccagcctgggcataaaggagagagaggttaccccggaaatatcggacctgttggagctgccggggcacctgggccgcatggtcccgttgggcccgccggcaaacatggcaaccggggagagactggaccctctggcccagtggggcccgcaggcgcagtaggaccgagaggcccctccgggccgcagggaatacgaggcgacaaaggggaacccggagaaaaggggccaagaggcctgccaggcctgaaaggacataacgggttgcagggactaccagggattgccggacatcacggagaccagggcgctcccggctccgtggggccagctggcccacgcggcccagcaggacccagtggtcccgctggaaaggacggacgtacaggccaccctggcactgtcggccccgccggcatccgcggtccgcaggggcaccagggccctgccggcccgcctggtcctcctggcccgcccggacctccaggcgtgtctggtgggggatacgacttcggctacgatggcgatttttatagggctgaccaaccccgaagtgccccatcactgcgccccaaagactatgaggtggatgcaaccttaaaatccctcaataaccagatcgaaaccctgctaacccctgaggggtcgaggaagaaccccgcacgaacctgtcgggacctccgcctaagccacccagagtggtcctccggatactattggattgatcccaaccagggatgtactatggacgctattaaggtgtactgcgatttttctaccggagaaacctgtataagagctcagccggagaatattccggcgaagaactggtatagatcttccaaagataaaaaacacgtgtggttaggtgaaacaattaatgccgggtcccagtttgaatacaacgttgaaggtgtgacatctaaagaaatggctacacagctcgcgttcatgcggctgttagcaaattacgcctcccaaaatatcacttatcactgcaaaaactccatagcgtatatggacgaagagaccggcaacttgaagaaggcggtgatacttcaggggtcgaacgacgtggaactggtggccgagggcaatagcagattcacttatacagtgctagtggacgggtgctctaagaagacgaatgaatgggggaagacaatcatagaatacaaaaccaataagccctccaggcttcccttccttgatattgcccctttggatattggcggcgccgaccaagaattttttgtggacatcggtcctgtttgtttcaaatag

SEQ ID NO: 1289 - DNA, 4101 bp, Artificial Sequence
  derived and/or modified sequence
atgctcagctttgtcgacacacgcaccctgctgttactcgcagtcacactatgccttgcaacttgtcaatcgctacaggaggaaacagtaagaaaggggcctgccggtgataggggaccaaggggggaacgcggaccaccgggtcctccaggcagagatggtgaagacgggcctacaggacctcccggcccaccaggccctcccggtcctcctggactcggcgggaatttcgcagcccagtacgatggcaaaggtgttggcctcggaccggggcccatgggcttgatgggacctagaggcccgcccggagccgccggggccccaggccctcagggatttcaagggccagccggcgaaccaggagaacctggccagaccggtcctgccggagcaagaggacctgcgggtccccccggcaaggcaggagaagacgggcaccccggcaaacctggacggccaggagagcgcggcgtcgtcggcccccaaggtgcgcgcggattccccggaacacccggactgcccgggtttaaaggcatcagaggacataacgggttagatggcctgaaaggccagcccggagcccctggcgttaaaggcgagccaggagctcctggcgaaaatgggacaccgggacagacaggcgctcgaggcttaccaggtgaaaggggtagggttggcgctcccgggccggcaggagcccggggatctgacggatcagtgggaccagtcgggccagccggccctattggaagtgctggaccacctggcttcccaggtgctcccggcccaaagggagaaattggcgccgtgggaaacgccggacctgctggacccgccggaccccggggtgaggttggacttcccggcctgtcaggacctgtgggtcctcctggcaatcctggagctaatggcctcaccggcgcgaaaggtgcggcagggcttcccggcgtggccggcgcccctggcctgccaggccctcgcggaatccccgggcccgttggagcggcaggagccaccggcgctcgcggactcgtcggagagccgggcccagctggaagtaaaggagaaagtgggaataaaggagagcccgggagtgcgggcccacaaggcccccccgggccctcaggcgaagaaggaaagcgcgggcccaacggagaagctggatccgcaggaccacccggcccccctggcctgagaggatcacctggaagtaggggactgcccggggcagacgggcgcgcaggcgtgatgggtcctccaggaagtagaggagcttcaggacccgcgggtgtgcggggaccaaatggtgacgctggaagacccggggaaccaggcttaatgggacctcgggggttgcctggctcccccgggaacattggccctgccggcaaggagggaccagtgggcttgcctggaatagacggtcgtcccggaccaatcggaccagcaggtgcacgcggagagcccggaaacatcgggttccccggacccaagggacccactggggatccaggtaagaacggcgacaagggacacgctggcttggccggagcacgcggagcaccaggtccggatggcaacaacggcgcacagggtccaccagggcctcagggcgtgcagggaggaaaaggagaacaggggccgccaggtcctcccggatttcagggactcccaggcccctcgggaccagctggagaggttggcaaacccggtgaaagaggacttcacggcgaatttggcttacccggtcctgcgggcccccgcggagaacgggggcctcctggtgaaagtggagcagcaggccctactgggccgataggaagtcgtggcccgagcggccctccgggaccagatggaaataagggcgaacctggagttgtgggtgccgttggtactgccggtccatccggaccaagtgggctacctggcgagcgtggagccgcaggcatccctggaggcaaaggagagaagggcgaacccggcctgcgaggtgaaattgggaatcccggccgagacggcgcaagaggtgcccccggagccgtgggtgcgcctggaccagcaggggcgaccggggatagaggagaagcaggtgcggccgggcccgccgggcccgccgggccaagaggatcaccaggagaaagaggcgaagtaggccccgcaggaccgaatgggttcgctgggccagcaggagctgcgggtcagcctggcgcaaagggcgagcgcggcgctaaggggccaaaaggagagaacggggtcgttggaccaaccggaccagttggcgcagctggacctgccggaccgaatggaccacccggacccgcaggcagtcggggcgatggcggccccccaggaatgaccggctttcctggagccgcaggtagaacaggtccacctggcccaagcgggatatcaggaccacctgggccaccggggcccgctggcaaggagggccttaggggcccacgaggagaccagggcccggtaggacgcaccggagaggtgggagctgttggccccccgggtttcgcgggggagaaaggaccatccggagaagccggcacagctggaccacccgggacccccggtcctcagggactgctgggagctcccggcattctcggcctacctgggtctagaggagaaagaggattgcccggagttgcaggcgctgtcggcgagcccggccccctgggtatagctggacctcccggagcccgcggtccgccaggcgcagtcggatccccaggggtgaatggggctcccggagaggctggacgggatgggaatccagggaacgacggaccgccaggtcgtgatggacagcctggtcacaagggggaacgcggttatcccgggaatatcggaccagtgggggccgccggagctcccgggcctcatgggccagtcggccctgctggtaaacacggcaaccgaggagagacaggaccttccggcccagtcggcccggccggtgctgtgggacctcgcggaccttcaggcccacaaggaatcagaggggacaagggggaaccaggtgagaagggccctaggggtttgcccggactgaaaggccacaatggcctccagggactgcctggcatagccggacatcatggtgatcaaggggccccaggtagcgtaggtcctgccggtccaagaggccccgctggcccttccggacctgctggcaaggatgggcgcaccggacacccaggaactgtggggccagccggtattaggggacctcaaggacatcagggtcctgccggcccccccggacctcccggcccgcccggcccgcctggagtttccggaggaggatatgatttcggctacgacggggatttctaccgcgcggaccagcctaggagcgcacccagcctgaggcccaaggactacgaggttgacgcaactctaaaaagcctgaataaccagatcgagactttgttaacaccagaggggagccgcaaaaaccctgccaggacatgtagagatttgagactgagtcacccagaatggtcctccggttactactggatcgatccaaaccagggttgcacaatggatgccatcaaagtgtactgcgacttttctacaggggaaacttgtatcagagcacagcccgaaaatatacctgcaaaaaattggtaccggtcatccaaagataagaaacacgtgtggttaggtgaaacaatcaacgctgggagccagtttgagtataacgtagagggcgtgactagcaaagagatggctacgcagctggccttcatgagactccttgctaattatgcttcgcagaacatcacatatcactgtaaaaattccattgcctatatggatgaggaaactggaaacctgaaaaaagctgtcatcctacaaggtagtaatgatgtcgagcttgtggcagaaggaaattcaagattcacctacactgtgcttgtagacggatgcagtaaaaaaacaaacgaatggggaaagacaatcatcgagtacaaaacaaacaagcccagcagactcccttttctggacattgcccccctcgacattggcggggcagaccaggaattttttgtcgatatcggacctgtgtgtttcaaatag

SEQ ID NO: 1290 - DNA, 4104 bp, Artificial Sequence
  derived and/or modified sequence
atgcttagctttgtggatacaagaacccttcttctccttgctgtgacattatgtctagcgacctgtcaatgcacactgggaggacagaccctctcaaagtttcccccctacctgcacatagagcggtctgagcagggcccccctggaccccccggtcgcgacggcgaggatggtcccaccggcccccccggccctcccggccctcctggccctcccggactgggtggtaacttcgccgcacagtatgacggtaaaggcgtgggcctcggaccaggaccaatgggattaatgggccctagaggccccccaggagccgctggagcccccggacctcaaggatttcagggccctgcaggagaaccgggagagcccgggcagactggccctgcaggcgcaagagggcctgcaggacctcctggaaaagcaggcgaagatggccatcccggaaagcccggccgcccaggcgagcgtggagtggtgggacctcagggcgccagaggatttcccggaactcccggccttcctggctttaaagggataagagggcataatggcttagatggactcaaagggcagcctggcgcccccggcgtgaagggtgaaccgggtgctccaggcgagaacggcactcctggccagaccggagcacgggggctccctggcgaacgaggaagggttggagcgccgggcccagcgggtgcccgcggatccgatggctcagttgggccagttgggccagctggaccaataggaagtgcaggcccccccggatttcctggcgcccccggacccaagggggaaattggcgctgttggcaatgcaggacccgcgggtccagccggccctaggggcgaagtaggcttaccaggactgtccggcccagtcggaccgccaggtaatcctggagccaatggcctgacaggcgcaaaaggagcagctggactcccaggcgtggccggagctcctgggctacctggaccccgcgggatacccggccctgtgggcgctgctggtgcaactggcgcacgaggtctggtgggcgaaccgggacctgcaggttcaaagggggagtctggaaacaagggggagcctggaagcgcagggcctcagggcccaccgggaccgtcaggtgaggaaggaaagcgagggccaaatggagaggctggctcagcggggccacctggaccccccggtctgagggggagccctggatcaagggggctccccggggcagatggtcgcgcaggtgtaatgggaccacctgggagcagaggcgcctcaggtccagctggagtccgcggaccaaacggtgatgctggccgcccaggcgaaccagggctcatgggacctcggggcttgccaggaagccccggaaatatcggaccggctggcaaggagggaccagtaggcttaccaggaatagatggcagaccaggccctattggccctgctggagcacggggagagcccggcaacatagggttcccagggccaaaggggccaactggtgatccaggcaaaaatggcgataaaggacacgctgggctggcgggagcaaggggagcccctggacctgatggaaataacggggcacaagggcccccagggccacagggagtgcagggcgggaaaggagaacagggtccaccaggcccacccggattccagggcctgccaggacctagcggtccagctggtgaagtgggcaaacctggggaacgcgggttacacggagagtttggtctgcccggtcctgctggtcctagaggcgagcgtggcccccctggggagtctggcgcagctgggcccacaggaccaattggaagtagagggccctccggaccacctggtcccgatggaaacaaaggagagcccggtgtggtgggagcagtgggaactgccggtccgtcaggtccgtctgggctaccgggagagagaggagccgccggaatccccggaggaaaaggggaaaaaggtgagcctgggctgaggggggagattggtaacccaggccgcgacggcgcccgcggcgccccaggagcagttggcgccccagggcccgccggtgctacaggtgataggggagaagctggcgcggctggtcccgctggtcctgccgggccccgagggtcgccaggggaacggggagaagtgggacccgccggccccaacggtttcgccgggcccgctggcgctgctggacagcccggagcgaagggagaacgaggggccaagggaccaaaaggcgagaacggagttgtcggacctaccggaccagtgggcgctgcgggtcccgccgggccaaacggaccaccaggcccagctggctcccggggggacggagggccaccaggaatgacaggcttccctggtgcagcaggtagaaccgggccacctggcccctctggtatctccggaccccccggccccccaggccccgctggcaaagagggcttgcgcggtccgaggggcgatcagggacccgttggtaggaccggggaagttggcgctgtgggccccccgggtttcgcaggggagaagggaccaagtggcgaggccggaacagctggacctcccgggacacccggcccacaaggtctgcttggtgcccctggcatcttaggcctgcccggttcacgaggggagcgagggctgcccggagttgccggcgctgtgggtgagccaggccccttgggtatcgcaggcccgcccggagccaggggaccgcctggcgctgtgggcagccctggcgtgaatggagcccccggcgaagcaggccgggatggaaacccagggaacgatggacccccgggtagagacggccaaccaggccacaaaggggagaggggataccccgggaacatcggacctgtcggagccgctggagccccgggtccacacggccctgtgggaccagcagggaagcacggcaatcggggggaaacagggccttcgggacctgtcggaccagctggagcagtggggccgcgcggaccctcaggaccccaaggaattagaggagataaaggagaacctggagaaaagggcccaagaggattgcctggactgaaaggacacaacggtctccaaggactcccaggaatagcagggcaccacggagatcagggcgcccccggcagcgtcggtcctgcaggaccccgagggccagctggaccatccgggccagccggtaaggacggccgcactgggcacccagggactgtggggcccgccgggatacggggcccacaaggccaccaagggcccgccggtccaccaggccccccagggccacccggaccaccaggagtgtccggaggcggctacgactttggttacgacggcgatttttaccgtgccgaccagccccgttctgcccccagtttgcgacctaaggactacgaggtggacgcaactctcaaaagccttaataatcagatcgaaacactgctgacccctgaaggatcacgcaagaaccctgcaagaacctgtcgggacctgagactttcacacccagaatggagctcaggctactactggatcgatccaaatcagggctgcactatggatgcgattaaggtgtactgtgactttagcacaggcgagacttgcatcagggcccagcccgaaaatatccccgctaaaaactggtatcggagctccaaagataagaaacacgtctggttgggcgaaactattaacgcaggctcccagtttgaatacaacgtcgaaggcgtcacatccaaggagatggccacgcagctggcatttatgagactattagccaactacgcatcacaaaatatcacatatcattgtaagaacagcatagcgtacatggacgaagaaactggcaacttgaagaaagccgtgattctacagggaagcaatgatgtcgaactggtggccgaaggaaattcaaggttcacctatacagtactggttgacgggtgcagcaagaagacaaatgagtggggtaagaccatcatagaatataaaaccaacaaacctagccgactcccattcctggacatcgcacctttggatattggcggtgcagatcaagaattcttcgtggacatcgggccggtgtgttttaagtag

SEQ ID NO: 1291 - DNA, 4098 bp, Artificial Sequence
  derived and/or modified sequence
atgttgtcctttgtcgacactagaacgctgctcctgcttgctgtgaccctgtgcctggcaacttgccagagcctgcaagaagaaaccgtccggaagggaccggcaggggaccggggacctcgcggtgaacgagggcccccaggccctcccggcagagatggagaagatgggccaactggtccaccgggacctcctggaccgccaggaccgcctggcttgggaggaaacttcgccgcgcaatacgacggaaagggagtggggctcggccctggaccgatgggactgatgggaccgagaggcccccctggggctgcaggtgcgccgggtccccagggttttcagggacctgcgggagagcctggtgagccgggacagaccggacctgccggggctcgggggcctgccggaccgccagggaaggcgggtgaagatggacacccgggcaagccaggcaggcctggcgagcgcggagtggtgggaccgcaaggagctcgcggcttccccggaacgccaggactcccaggcttcaaaggtatccgggggcacaacggactggacggacttaagggtcaaccaggagcaccgggtgtgaaaggagagcctggcgcaccaggagagaacggcaccccaggacaaaccggcgcgagaggactgccaggcgaacgcggccgagtcggagcgcctggtcccgcgggagcaagagggtcggacggctcagtgggcccggtcgggccagcagggccgatcgggtcggccggaccacctggttttcccggggccccagggccgaagggagaaattggagcggttggcaacgcggggcccgctggacctgctggacctcggggagaggtgggtctgccgggcctcagcggcccagtgggaccccccggaaatccaggcgccaacggcctcaccggcgcaaagggcgctgccgggctgcctggagtggcgggggctccaggtctgccgggaccaaggggaatccccggaccggtcggcgccgcaggagctaccggagcccgcggactcgtgggcgaaccgggacctgctggttctaagggagaatcaggaaacaaaggagaaccaggatccgcaggtccgcaagggccgcctggtccctccggcgaagaaggaaaacgcggacctaatggagaagccgggtccgctggaccacccggtcctccgggactgaggggatcacctggatcgcgcggtctgccgggggccgacggacgcgcaggcgtgatgggcccgcctggttccagaggggcttccgggcctgcgggtgtgagaggaccgaatggagacgccggccggcctggggagccagggctgatgggacctaggggtttgcctggatcgccgggtaatatcggccccgccggtaaggagggcccggtgggattgcccggaatcgacggcaggccaggaccaatcggccctgccggagctcggggggagccaggaaatatcggattcccgggtccaaagggtcctacgggtgacccaggaaagaacggcgacaaggggcacgccggactggccggtgcgcgcggagcgcccggacctgacgggaataacggcgcacagggaccccctggtccacagggagtgcagggcggaaagggcgagcagggaccgccaggtcccccgggatttcagggactcccaggacccagcgggccggcaggggaggtcggcaagccgggggaacggggacttcatggagagttcggactgccaggtccagccggtccccggggtgagaggggaccaccgggcgagagcggcgcagccggacctaccgggccgattgggtcgcgcgggccgtccggccctccagggcccgacggaaacaaaggggagccgggggtggtcggtgcggtgggcactgccggtccgtcggggcccagtggtctgccaggagaacggggggctgcaggaatcccaggcggcaagggagaaaagggcgagccaggcttgcgaggcgagatcggaaacccgggtcgggacggcgccaggggtgcgcccggtgcagtgggagcacctgggccggcgggcgcgactggcgataggggggaggcaggcgcagccggccctgcgggcccagcggggccccgtggaagcccgggtgagagaggggaagttggaccggcaggccctaacggtttcgcgggtccggctggcgcagctggacaaccaggtgccaagggtgaacgcggagccaaagggccgaaaggcgaaaacggcgtggtagggccgaccggaccagtcggagcagctggaccagctgggccgaatggtccacctgggcccgccggaagccgtggagacgggggcccgccaggaatgaccggattccctggggcagccggacggactggtcctcccggcccttctggaatctcagggcccccggggccgccaggacccgcaggaaaggaaggcctccggggcccacggggggaccagggtccggtgggacgcaccggggaggtgggagcagtggggcctccggggttcgccggagaaaagggacccagcggcgaggcaggaactgccggacccccgggaacccctggaccgcagggactcttgggagcgccgggtatcctcggccttccggggagcaggggcgaacggggactcccgggtgtcgccggggcggtcggagaaccaggcccgctcgggatcgccggaccgcccggggcgaggggccctccgggcgccgtgggctcgcctggggtgaatggagcccctggagaggctggaagagacggaaacccaggcaacgatggcccgcccggtcgcgacggacaaccagggcataagggcgagcgcggttacccgggcaacatagggccggtcggagcggccggtgcccccggcccgcacggacccgttggtcctgccggaaaacatggaaatcgcggtgaaaccggaccgagcggacctgtggggccggcgggagccgtggggccacggggtccttcgggtcctcaggggatcagaggagacaaaggcgagcctggcgaaaaaggaccgcgggggctgccgggcttgaaaggacataacggactccagggactgccaggaatcgctggacatcacggcgaccaaggagccccaggaagcgtaggacctgcaggcccacgcgggcctgcagggccttcgggcccggctggcaaggatggacgcaccggtcatcccggcactgtcggcccggccggtattcggggaccccagggtcaccaagggccggcgggtccgcccggcccaccagggcctcctggcccacctggggtgtccggaggcggatacgatttcggatatgatggcgatttctacagagcagatcagcccagatccgctccctcacttaggccgaaggactacgaagtcgatgcgactctgaaatcgctcaacaatcaaatcgaaacgcttctcactcctgaaggatccagaaagaacccagcaagaacttgccgggacctgcgcctgtcgcacccggaatggtcctccggatactactggatcgatcctaatcaaggctgcactatggatgcgatcaaggtttactgtgatttctcgactggagaaacctgtatcagagcccagcccgagaacatcccggctaagaattggtacagatcatccaaagacaaaaagcacgtctggctcggagaaacgattaatgctggatcacagtttgagtataacgtggagggtgtcacctccaaggaaatggccactcagctcgcattcatgaggctgctcgccaactacgccagccagaatatcacctaccactgcaaaaactcgatcgcgtacatggatgaagaaactggaaatctgaagaaggccgtcattcttcagggcagcaacgacgtggagctggtggccgagggcaactcgaggtttacctacactgtgctggtcgatggatgttcaaaaaagactaacgaatggggaaagacgattatcgagtacaagaccaacaagccgtcgcggctgccgttcttggacatcgcaccgctggatattggaggggccgatcaggaattcttcgtggacatcgggccagtgtgcttcaag

SEQ ID NO: 1292 - DNA, 4098 bp, Artificial Sequence
  derived and/or modified sequence
atgctgtccttcgtggacacgcgcaccctgctgctcctggctgtcaccctgtgcctggcaacttgccaatcgcttcaggaggaaactgtgcggaaaggaccggcgggggataggggtccacgcggagagcgcggaccgcctgggccgccgggacgcgatggagaggacggaccaaccggtccaccggggccaccaggacccccggggccgcctgggttgggaggcaacttcgctgcccaatacgacggaaagggcgtgggccttggccccggacccatgggccttatgggaccaaggggacctccaggagcggcaggggccccgggccctcaaggttttcaaggaccggcaggcgaacctggcgagccaggacagactggtcctgccggagcccgcggaccagccggaccgccgggtaaggcaggagaagatggacaccctggcaaaccaggacgcccgggcgagagaggagtggtgggaccacagggcgcccgcggtttccccggtaccccaggattgccggggttcaaaggaatccggggacataacggactggacggattgaaaggccaaccgggagcgcccggagtgaagggagagccaggcgcgccgggcgaaaatggtaccccgggtcagaccggcgcccgtggactgccgggggaacggggacgggtgggtgcacctggccctgccggggcgcggggctccgacggatccgtgggcccggtcggccccgcaggaccgatcggatcggctggaccgccaggatttcccggagcgccgggaccgaagggggaaattggagccgtcggtaatgccggcccagctggtccagctggtcctcgcggtgaggtgggcttgccaggcctgagcgggccagttggtccgccaggaaacccgggcgcaaatggactcactggcgctaagggagctgcggggcttccgggtgtggctggagcgccgggtctgcccggaccacgaggtatcccaggtccagttggagcggcgggagccaccggagcgagaggactcgtcggagaaccgggacctgccgggtcgaagggcgaatcggggaataaaggggagcccggctcggcgggtcctcaaggcccgccagggccatccggggaggaaggaaagcggggcccaaacggggaggccggcagcgcgggtccaccgggtccgcccggactcagaggatctcctggcagccggggcctgccgggagcagatggacgcgcaggagtgatgggtcccccggggagcaggggagcatcggggccagctggagtgcgcggaccgaatggagacgcgggacgcccaggggaacctggtttgatgggaccacgcggcctccccggctcgcccggtaatatcggcccagccggaaaggaaggacctgtgggtctgcctggaatcgacggccgaccggggcccatcggaccggccggagcgcgtggggaaccaggtaacattggtttccccggaccgaaaggacctactggcgatccgggaaagaatggcgacaagggacatgcggggctcgctggggcgcgcggggcccctggacctgacgggaataacggggcgcagggtccacctgggccacagggcgtccagggaggaaaaggcgaacagggcccgccgggacctccgggattccaggggctgccaggtccatccggaccggcgggtgaggtggggaagcctggcgagcgcggtttgcacggggaatttggtttgccgggccctgcaggcccgcgcggagaaaggggcccgccaggcgagagcggcgccgccgggccgactggcccaatcggatcgcgcggaccgagtggtccgcccggcccagatggaaataagggtgaacctggagtggtcggagccgtgggaaccgcgggaccgagcggaccgtcaggtctgcccggggagcggggagcagccggaatcccgggaggcaagggagagaaaggggagccgggcctgagaggggagatcggaaaccctggacgcgatggcgcccggggggctccgggagcagtgggggcccccggtccggcaggtgcgaccggagatcgtggagaggccggggccgcagggccggccggtcctgccggcccgaggggatcaccgggcgaaaggggtgaagtgggacctgcgggccctaacgggtttgccggtccagcgggcgcagccggccagccaggggccaagggagagcgcggtgcgaagggccctaaaggggaaaatggtgtcgttggcccgaccggccctgtcggagccgctggtccagcagggcctaacggtccccctggccccgccggaagccgcggtgatggagggccgcccggcatgaccggtttccctggcgctgccggacgtacgggcccgcccggtccatccggcatttccgggccccctgggccacccggtccggcgggcaaggagggcctgaggggccctagaggcgatcagggcccggttgggagaactggggaagttggcgcggtgggtccgccgggattcgccggagagaaggggccatcgggggaagcaggaaccgccggacccccgggtactccgggacctcaagggctgctcggcgccccgggcatcctgggactcccaggaagccgcggcgaacgaggcctgcctggtgttgcgggcgccgtcggagagcctgggccactgggaatcgctggaccgcccggggcacggggccctcctggagcagttggtagcccgggggtgaacggagccccaggagaagctggccgggacggaaaccccggaaacgacggacctcccggacgggatggccagcccggacacaagggcgagagggggtatcccggaaacatcggacctgtcggagcggctggagcacccggaccgcacggaccggtggggcccgcagggaaacacggcaatcgaggagaaaccggcccgtccggtccggtcggacccgccggcgcagtgggtccgagaggcccatccgggccgcagggtatccggggggacaaaggagaaccaggggaaaaggggccgagggggcttccagggctcaagggccacaatggcctgcaaggtctgccggggatcgccggccaccatggagatcaaggggctccgggttcagttggcccagcggggccacggggacccgcaggcccttccggcccggctggaaaagatggaagaactggccatccgggcacggtagggccggcgggcatccggggaccgcaggggcaccagggaccagcaggaccaccggggccccctggaccacctggacctcctggagtgtccggaggaggctacgactttggctacgacggagacttctatagagctgaccaacctagaagcgcgccgtccctgcgcccgaaagactacgaagtcgatgccaccctgaagtctctcaacaaccaaatcgagactctcctgaccccagagggctcacggaagaacccggcccggacctgccgcgacctccgcctgtcgcatccagagtggtcgtcgggatactactggatcgaccctaatcaagggtgtactatggacgcgataaaggtttactgtgatttcagcactggagaaacgtgtatcagggctcagccggaaaacatcccagccaaaaactggtacagatcctcgaaggataagaaacacgtgtggcttggagaaaccatcaacgctggctcgcagttcgaatacaatgtcgaaggggtgacttcaaaggagatggcaacccagctggcgttcatgagactgctcgccaactacgccagccagaacatcacctaccattgcaagaactcgatcgcatatatggacgaagagactggaaacctcaagaaggcagtcatcctccagggaagcaacgatgtcgaactcgtcgctgagggaaattcccgcttcacttacactgtcctcgtcgacgggtgctcaaagaaaacgaatgaatggggtaagaccataatcgagtacaagaccaacaagccgagccgactgcctttcctggacattgcccctctcgacatcggtggagcagaccaggaattctttgtggacattggacctgtgtgcttcaag

SEQ ID NO: 1293 - DNA, 4098 bp, Artificial Sequence
  derived and/or modified sequence
atgttatcattcgtggatacccgtacccttctgctcctggccgtcactttgtgtctggctacgtgccagagtctgcaggaggagacagtcaggaaaggtccagccggggatagagggccccgaggcgaaagagggccccccggccccccagggagggacggggaggacggaccgactggcccccctggccccccaggccccccgggaccacctgggctgggaggaaattttgccgcacagtatgatggtaagggcgtgggactcggacccggacccatgggccttatgggccctagaggtccacctggagccgccggcgcgcctgggcctcagggattccagggcccagcgggtgagccaggtgagccagggcaaacaggacccgctggagctaggggccctgccggtcctcctgggaaggcaggcgaggacggccaccctggtaaacccgggagaccgggagagcgcggcgtggtgggaccccagggggccaggggctttcccggaaccccaggtttgcccggtttcaagggcattagggggcacaatggtttggatggtttaaaaggacagcccggagcacctggagtaaagggagagccaggtgcgcctggagaaaacgggactcctggacagactggcgcgaggggtctgcccggggagcgaggccgagtcggtgcccctggccctgccggggcccggggttctgatggtagcgtcggccctgttggacccgcgggcccaatcggatctgccggcccccctggtttccccggagcacctgggcctaagggcgaaataggagcagtggggaatgctggccctgcaggcccagccgggccacggggcgaggtgggtctgccggggttgtctggcccagttggcccgcccgggaatcccggcgctaatgggctaacaggggccaagggggctgctggactccctggcgtggcaggggcaccgggcctccccggtccccgggggatccccggccctgtcggagccgccggggctaccggagctagaggtctggtgggtgaacctggaccagccgggtctaagggcgagtccggaaataaaggagagcccggcagcgctggaccccaaggcccacccggaccgagcggggaggaggggaaacggggtccaaacggggaggcaggaagtgccggaccacccggaccccccggactccgagggagtcccgggagcaggggactgccaggcgctgacggacgcgccggggtgatgggtccccccgggtcccgcggcgcaagcggccccgccggtgtgcgggggcctaacggggacgctggtagacccggtgaacctgggttgatgggacctcgggggctcccaggatcccccggcaacataggccccgctgggaaagaggggcccgttggactcccaggaattgatggacgccctggacctatcgggccggccggggctagaggcgaacccgggaacattggctttccgggccccaagggcccaacaggggaccccggcaaaaatggggacaaaggccacgccggtcttgccggagcccgcggggccccagggccggatggcaacaacggggcgcaggggcccccaggacctcagggcgtgcaagggggaaagggtgaacagggcccccctggaccgccaggctttcaagggttgcccggcccctccggcccggcaggggaagtggggaaacctggagagaggggactccacggcgaattcggccttccagggccagcgggtccacggggcgagcggggtccacccggcgaatctggggccgccggtcccactggcccgatcggcagcaggggacctagtggccctcctggcccggacggcaacaagggcgaacctggggtagtaggggccgtggggactgccggcccctcggggcctagcggactccctggagaaagaggagctgctgggatcccaggcggcaaaggcgagaagggtgagccgggcctgcggggtgaaattggaaatcccggcagggacggagctcggggcgcccccggtgcagtaggtgctcccggaccagcaggggctacgggcgatagaggcgaggcaggggctgcaggccccgccggccctgccgggcctcggggaagtcctggagaacgcggcgaggtgggccccgccggccccaatggattcgcaggaccggccggtgccgccggtcagcccggcgccaagggcgaacggggagctaagggccccaagggcgaaaacggggtcgttggcccaacaggcccggtgggagccgctggccccgctggcccaaacgggcctcctggacccgcgggcagtagaggagacgggggaccaccaggaatgacggggtttcctggggcggcaggaaggaccgggccccccggaccatcaggcatttcggggccgcccgggcctccaggcccggccggtaaagaggggctgcggggaccgagaggggaccaggggcctgtggggcggactggagaagttggtgcggtcggaccccccggattcgcgggggagaagggccccagtggcgaggccgggaccgccggtccccctggaacacctggacctcagggactcttgggagcaccaggaatacttggactgcctgggagcaggggggagcgcggtttgccaggcgtcgcaggcgcagtgggtgagccaggtccccttggaattgccggaccccctggagctagaggccctcccggggccgtgggctctccgggagtgaatggggcccccggcgaggccgggcgcgatggaaaccctggcaatgatggccccccaggccgagacgggcagcccggtcataaaggagaaaggggctatcccgggaacataggccctgtgggggcagccggggcaccagggcctcacggccccgtggggcctgccggcaaacacggcaaccgcggcgaaacaggcccctccggcccagtgggccccgccggagctgttggtcctcgtggcccatccggcccccagggaataagaggggacaaaggtgagcccggcgaaaaaggcccaagaggccttccaggcctgaaaggtcataatggattgcagggactacctggtattgccggtcatcatggcgaccagggggcccccgggagtgtggggcccgctggcccgagaggccccgccggcccctctggccccgcaggcaaggatggaaggactgggcatcccggtacagtgggacccgcgggaatccgggggcctcagggccatcaaggaccagccggaccaccaggcccgcctggaccacctggaccacctggcgtttcagggggcggctatgacttcggttacgatggtgacttttatagggccgatcaaccccgctccgctccatcccttcggccgaaggattacgaggtcgatgccacgctgaagtctcttaataaccagattgagaccttgctgacaccagagggctctagaaaaaaccctgccagaacatgccgagaccttcgtctgagccaccccgagtggtcaagcggctattactggattgaccctaaccaaggctgtactatggacgccattaaagtatactgtgacttttctactggtgagacttgcattagggctcagcctgagaatatacctgcgaagaactggtaccggtccagtaaagacaagaaacacgtttggctcggtgagacgatcaacgcaggaagccaattcgaatacaatgtcgagggggtcacaagtaaagaaatggctactcagctcgcctttatgcggttactggctaattatgcttcacagaatattacatatcattgcaagaacagtatcgcctacatggatgaggagaccggcaaccttaaaaaagccgttatcctccaaggcagtaacgatgttgagcttgtagctgagggcaattcaagattcacctatacagtattggtggacgggtgcagcaagaagaccaatgagtgggggaagacaatcattgagtataagactaacaagccatctcgcttaccatttctggacatcgccccgctcgatattgggggggcggatcaggaattctttgtggatattggaccagtctgcttcaaa

SEQ ID NO: 1294 - DNA, 4098 bp, Artificial Sequence
  derived and/or modified sequence
atgctgtcgtttgtggacacacgcacgttattgttactggcagtgacgctctgcctggccacctgccaaagtttgcaggaagagacggtgagaaaggggcccgccggagatcgcggcccccgaggcgagagaggaccgccaggccctccaggcagggacggggaggacggcccgacagggccacccggacctcctgggcctcccgggccaccagggctcggaggcaacttcgctgcccagtacgatggcaaaggcgtggggctgggtccaggccccatgggactgatggggccccggggcccgcctggcgcagccggcgctccaggtcctcagggatttcaaggcccagctggtgagcccggcgaaccaggacagactggacccgccggggcccgcggccccgctgggcccccaggcaaggctggtgaagatggtcatcccggcaaaccaggcaggccgggggagagaggggttgtggggcctcagggcgcccgcggttttcctggaacgcccgggttgcccgggttcaagggaatcagagggcacaatgggctcgatggtcttaagggccaacctggcgcgcctggagtaaaaggtgagcctggggccccaggcgagaatgggacaccaggtcaaacaggggccagagggcttcctggggaacggggaagagtcggtgctcccggtcctgccggagccagagggtctgatgggtccgtgggtccggtcggcccagcaggaccaataggcagcgctggccccccgggattccccggagcccctggccccaagggcgagatcggtgccgtgggcaacgccggtcctgccgggcccgctggtcccagaggtgaagtcggcttgccaggcctctccggtcctgtcggccctcctggcaacccgggcgccaacgggcttactggagctaagggcgcggccggattgcccggcgtggcaggggcgcctggccttcctgggcccagaggaatccctggtcctgtgggggccgcaggcgcaactggcgcaaggggattggtgggagagcccggacctgccggaagtaaaggggagagtggcaacaagggagagcctggatccgctgggccccagggaccgcccggcccgtccggcgaggaaggaaaacggggtcctaatggcgaagcaggttctgcaggccctccgggaccccctggcctgagaggttcacccggatctcgaggattacccggcgctgacggcagagctggggtgatgggccccccaggctctcgaggcgcatccggccccgctggggtcaggggcccaaatggagacgcgggcaggcctggggaaccggggctgatggggccccgcggcctgcccgggtctcctggcaacattggcccggctggtaaggagggcccagtaggattgcctgggatagacgggagacctggacccatcggccccgctggggctcgaggtgagcctggcaacatcgggttcccaggacctaagggccccactggggacccaggcaagaacggcgataagggccatgcgggattggccggagcgcgcggggcgccaggacccgacggtaacaacggcgctcaaggaccgccagggcctcaaggggtgcagggcgggaagggtgaacagggaccacctggtcccccaggtttccagggattaccaggaccatctggccccgcgggtgaagtggggaaaccgggggagcggggtttacatggcgaatttggccttcctggccccgccggacccagaggtgaaaggggcccgccaggagaaagcggggctgccggacccactggccccatcggttcccggggcccctccgggccccccggaccagacggtaacaaaggagagcctggtgtagtcggagcagttggcaccgccgggccgtccggccccagcgggctgcccggagagagaggagcagccggaattcctggaggtaagggagaaaagggggagccaggactgagaggcgaaatcggaaaccctggacgcgacggtgcccgaggtgcccccggggccgtgggagcacccggacctgcgggcgctactggcgatagaggagaggccggcgcagccgggccggccggtcctgccggtccaagaggctctccgggcgagaggggcgaagtgggacctgcgggtccaaacggctttgcagggccagcaggagctgctgggcagcctggagcaaaaggggagcgaggtgccaaagggcccaaaggcgagaacggtgtcgtcggcccaaccggtcccgtcggcgcggcggggccggcggggcctaatgggccacctggccccgccggttcaagaggagacggcggaccacctggcatgactggattccctggcgcagccggacgcaccggaccacccggaccatctggtattagtgggccccctggcccccctggccccgcgggcaaggagggtctccgtggaccacgaggtgaccagggccctgtgggcaggaccggggaggtaggcgccgtcgggccccctggatttgccggagaaaaaggcccttctggagaagctggaactgctggccctcctgggaccccaggtcctcaggggctgctgggggcccccgggatcctggggctccccggatcacgcggtgaaagggggttaccgggggtcgcaggagctgtgggggagccggggccgctgggcatcgccggaccaccgggcgcccgggggcctccgggcgcagtgggaagcccaggtgtgaatggggcaccaggagaagccggccgggacggcaaccccggaaatgatgggccccccggccgggacggccaacctggtcacaagggcgagaggggatatccaggaaatatcgggcccgtgggggctgccggagcacccggcccccacggccccgtgggccccgcggggaaacacggtaaccgaggcgagacggggccatcaggacccgtggggcctgcgggagctgttggtccccggggccccagtgggcctcaaggcatacgcggggacaagggcgaaccgggcgagaagggaccccgggggttacccggccttaagggacacaatggactccaaggcctacctgggattgcagggcatcacggagaccaaggtgctcccggcagcgttgggccagctggcccccggggtcctgctggacccagcggcccagccgggaaagatggacgaacaggtcaccccgggaccgtgggccccgcgggcatcagaggaccacagggacatcaagggccagccggaccgcctggccccccaggaccacccgggccacctggtgtgtcaggaggtggctatgactttggctacgatggggacttttatagagccgaccagcctagaagtgccccctcacttaggccaaaggactacgaggttgacgccactctaaagagtttgaacaatcagatcgaaaccctgctgacccctgaagggtcccgcaagaatcctgccagaacctgccgagacctaaggctaagtcacccggagtggtccagcggctattactggatcgacccaaaccagggctgcactatggacgccattaaagtgtactgtgacttcagtacaggcgaaacttgtattcgggcccagccagagaatatacctgcgaaaaattggtataggtcctccaaagataagaagcacgtctggctgggtgagacgattaacgccggatcgcaattcgagtataacgtcgagggcgtcacaagcaaagaaatggctacccagctggccttcatgcgccttcttgccaactacgcttctcagaacattacttaccattgtaaaaattcaattgcgtacatggatgaggagaccggaaaccttaagaaagccgtaatcctccagggttcgaatgacgtggagctggtggccgaggggaacagtcgtttcacgtacaccgtgctggtggatggctgttctaaaaaaaccaatgagtgggggaaaacgattattgaatacaagacgaataaaccgtccaggctccctttcctcgacatcgcgccactagacatagggggcgctgatcaggagttcttcgtggacataggtcccgtatgctttaaa

SEQ ID NO: 1295 - DNA, 4098 bp, Artificial Sequence
  derived and/or modified sequence
atgctgtctttcgtcgacacacgcaccttgcttctcctggccgtaactctgtgtctggctacctgtcagtccctgcaggaggagaccgtgaggaagggccccgcaggtgataggggcccacgcggcgagaggggcccccccggtccacccggcagagacggtgaagatggtcccaccggccccccaggccctccaggccctcccggtccacctggactgggcggtaatttcgctgctcagtatgacggaaagggcgtaggtctcggtcctggccccatgggcctgatgggacccaggggccctcccggtgcagcaggtgcacccggacctcagggtttccagggtcccgctggtgagcccggtgagcccggccagacaggcccagcaggtgcacgcggtcccgctggccctccaggtaaggccggcgaggacggccatccaggtaaaccaggtcgtccaggcgagaggggtgtagtaggcccacagggtgctcgtggtttcccaggtacccccggactgcccggtttcaaaggcatcaggggccataatggcctcgacggcctcaaaggccaacctggagctcctggcgtgaagggtgaacctggcgcccccggtgagaacggcaccccaggccagaccggcgcccgcggattgcctggagaacgtggacgcgtcggtgcacccggacctgcaggagccaggggatccgacggctcagtgggcccagttggaccagccggccctatcggttccgctggaccccctggcttccccggtgctccaggccccaaaggagagataggcgccgtcggaaacgctggacctgctggacctgccggacctaggggtgaggttggcctgcccggcctttccggacctgtgggccctcctggcaaccctggcgccaacggtctgactggcgctaaaggcgctgccggtcttccaggtgtggcaggagctcctggactgcccggcccaaggggtatccccggtcctgttggtgctgcaggcgctaccggagcaagaggtctggtgggcgagcctggtcccgctggctctaaaggagagagcggcaacaaaggagaacccggctccgccggtccccagggacctccaggtccttcaggtgaagagggcaaacgtggacctaatggcgaggccggatccgccggccctcctggtccacctggattgaggggctcccccggcagcaggggactgccaggagctgatggacgtgctggcgtgatgggcccccctggcagtaggggcgcttccggtcccgctggcgtgcgcggaccaaacggcgatgctggtcgtccaggagagcctggtttgatgggccctcgcggcctgccaggtagccctggtaacatcggtccagccggaaaggaaggacctgtcggtttgccaggtattgacggccgtccaggtcctataggtcctgcaggtgcaagaggtgaacctggaaatatcggatttcctggcccaaagggtccaaccggcgatcctggaaagaatggcgataagggtcacgctggactggccggagcccgtggagcccccggacctgacggaaacaacggagcacagggaccacccggtccccaaggtgtacagggcggaaaaggtgaacaaggccctcctggacctcccggcttccagggcctgccaggtccatctggacctgccggcgaagtcggcaagcccggagaacgcggcttgcacggtgagtttggtctccccggccccgcaggacctaggggcgaacgtggaccccctggtgaaagcggcgctgctggccccaccggccccatcggatcccgtggaccatctggacctcccggaccagatggaaataagggcgaacccggagtcgtgggagcagtgggcaccgccggcccttccggacccagtggtttgcctggtgagaggggcgctgcaggtattcccggaggcaaaggcgagaagggtgagcctggcctgcgtggtgaaatcggtaatccaggcagagatggtgctcgcggcgctcctggagcagttggagcaccaggaccagctggagccacaggcgaccgcggtgaggccggtgctgccggccctgccggacctgccggtcctaggggttcccctggcgagagaggagaggtgggacctgctggacctaacggctttgccggcccagccggagcagccggacaacccggtgcaaagggcgaaaggggcgctaaaggacccaagggtgagaacggtgtggtcggccccactggcccagtcggagccgctggaccagctggtcctaatggtcctcctggacccgctggcagtcgcggcgacggcggtcctcctggcatgaccggtttccctggagcagccggtcgcacaggtccacctggaccctctggaataagcggccccccaggtcctcccggtcctgctggcaaagagggattgaggggccccagaggcgatcaaggtccagtcggtcgcacaggagaagtcggtgctgtaggacccccaggcttcgctggcgagaagggaccctcaggagaggcaggtactgctggaccacccggtacccccggcccccagggtctcttgggtgcccccggcattctgggtttgcccggttccaggggtgagcgtggtcttcccggagtggccggcgcagtaggtgagcctggcccccttggtatcgccggtcctcctggcgctcgcggtccaccaggagctgtgggctcacctggcgtcaacggtgccccaggcgaagccggcagagatggtaatcccggaaatgatggccctccaggtagagatggtcagcctggccataaaggagaacgtggttacccaggcaacatcggccctgtcggtgccgctggtgcccctggcccccacggtcccgtcggccctgccggcaaacacggaaaccgcggtgaaaccggtccatctggtccagtgggtccagctggtgcagttggtcctcgtggcccatccggccctcagggaatcaggggtgataaaggcgagcccggagaaaagggccccagaggtctccccggactcaagggtcataacggactgcaaggcctgcccggtatcgctggacaccacggtgatcaaggagctcccggctctgtaggccctgcaggaccaagaggtcctgctggccccagcggtcctgctggtaaggacggcagaaccggccaccctggaactgttggccccgccggaattagaggaccacagggccatcaaggaccagcaggcccccccggaccacccggcccacccggacctcccggcgtatctggcggtggctacgacttcggctacgatggcgacttctacagagcagatcagcctagatccgccccttcattgcgccctaaggactacgaggtggacgctactttgaaatccttgaacaaccaaatcgagacactgcttacacctgaaggttctcgcaagaacccagctcgtacctgtagggacctgaggctgtctcaccccgagtggagttccggatactattggatcgaccccaatcagggttgtaccatggatgccattaaggtgtactgcgatttttcaactggagaaacctgcataagggcccaacccgaaaatattcctgccaagaattggtaccgctcttcaaaggataaaaagcatgtgtggctcggcgaaactattaacgccggaagccagttcgagtacaatgttgagggcgttactagcaaggagatggctacccagcttgccttcatgaggctgctggccaattatgctagccagaacatcacctaccattgcaaaaacagcattgcttacatggacgaggagacaggcaatctgaagaaagccgttattctgcagggctctaatgacgtcgaattggtcgctgaaggtaacagcaggttcacttacacagttctggtcgacggctgctccaagaaaaccaacgagtggggtaagacaatcattgaatataaaaccaacaagccttccaggttgccttttctggatatcgcccctctggatatcggaggtgccgatcaagaattcttcgtggacattggacctgtctgttttaag

SEQ ID NO: 1296 - DNA, 4098 bp, Artificial Sequence
  derived and/or modified sequence
atgctgtcttttgtcgacacacgtactcttctattactggctgtgacactgtgcctcgccacatgtcagagtctccaggaggaaaccgtgagaaaaggcccagccggggatcgagggccacgcggcgaaagggggccccccggccccccaggccgcgacggcgaggatggacctaccggccctcccggccctcccgggccacctggccctcctgggttgggagggaactttgcagcccaatatgatggaaaaggagttggcctaggcccagggccaatgggactgatggggccacgtgggccccccggggccgccggtgcacctggcccacagggctttcaagggcctgcaggggaacctggggaacctggtcagactggccctgctggggccagaggcccagccggcccaccaggtaaggccggcgaagatgggcacccaggcaagcccggtcgaccaggcgagagaggagtggtggggccccagggtgcacgcggctttcctggaactcctgggctgccaggattcaaaggcataaggggacataacggactggacggcctgaaagggcagccaggcgctcccggtgttaagggagagcctggcgctccaggtgagaatgggacacccggccagaccggagccagagggctacctggggaacgtggccgggtgggggcacctgggcctgctggcgctcgtggctcagacgggagtgtgggacccgtgggccccgcaggccctattggaagcgcagggccaccagggttcccaggcgcccctggcccaaagggcgaaattggggctgttggcaacgccggccctgcaggacctgctggccccaggggggaagttggcctgcccggcctgagcggacccgtggggccaccaggaaatcctggggctaatgggttaaccggcgccaagggtgctgctggcctgccaggcgttgctggagccccaggacttccaggccctcgcggaatacccggacctgttggcgcagcaggcgccactggagcccgcgggcttgttggggagccgggacccgcaggctcaaagggtgagtccggtaataagggcgagcccggctcagccggcccccagggacctccaggccccagtggcgaggagggaaagcgtgggcccaacggggaggccggtagcgccggccccccagggccccccggtctcagaggctccccaggtagccgaggactccccggcgctgacggcagggcaggcgttatgggaccccccggatccaggggggcaagcgggccggccggtgtcagaggtcccaatggcgacgctggtcggccaggcgagcctggattgatgggccctcgaggcctaccagggagtccaggcaatatcggccctgcaggcaaggaggggcctgtgggccttcctggcatagatggtagacccgggcctatcgggcctgcaggagctaggggggaacctggcaacataggatttccagggccaaagggacctaccggcgacccaggaaagaacggtgataagggacatgccggcctggccggggcacgcggagctccaggacctgatggcaacaacggcgcacagggccccccaggaccacaaggagtgcagggtggcaaaggggagcagggtccaccaggaccaccaggcttccaaggactgccaggaccctctggccccgctggcgaagtcggcaaacctggcgagcgggggctgcatggcgagttcggattaccagggcccgctggtccccgcggcgaacgcggacccccaggcgaatccggggcagctgggcccactggacctattggcagccggggtccttccggcccacctgggccagacggcaataagggcgaaccaggcgttgtgggggccgttgggaccgcagggccttccgggcctagtggactgcctggcgagagaggcgcagctggaattcctggtggcaagggagagaaaggtgaaccgggactgcgcggcgagatcggaaaccccggtcgcgacggcgccaggggagcccctggggctgttggcgctcctggccccgcaggcgcaaccggggatagaggagaggctggtgctgcaggccccgccggtccagcagggcctagaggttcacccggcgaaagaggtgaagtgggcccagccggtccaaacggctttgccggtcctgccggcgcagcaggccagccaggcgccaaaggcgagcgcggggccaaagggcctaagggcgaaaatggcgttgttgggccaacaggacctgtcggagccgccggtccagctggaccaaacggccctccaggacctgccggatcacggggcgatggtggtcctccaggtatgaccggctttcctggggctgccggaagaacaggcccacctggccctagtggcatctccgggcctcctgggccaccaggacctgccggcaaagaaggcctgagaggccctagaggagatcagggccccgtgggccggacaggcgaagtcggggccgttggaccccctggctttgcaggggagaagggtccctccggagaagctggaacagcaggcccacctgggactccaggcccccaaggtctgctgggggcccctggcattctcggacttcccggatcccgcggcgagcgggggctccccggggtcgccggggccgtgggcgaacctggccccctgggtattgccggtcctccaggagcccgtggacctcccggtgctgtgggctcacccggagtcaatggcgccccgggcgaagctggacgtgatggcaacccaggcaacgacggcccacccggtcgggacggccaaccaggccacaaaggcgagagaggctaccccgggaatattggaccagtgggggctgcaggcgcccctggaccacacggcccagtaggaccagccggcaaacatggcaataggggcgaaaccgggccctccgggccagtgggtcccgccggagcagtgggacctcgtggcccttccggaccacagggcatacggggcgataagggcgagccaggcgagaagggtcctagaggcctgcctggcctgaagggacacaacggccttcaggggcttccagggattgccgggcaccacggcgatcagggcgccccagggagcgtgggcccagccgggcctagagggcccgccggtcctagcggccctgctgggaaagatggaagaacaggccatccaggaacagtgggcccagcaggcatccgaggaccacagggccatcagggccctgcaggcccaccaggcccacccgggccacctgggccccccggcgtttccggcggtggctatgattttggctacgatggggacttttaccgcgccgatcaacccaggtccgccccctctctgcgtcctaaggactacgaggttgacgccactttaaagtccctcaataaccagattgaaacactgctcactccagagggttccagaaagaaccccgcccgcacatgccgcgatctccgtctgtcccatccagaatggtcctcaggctactactggattgatccaaatcagggctgcaccatggacgcaatcaaggtgtattgcgacttctctaccggcgaaacctgcatccgcgctcagcctgagaacattcctgcaaagaactggtaccgatctagcaaggataagaagcatgtttggctgggcgagacaataaacgccgggagccagtttgaatacaatgttgaaggggttacctcaaaggaaatggcaactcaactagcctttatgcgccttttagcaaattatgcatcacagaacatcacttaccattgcaagaattccatagcctatatggacgaagaaaccggaaatcttaagaaagcagtcatcctgcaaggcagtaacgacgttgagcttgttgctgaggggaactctcgttttacatatactgtactggtggacgggtgtagtaaaaaaaccaacgagtggggcaaaaccattatcgaatataagacaaacaaaccatcacgcctgccctttctggatattgcaccgctagacatcggcggcgcagatcaagagtttttcgtggatattgggccagtctgctttaag

SEQ ID NO: 1297 - DNA, 4098 bp, Artificial Sequence
  derived and/or modified sequence
atgttgtcatttgtcgatacgcgcaccctgctcctgctagccgtgacactgtgtctggccacatgccagagcctgcaggaggaaacagtgaggaagggtccagccggtgacagaggccctcgaggagaacgaggtcctccaggaccgcccgggagagatggcgaggatggacccacaggtccacctggccctcccggtccacctgggccacccgggctgggaggtaacttcgctgcccaatacgacggaaaaggagtgggcttggggccgggtcccatgggactgatgggcccacgtgggccaccaggggctgccggcgcccccggacctcaaggattccagggaccagccggagaacctggagagccaggtcaaactggcccagccggagcgcgcggccccgctgggccgcccgggaaagcgggagaggatggacatccaggaaagccgggccgtccaggcgagcggggtgtggtggggccacagggggcgcgtggctttccggggacacctgggctcccggggttcaagggaatccgcggccacaacggccttgacgggctcaaaggacagcctggtgcacccggggtgaagggagagccaggtgctccaggagaaaacggcactccaggacaaacaggcgctagaggtctgccgggtgaacgagggcgcgttggggctcccggtcctgcaggtgctcgggggtcagacggttcagtcggacctgtgggccccgccgggcctattgggagcgctggcccgccaggattcccaggggctcctggccctaagggtgagattggggcggttggtaacgctggccccgctgggccagcgggccccagaggggaggttgggctgcccggattgagcggccccgttgggcccccagggaacccaggagcaaatgggttaacaggggcaaagggcgccgccgggttgcccggcgtagcgggtgcccctggacttcccggcccccggggaataccgggacccgtgggggctgctggcgcgacaggagcgcgcgggttagtaggtgaacctggtccggccgggtcaaaaggcgagtctggtaacaagggcgaaccaggctccgccggtccacagggaccaccgggacctagtggtgaggaggggaagagggggcccaacggagaggccggcagcgccggaccacccggaccgcctggcttaaggggctccccaggaagtagggggctcccaggcgctgatggtagggccggtgtcatgggcccaccgggtagtaggggcgcctccggccccgccggagtgaggggcccgaatggagatgcagggaggcccggggagcctggtttgatgggaccgcgggggctgccaggaagtccaggtaatatcgggcctgccggtaaagagggccccgtgggccttccaggaatcgacggaaggcccgggccaatcggaccggcgggggcaagaggagaacctggcaatataggtttccccggccccaagggccctacaggtgacccgggcaagaacggggacaaaggacatgctgggctcgccggtgctcgcggtgcccctggtcccgatggaaataatggagcacaggggccacctgggccgcagggcgtgcagggggggaaaggagaacaggggccccctggacctcctggatttcagggcctgccaggacccagcggacctgccggagaagttgggaagcctggagaaaggggactgcatggggaattcggtcttcctggtcctgccggccctcgcggagagaggggccccccaggcgagtccggggccgctgggcccaccggaccaatcggctcgcggggaccttctgggccccccggacctgatggaaacaagggggaacccggtgtggtaggcgcagtcggtaccgcagggccctccgggccaagtggactgccaggtgagcggggggcagctggaataccaggcggaaagggcgaaaagggtgagcctggtttgaggggcgaaattggaaacccaggtagagatggcgctaggggtgcgccaggcgcagtgggcgcacccgggccagccggtgccaccggggatcgcggcgaagccggcgctgcagggcccgctggacccgctggtcccagagggtcgcccggcgagaggggagaggttgggccagcggggcctaatggcttcgctggaccagccggagcagcaggccagccaggcgctaagggcgagcggggcgcaaaaggccccaaaggagagaacggggtagtggggcccacgggccccgtgggggctgcgggaccggctggacccaatggaccccccgggcccgctggatctcgcggagacggaggacctcctggaatgactggcttccctggcgctgccggacgcactgggccccctgggccttcagggatctctggtccgcccgggccgcctggcccagccggaaaggaaggcttgcgcggcccccgtggggaccagggccctgtgggacggaccggggaagttggcgccgttgggcctccaggttttgcgggcgagaagggccctagcggggaggccggtacagccggcccccccggtaccccaggacctcagggtctactgggtgctccaggcatccttggccttcctggaagcagaggcgagagaggcctgccaggagtggcaggtgcagtgggggaacctggccctcttgggattgcaggaccccccggagcccggggccctccaggggcagtcgggtcccctggggttaacggggcccctggggaggctgggagggatggtaacccgggaaacgatgggccacccggccgagatgggcagcctggccacaagggagagcgaggataccccggcaatatcgggccggtgggggccgcgggggcccctggtcctcatggccccgtgggcccagcagggaagcatgggaaccggggggagaccggtccctcaggaccagtgggacctgcgggcgctgtgggaccccgagggccctcaggccctcaggggattcggggcgataaaggtgagcccggagagaagggcccaagaggacttccagggctcaaaggacacaatggactccaggggctacccggaatcgctggtcaccacggagaccaaggcgctcctggatccgtcgggcccgccggcccccgcgggcccgctggcccaagtggacccgcagggaaagacggacgcactggacaccccggtactgttgggccggccggaatacgaggacctcagggccatcaggggcccgccgggccaccaggtccccctgggcctcctgggcccccaggggtgtctggcgggggctacgacttcggttatgacggcgacttttaccgggccgaccaacccaggtctgctccctccctcagacccaaggactatgaggttgacgcgaccctgaagagtctcaataaccaaatcgagaccctgctcacacctgaaggcagtcggaaaaaccctgctcggacttgccgcgatctaaggctctctcaccctgagtggagtagcggctactactggattgatcccaaccagggatgcaccatggatgctataaaggtttattgtgatttctctactggagaaacctgcattcgagcccagcccgagaacatcccagcaaaaaactggtatcggagtagcaaggacaagaagcacgtgtggctgggggagaccattaacgccggctctcagtttgagtataacgtggaaggggtaaccagtaaggaaatggctactcagctggccttcatgcggttgctcgccaattacgcttcccagaatattacgtaccattgcaagaatagtattgcgtacatggatgaggagacggggaatctaaagaaggctgtcatactccaaggttccaacgatgtggagctcgttgccgagggaaatagccgtttcacgtacacggtcctcgtcgatggatgttctaaaaaaacaaatgaatggggcaagacaataattgaatacaagacgaataagccctccaggctgcccttcttggatatcgccccgctcgatatagggggcgctgatcaggaatttttcgtggatatcggccccgtgtgcttcaaa

SEQ ID NO: 1298 - DNA, 4098 bp, Artificial Sequence
  derived and/or modified sequence
atgctctcattcgtggacacgaggactctcctcctccttgccgtcaccctgtgtctggctacctgccagtctctgcaggaagaaaccgtgcgcaagggtccggcgggtgatcgcgggccgagaggcgagcgtgggccgccgggcccgcctgggcgcgatggggaggacggacccaccggcccacctggcccaccaggacccccgggtccacccggacttggcggaaacttcgccgctcaatacgacggcaaaggtgtgggattgggaccgggtccgatggggttgatgggcccacgcgggccacctggcgccgctggtgcaccgggacctcaggggttccagggccccgctggggaaccgggagaaccaggacagaccggacctgcaggcgcgcgcgggccagcggggcctccaggcaaagctggagaggacggtcaccccggtaagccgggcagaccgggtgaaaggggagtggtcggacctcagggtgcgcgaggattccccgggactccaggcctccctgggttcaagggaatcagaggacacaatggactcgacggactgaagggccagccgggagcaccgggagtcaagggagaaccgggggcgcctggggagaatggaaccccaggccaaactggagcgagagggctgccgggggaacgcggacgcgtgggggcccccgggcctgccggcgcccggggaagcgatggtagcgtggggcccgtgggcccagcaggccctatcggctcggcggggccgccggggttccctggcgccccgggtcctaaaggagaaattggggcagtcgggaacgcggggcccgccggtccagcagggccgcggggagaggtggggctccctggtctgtcaggccccgtcggaccccccgggaacccgggcgccaatggcctgactggcgccaaaggagccgccggcctgccaggggtggcgggtgccccgggtctgcctggaccgcggggaattccgggtccagtgggagcagctggagcaaccggagcaagaggcctggttggcgaaccggggccggcaggatctaagggagaatcaggaaataagggtgaaccaggatccgccggtccccaaggaccgcctggtccctccggagaggagggaaagcgcgggccgaacggcgaagcggggtcggctggaccgccaggcccaccggggctgagaggctcgcctggctcgcggggactccctggcgcagatggtcgggctggagtgatggggccgccagggtcgcgcggcgcgtcaggaccagcaggagtgcggggacctaatggagatgcgggtcggccaggagaacctggactgatgggaccgagaggtttgccggggagtcctggaaacatcggacccgctggtaaagaaggtcctgtgggacttccgggaatcgatggccgcccgggaccgataggtcctgcgggagccagaggcgagcccggcaacatcggattcccgggccctaaaggaccaactggcgacccgggaaaaaacggagacaagggacacgcaggactcgctggggcacggggagctccgggacctgacggcaacaacggggcgcaaggtccccccggcccacagggtgtccagggcggaaaaggcgaacaaggcccgccaggtcctccgggcttccaaggactgccagggccgtccggaccagccggggaagtcggtaagcctggagagaggggactccacggggaatttggacttccaggaccggcgggtccgcgaggcgaacgtgggccaccaggtgagagcggagccgccggtccgactggcccgatcggatccaggggaccatccggaccgccggggcctgacggaaacaagggggagccaggcgtggttggcgcggtcgggacggcgggcccgtcgggacctagcgggctgccgggagagcggggggccgcgggaatccctggaggaaaaggagagaagggcgagcctggcttgcggggggaaatcggaaacccgggcagggatggtgcccggggggcccctggtgcggtcggtgcacctggtccagccggagccaccggggatagaggagaggctggggccgctggcccagcgggcccagccggtccaagaggatcacccggggaacgcggtgaagtcggaccagcaggcccgaacggattcgcaggaccggcaggagcagccggacaaccgggggctaagggagagagaggtgccaagggaccgaagggagaaaatggcgtagtgggaccaactggtccagtgggcgccgcgggaccagccggacctaacgggcctcctggtccggccggatcccgcggcgatggaggtccgcccggaatgactggattcccaggagctgcaggcagaactgggccccccggcccgtcgggtatctccgggccgcccggtcctccgggtccagctggtaaggaaggattgaggggaccgcgcggcgatcaaggaccagtgggacgcaccggggaggtgggcgccgttgggccaccgggctttgcaggcgagaaaggcccatctggcgaggccggtactgcaggaccgccgggcactccgggcccacaaggactgttgggggcgccgggaattctgggtctgccaggcagcagaggggaacgcggcctgcccggcgtggccggagcggtgggtgagccaggacctctcggaatagccgggcctccgggggctcgggggccgcccggagccgtcggctccccgggagtgaacggagcacctggagaggcaggacgcgacggcaatccagggaatgatggcccgccagggcgtgacggtcaacctggtcataagggcgaacgggggtaccctgggaacatcggcccggtaggcgccgcaggagccccgggaccgcacgggccggtaggacctgccggcaagcatggtaaccggggggaaaccggcccgtcaggacctgttggaccagccggcgccgtgggccctcgcggtccttcgggaccacaaggtattcgcggcgacaagggggaaccgggcgagaagggtcccagaggactgccgggactcaaggggcacaacggcctgcaggggcttccgggtatcgcaggacaccatggagatcagggtgcccctggctcggtcggtcccgctggaccaagagggcctgccggaccgtctgggcccgccggaaaagacggacggaccgggcatcctggaactgtgggacctgctggcattcgcgggccgcaggggcatcaaggcccggcagggccgccaggtcccccgggaccaccgggaccgcccggtgtctccggcggtggatacgacttcgggtacgacggcgacttttatcgcgccgaccagccgcgcagcgctccttcacttcggccaaaggattacgaggtcgacgctaccctgaagtcgctcaataaccaaatcgaaactttgctgaccccggagggcagcagaaagaatcctgccaggacttgcagggatctccgattgtcgcacccggaatggtccagcggatactactggatcgacccgaatcagggatgcaccatggacgccatcaaggtgtactgcgacttttcgaccggagaaacgtgcatcagagcgcagccggagaacatccccgcgaagaactggtaccggtccagcaaggacaagaagcacgtctggctgggagaaaccatcaatgcggggtcacagtttgaatacaacgtggagggcgtgacttccaaggagatggcgactcagctggcgttcatgcgcctgctcgctaactacgcctcacagaacatcacctaccattgtaagaatagcatcgcgtatatggatgaagaaactggaaatctgaaaaaggccgtgatccttcagggatcgaatgatgtggaactggtggcggagggaaattcccggttcacctacacggtgctggtggacggatgctcaaagaaaaccaacgagtggggaaaaaccatcattgagtacaaaactaacaagccgtcccggctgccgtttctggacatcgcgccactggacattggcggcgccgatcaggaattcttcgttgacatcggccctgtgtgtttcaaa

SEQ ID NO: 1299 - DNA, 4098 bp, Artificial Sequence
  derived and/or modified sequence
atgctatcgtttgttgatacgcgaacgttattactattagcggtaacgctatgtctagcgacgtgtcaatcgttacaagaagaaacggtacgaaaaggtccggcgggtgatcgaggtccgcgtggtgaacgaggtccgccgggtccgccgggtcgtgatggtgaagatggtccgacgggtccgccgggtccgccgggtccgccgggtccgccgggtttaggtggtaattttgcggcgcaatatgatggtaaaggtgttggtctaggtccgggtccgatgggtctaatgggtccgcgtggtccgccgggtgcggcgggtgcgccgggtccgcaaggttttcaaggtccggcgggtgaaccgggtgaaccgggtcaaacgggtccggcgggtgcgcgtggtccggcgggtccgccgggtaaagcgggtgaagatggtcatccgggtaaaccgggtcgtccgggtgaacgaggtgtagtaggtccgcaaggtgcgcgaggttttccgggtacgccgggtctaccgggttttaaaggtatacgtggtcataatggtctagatggtctaaaaggtcaaccgggtgcgccgggtgttaaaggtgaaccgggtgcgccgggtgaaaatggtacgccgggtcaaacgggtgcgcgtggtctaccgggtgaacgtggtcgtgtaggtgcgccgggtccggcgggtgcgcgtggttcggatggttcggtaggtccggtaggtccggcgggtccgataggttcggcgggtccgccgggttttccgggtgcgccgggtccgaaaggtgaaataggtgcggtaggtaatgcgggtccggcgggtccggcgggtccgcgaggtgaagttggtttaccgggtttatcgggtccggttggtccgccgggtaatccgggtgcgaatggtttaacgggtgcgaaaggtgcggcgggtttaccgggtgttgcgggtgcgccgggtctaccgggtccgcgtggtataccgggtccggtaggtgcggcgggtgcgacgggtgcgcgaggtttagtaggtgaaccgggtccggcgggttcgaaaggtgaatcgggtaataaaggtgaaccgggttcggcgggtccgcaaggtccgccgggtccgtcgggtgaagaaggtaaacgaggtccgaatggtgaagcgggttcggcgggtccgccgggtccgccgggtttacgtggttcgccgggttcgcgtggtttaccgggtgcggatggtcgtgcgggtgtaatgggtccgccgggttcgcgaggtgcgtcgggtccggcgggtgtacgtggtccgaatggtgatgcgggtcgtccgggtgaaccgggtctaatgggtccgcgtggtttaccgggttcgccgggtaatataggtccggcgggtaaagaaggtccggtaggtttaccgggtatagatggtcgtccgggtccgataggtccggcgggtgcgcgtggtgaaccgggtaatataggttttccgggtccgaaaggtccgacgggtgatccgggtaaaaatggtgataaaggtcatgcgggtttagcgggtgcgcgtggtgcgccgggtccggatggtaataatggtgcgcaaggtccgccgggtccgcaaggtgttcaaggtggtaaaggtgaacaaggtccgccgggtccgccgggttttcaaggtttaccgggtccgtcgggtccggcgggtgaagtaggtaaaccgggtgaacgaggtctacatggtgaatttggtctaccgggtccggcgggtccgcgtggtgaacgtggtccgccgggtgaatcgggtgcggcgggtccgacgggtccgataggttcgcgtggtccgtcgggtccgccgggtccggatggtaataaaggtgaaccgggtgtagtaggtgcggtaggtacggcgggtccgtcgggtccgtcgggtctaccgggtgaacgtggtgcggcgggtataccgggtggtaaaggtgaaaaaggtgaaccgggtttacgtggtgaaataggtaatccgggtcgtgatggtgcgcgtggtgcgccgggtgcggtaggtgcgccgggtccggcgggtgcgacgggtgatcgaggtgaagcgggtgcggcgggtccggcgggtccggcgggtccgcgaggttcgccgggtgaacgtggtgaagtaggtccggcgggtccgaatggttttgcgggtccggcgggtgcggcgggtcaaccgggtgcgaaaggtgaacgaggtgcgaaaggtccgaaaggtgaaaatggtgtagttggtccgacgggtccggtaggtgcggcgggtccggcgggtccgaatggtccgccgggtccggcgggttcgcgtggtgatggtggtccgccgggtatgacgggttttccgggtgcggcgggtcgtacgggtccgccgggtccgtcgggtatatcgggtccgccgggtccgccgggtccggcgggtaaagaaggtctacgaggtccgcgtggtgatcaaggtccggtaggtcgtacgggtgaagttggtgcggtaggtccgccgggttttgcgggtgaaaaaggtccgtcgggtgaagcgggtacggcgggtccgccgggtacgccgggtccgcaaggtctattaggtgcgccgggtatattaggtttaccgggttcgcgaggtgaacgtggtctaccgggtgttgcgggtgcggttggtgaaccgggtccgttaggtatagcgggtccgccgggtgcgcgaggtccgccgggtgcggttggttcgccgggtgtaaatggtgcgccgggtgaagcgggtcgtgatggtaatccgggtaatgatggtccgccgggtcgagatggtcaaccgggtcataaaggtgaacgaggttatccgggtaatataggtccggttggtgcggcgggtgcgccgggtccgcatggtccggtaggtccggcgggtaaacatggtaatcgtggtgaaacgggtccgtcgggtccggttggtccggcgggtgcggtaggtccgcgtggtccgtcgggtccgcaaggtatacgtggtgataaaggtgaaccgggtgaaaaaggtccgcgaggtctaccgggtttaaaaggtcataatggtctacaaggtctaccgggtatagcgggtcatcatggtgatcaaggtgcgccgggttcggtaggtccggcgggtccgcgaggtccggcgggtccgtcgggtccggcgggtaaagatggtcgtacgggtcatccgggtacggttggtccggcgggtatacgtggtccgcaaggtcatcaaggtccggcgggtccgccgggtccgccgggtccgccgggtccgccgggtgtatcgggtggtggttatgattttggttatgatggtgatttttatcgtgcggatcaaccgcgatcggcgccgtcgttacgaccgaaagattatgaagttgatgcgacgctaaaatcgctaaataatcaaatagaaacgttactaacgccggaaggttcgcgaaaaaatccggcgcgtacgtgtcgtgatttacgactatcgcatccggaatggtcgtcgggttattattggatagatccgaatcaaggttgtacgatggatgcgataaaagtatattgtgatttttcgacgggtgaaacgtgtatacgtgcgcaaccggaaaatataccggcgaaaaattggtatcgatcgtcgaaagataaaaaacatgtatggttaggtgaaacgataaatgcgggttcgcaatttgaatataatgttgaaggtgtaacgtcgaaagaaatggcgacgcaattagcgtttatgcgtctactagcgaattatgcgtcgcaaaatataacgtatcattgtaaaaattcgatagcgtatatggatgaagaaacgggtaatttaaaaaaagcggtaatactacaaggttcgaatgatgtagaactagtagcggaaggtaattcgcgttttacgtatacggtattagtagatggttgttcgaaaaaaacgaatgaatggggtaaaacgataatagaatataaaacgaataaaccgtcgcgtttaccgtttctagatatagcgccgctagatataggtggtgcggatcaagaattttttgttgatataggtccggtatgttttaaa

SEQ ID NO: 1300 - DNA, 4098 bp, Artificial Sequence
  derived and/or modified sequence
atgctctccttcgtggacacccggacgttgctgctgctggccgtcaccctctgtcttgccacctgccaatccctgcaagaggaaactgtacgcaagggcccggctggggatcggggaccgcgcggagagcgtggacctcctggtccgcccggccgagatggtgaggacggaccgaccgggccacccggcccaccagggccaccgggaccaccgggactgggaggaaacttcgccgcacagtacgacgggaagggagtgggactgggcccggggccgatggggttgatgggaccacggggaccgccaggagcggcgggggccccaggaccacagggattccaaggacctgctggcgaacccggggaaccaggacagaccggccctgctggcgcccgcggacccgctggaccgcctggcaaagctggcgaagatggacatccaggaaagccaggacgaccgggcgaaaggggcgtcgttggaccccagggggctcgcggtttcccgggaaccccgggcctgcccggattcaaaggaatcagaggccataatgggctcgacgggctcaagggacagcccggtgctcccggggtcaagggagaaccaggggcacccggtgagaacggaactcctggccagaccggagctagaggattgcccggtgagcggggacgggtcggtgcgccggggcctgcaggggcgcgcgggtcagacggcagcgtggggcctgtcggaccggctggtccgatcggctcggcaggtccgcctggcttcccgggtgctccgggtccgaagggcgaaatcggtgccgtcggaaacgccgggcctgccggtcccgctggacctaggggggaggtcggattgccagggctgtcagggccagtgggtccaccagggaatccgggtgccaacggcttgaccggggcgaagggtgccgccggccttcctggggtggccggggcccctggactcccggggcccaggggtatcccaggaccggtgggggcagcgggcgctaccggagcgcgcggcctcgtgggagagccggggccggctggatccaaaggcgaatcgggcaataagggtgaaccaggttccgccggaccgcaaggtccaccgggaccgtcaggcgaagagggaaaacgcggacccaacggcgaagcaggtagcgctggcccaccggggccgccgggtttgcgggggagtcccgggtcgagaggacttccgggagcggacggtcgcgccggagtcatgggcccgccgggatcgcgtggcgcatcgggtcctgctggtgtgcggggcccgaatggagacgcaggccgcccgggggagccgggactgatggggccgcggggactgcccggttcacctggaaacatcggcccagccggtaaagagggtcccgtgggccttccaggaatcgacgggaggcccggaccaattggaccggcaggggcccgcggagaaccaggcaatatcggcttccctggccctaagggacctacgggcgatccaggcaagaacggtgacaagggtcacgccggactggcgggtgcaagaggggctccaggccccgatggcaacaacggagcccagggacctccgggtccacagggagtacaaggtggaaagggcgaacaaggaccaccagggcccccaggatttcaggggctcccaggtccatcaggcccggccggcgaagttgggaagccaggagagcgcgggcttcacggagaattcggactcccgggaccggccggcccgagaggagaacggggtccacctggcgagagcggcgcagcaggaccgacgggacccatcggaagccggggaccgtccggccctccgggaccggacggtaataagggagaaccgggagtggtgggtgcggttggcacggccggtccgtccggcccgtcgggactgccaggggaaagaggagcggccggaatcccgggagggaagggtgagaagggagagcctggacttaggggagaaatcggaaacccggggcgcgacggcgcacgcggggctcctggcgcagttggcgcacctgggccagccggagccactggagatagaggggaagccggagcggccgggccggcaggacctgcgggcccacgcggctcgccgggtgagcggggcgaagtgggccctgcaggtcctaatggcttcgcaggacccgcgggagctgctggtcagccgggcgcaaagggagaacggggcgcgaaaggtccaaagggggaaaacggtgtggtgggtcctactggcccggtgggagccgcggggcccgcgggacctaacggaccgccggggccagccgggtctaggggagatggaggaccgcctgggatgactgggttccccggcgccgccgggagaactgggccgccggggccgtcaggcatctctggcccgcctggtcctccgggacccgctggcaaagaaggactgcgaggtccgcggggagatcagggccctgtcggacgcaccggagaggtgggagcagtggggccacctggtttcgcgggagagaagggaccatcgggagaagcggggaccgccggacctccgggcacgccgggcccacagggccttctgggggcgccgggaatccttgggttgccgggttcccgcggggagaggggcctcccgggagtcgcaggagccgtgggtgagccaggccccctgggcatcgccggaccacccggagcaaggggccccccgggagcggtgggatcgccgggagtgaacggagcgcccggggaagctggacgggacggtaacccgggaaatgacggcccacccggacgcgacggacaaccgggccataaaggtgagcggggttacccgggcaacatcgggccagtcggggctgccggtgcccctgggcctcacggaccagtcggacccgcgggtaagcacgggaatcgtggtgagactggaccgtcagggccggtgggtccggcgggcgctgtcggtccaagaggaccatcagggccacaaggtattagaggagacaaaggcgaaccaggtgaaaagggaccacgcggactgcccggactcaagggtcataacggtctgcaagggctgcctggaattgcgggtcaccatggagatcagggagcgcctggaagcgtcggccccgctggccccaggggaccagcggggccttcgggcccagccggaaaagacggacgcactggccatccggggactgttggaccagctggtatccggggaccgcagggtcaccaaggtcccgccggcccgcctgggccaccaggacctccgggacctccaggtgtcagcggcggaggatacgactttggctacgacggagatttctaccgggcagaccagccgagatccgcaccgtccctcagaccaaaggactatgaggtcgacgcgactctgaagtccctcaacaatcaaatcgaaacgctgctgacccccgagggatcaagaaagaatcctgcgcggacttgtagagatctgcggctgtcccacccggagtggagcagcggatactactggattgacccgaaccagggatgcaccatggacgctattaaggtgtactgtgatttctcaaccggcgaaacctgcattcgcgcccaacccgagaatattccggcaaagaactggtaccgctcctcgaaggacaagaagcacgtttggctcggcgaaaccatcaacgccggtagccagtttgaatacaacgttgaaggcgttacctccaaagagatggccactcagctcgcgtttatgcgcctgcttgccaactacgcctcacagaacatcacctaccactgcaaaaacagcatagcctatatggatgaggaaactggcaatctcaagaaggccgtgatcctgcagggatcgaatgatgtcgaactcgtggccgaaggcaatagccggtttacctacactgttctggtggacggatgctcgaaaaagactaatgagtgggggaaaactatcatcgagtacaagaccaacaaacctagccggctgcctttcctcgatatcgcccccctcgatatcggaggagcggatcaggagttctttgtggacatcggacctgtgtgcttcaag

SEQ ID NO: 1301 - DNA, 4098 bp, Artificial Sequence
  derived and/or modified sequence
atgctgtcctttgtggatacgagaaccctcctgcttctcgcagtgaccctgtgtcttgcaacctgccaatcactgcaggaagagactgtgaggaagggtcccgccggcgataggggacccaggggagaaagagggcccccgggcccacctggtcgtgatggtgaagatgggcctacgggtcctccgggccctcccgggccccctggacccccagggctgggagggaatttcgcagcacagtacgacggcaagggtgttggcctgggaccaggacctatgggtcttatgggacctagaggcccacccggtgcagcaggagcgcctggaccccaaggttttcaagggcccgcaggagagcctggggagcccggacagaccggcccagcaggagcccgagggccagcgggaccaccggggaaggcaggcgaagatggccatcctgggaagcctggacggcctggcgagaggggcgttgtaggacctcagggagcacgtgggtttcccggaactcctggactcccaggattcaaaggaatccgcgggcacaacggactggatggtctgaaaggacagcctggagcacccggtgtgaagggagagccaggagctcccggtgagaacggtactccggggcaaaccggcgcacgtggtctgccaggtgaacgcggtcgcgtgggtgctccggggccagcaggagcgagaggctcagacggttccgtagggccggtcgggcctgctggaccaattggctcggccggtcctcccggtttccccggtgcaccaggaccaaagggtgaaattggggcagtgggcaacgcaggaccggcaggaccagccgggccgcgtggagaagtggggcttccaggcctgtcggggccggtgggccctccaggaaaccccggagccaatggccttacgggagcgaagggagcagctggactccccggggtagccggggcacctggacttcccggacctcggggcatccccggacccgtgggtgccgcaggagcaacgggtgctaggggtcttgtcggtgaacccggaccagcaggatcgaagggcgaatccggaaacaagggagaacctggaagcgctgggccgcagggacctcctgggccttcaggagaagaaggtaagcgaggaccgaacggagaagcagggtcggcaggtccccccgggccaccgggactcagaggatcgccagggtcgcgcgggcttccaggtgcagatgggcgggcaggagtgatgggtccacccggctcacgcggggcgtccggtcctgcgggagtgcgcggaccaaacggtgatgcaggtcgtcccggcgagccgggcttgatgggcccacggggtctgcctggatcaccgggcaacattggtccagcgggaaaggaaggacctgttggcctgcctggaatcgatggccggccgggtccaatcggtccggcgggagcgcgaggcgaacctggtaacattggttttcctggtccaaaaggaccaaccggcgatcctggaaagaatggcgacaagggtcatgcaggattggcaggtgccagaggagcccctggccctgatggcaataacggtgcccaagggcctcctggtcctcaaggagtgcagggtggcaagggcgaacaaggtccaccgggacctcccggatttcagggactccccggaccaagcggcccagcgggcgaggtcggaaaacctggtgaaagaggtttgcatggagaatttggccttcctggcccagctggcccgagaggtgaaaggggccctcctggtgaatcgggagcggcagggccaaccggtcctataggctccaggggacccagcggacctccaggcccggacggaaataagggggaaccaggagtggtgggggcagtggggactgccggccctagcggtccatccggcctgccaggtgagcgaggagcagcaggaatccctgggggtaagggagaaaaaggagaaccaggtctgcggggagagatcggcaatccgggaagagacggcgcccgcggagctcctggggccgtgggcgcaccaggacccgcaggggcaaccggagatagaggagaagcaggcgccgcgggccctgccggtccggctggtccacgggggtcacccggtgaacggggagaggtcggcccggcaggacccaatgggttcgccgggccggcaggggcagccgggcagccgggagccaagggtgagcgaggtgccaaaggtcctaaaggagaaaatggtgtggtgggtcccactggcccagtgggtgcagctggacccgcgggaccaaacggccctccgggtccggcagggtcgaggggagatggcggacctcctggtatgaccggattcccaggtgcagccggtagaactgggccaccggggcctagcggcatttcagggcctccgggtcctcccggaccagctggtaaagagggactgaggggtcctaggggagatcagggccctgtgggacggaccggggaagtcggtgcggtgggtcctccagggtttgcaggagaaaagggcccatcgggtgaggcgggtacggcaggtccgccaggtacccccggcccacagggcctgctcggcgcacctggtatcctcggtctgccgggctcccgaggagaaagaggcttgcctggagtggcaggtgcagtgggtgaacctggtccactcggaatcgctggcccacctggggccagagggcctcccggggcagtcggaagtccaggcgtgaatggagcaccgggggaagcagggcgcgacggtaaccctggaaacgatggaccccctggccgcgatggccaaccagggcataagggagagcgtggatacccgggaaacataggcccagtcggggctgccggggcgccaggtcctcatggccccgtcggaccagcgggcaaacatggaaacagaggggaaactggtcctagcgggccggtgggacccgccggagcagtggggccaagagggccaagcggccctcaaggcattaggggagataaaggtgagcccggtgaaaaaggccctaggggactccctggtctgaaggggcacaacgggttgcaagggttgccgggcatagcaggccatcacggagatcagggagcacccgggtcggtgggtccagctgggcccagaggacctgcagggccttccgggccagccggaaaggatggaagaactggtcatccaggcaccgtcgggcctgccgggattagaggtccgcaaggccatcaagggccagcagggccaccaggcccgcccgggccgcccggaccacctggtgtcagcggagggggatacgatttcggttacgacggcgacttctaccgggctgatcaacccagatcagctccttccctgcgcccgaaggactacgaagtggacgcaacgctcaagagcctgaacaatcaaatcgagactttgctgaccccagaaggatcgcgcaagaatcccgcccgcacttgtcgggatctgcggctttcgcacccagagtggtcctccggctactactggattgatcctaaccagggatgtaccatggacgcgatcaaggtgtactgtgatttttccactggagagacttgtattcgcgcacagcccgaaaacatccctgcaaagaattggtaccgatcctctaaggacaagaaacatgtttggctcggcgaaactataaacgcgggttcccaattcgagtataatgtggagggtgtgacttcgaaggagatggccacccagcttgcgtttatgagacttctcgcaaactacgccagccagaacataacctaccattgcaaaaactcaatcgcgtacatggacgaggaaaccggaaacctcaagaaagcggtgattctccaaggatcgaacgatgtggaactggtggcagagggcaattcgcggtttacctatactgtccttgtcgatggatgcagcaaaaagactaacgaatggggaaagactattatcgagtacaagaccaataagccaagcagacttccatttcttgatattgcacctctggatattggcggggccgaccaagaattctttgtggatattgggcctgtgtgctttaaa

SEQ ID NO: 1302 - DNA, 4098 bp, Artificial Sequence
  derived and/or modified sequence
atgctgtcgtttgtcgataccaggacgctgctgctgctcgcggtcactctgtgtctcgccacctgtcaatcactgcaggaggagactgtgcgcaaagggcctgccggagatcgggggcctagaggcgaacgcggaccaccaggtccccctggacgtgatggggaggacggcccgaccggaccacccggacctccgggaccacccggccctcccggactcggcggaaactttgcagctcagtacgatggaaaaggagtcggtcttgggcctggtcctatggggttgatgggccctcgtggtcccccgggggcagcgggggcgcctggtccacaaggattccaaggtccagcaggtgagccaggagagcctggccagaccggtcctgccggagcaaggggtccagctggaccacccggtaaggccggagaagatggacacccaggaaagccagggcgacctggtgaaaggggcgtggtcgggccccaaggggcaaggggttttcctggaactccggggctgcctggctttaagggaatcaggggtcataacggtcttgatggacttaagggacagcctggcgctcccggagttaaaggagaacctggtgcccctggtgaaaatggaacccccggtcagaccggtgcacgcggactccccggagaacggggccgtgtgggtgcccccggtccagctggtgctcgtggttcagatggttccgtgggaccagtgggacccgcgggacctatcggatcggcagggcctccgggatttcctggagcgccgggacccaagggtgaaataggagcggtgggaaatgcgggaccagccggaccagcgggaccaaggggggaggtcggcctgcctggactgtccggtccagtcggcccacctggtaaccctggagcaaatggtcttactggagcaaaaggcgcagcaggacttcctggtgtggcaggtgcacctggccttcctgggcccagaggaattcctggtccggtgggtgcagcaggagctacgggagcacgtgggttggtcggggagccaggaccagcgggaagcaaaggagagtccgggaacaagggtgaaccaggtagcgcgggacctcaaggacctcctggtccctctggtgaagagggtaagagaggcccaaatggagaagctgggtccgcgggcccgcccggtccacctggactcagaggaagcccgggttccagggggctgccgggggcagatgggcgggcaggagtcatgggaccaccaggctcaagaggggcatccgggccagccggagtgcgaggaccaaacggggatgcgggtcggccgggtgagcctggacttatgggaccgagaggtctgcctggttcgccagggaacattgggccagcgggtaaggaaggacctgttggactgccaggaattgacggacgaccagggcctatcggtccggcaggagcacggggggagccgggaaacattggatttccggggccaaaagggcctactggtgatcccggaaagaacggcgataagggtcatgcaggactggcaggtgcaaggggagcaccaggacccgatggaaacaatggagcacagggaccccccgggccacaaggcgtgcaagggggcaagggtgaacaaggtcctcctggacctcccgggtttcaaggactgcccggaccatcgggaccagccggcgaagtgggcaaacccggagaacgggggttgcatggcgaattcggtctgccaggtcctgctggtcctagaggggagcgtgggccacccggcgaatcaggggccgcagggccaactggacctatagggagcagggggccttccggtccaccaggaccggatggaaacaagggagagccgggcgttgtgggtgcggtgggcaccgcgggacctagcgggccttcgggactgccaggtgaacgaggggcagcgggtatcccaggcgggaagggggaaaaaggtgagccaggtcttaggggtgagatcggtaatccgggacgcgatggtgcaagaggtgcccccggggccgtgggggcccctgggcctgccggtgccacgggcgacagaggcgaggcaggtgccgccggtccagcaggccctgctggccccaggggatcccccggtgaaagaggtgaggttggtcctgccgggccaaatggatttgccggcccagcaggagctgcaggacagcctggagccaagggggaacgcggagccaagggaccgaagggtgaaaatggcgtggtcggacctaccggaccagtgggtgcagctggtcccgccggaccaaatggtccacctgggcccgcgggtagcagaggtgatggaggaccacccgggatgaccggattccccggtgctgcaggccgtacgggtcctcctggtccatcgggaatctcaggtccgccaggccctccgggcccagcaggaaaagagggtctgagaggaccccgaggagatcaggggcctgtcgggcggactggagaggtcggagcagtgggtccaccaggttttgccggagaaaagggaccctcgggggaagcaggaacggcaggtcctcccggcacgcctggacctcaagggcttctgggcgcacctggcattttgggactccctggatcccgaggtgaacgaggactccctggggtggcgggagcagtgggcgagcccggacctctcgggatagcagggccccccggtgcaagaggcccgccaggtgcagttggttcgccgggagttaacggtgcaccaggggaagccggccgcgacggtaaccccggaaacgatgggccccctggacgcgatggacaacctgggcacaagggcgaacgtggttaccctggcaacattggacctgtcggggccgcaggcgcacccgggccgcacggaccagtcgggcctgctgggaagcatggtaaccggggagaaaccggtccatcaggacccgtgggtcctgctggggcggtgggccctcggggaccgtcaggccctcaaggcatccgcggggataagggagaaccaggagaaaagggacctcggggacttccggggcttaaaggacataacgggctgcagggtctgcccggcattgcagggcaccacggtgatcagggggcgccgggaagcgtgggccctgctggccccagaggaccggccggtccatcaggacctgccggaaaggacggaaggaccggtcatcctggaactgtgggtcccgccggtatccggggacctcaaggacatcagggcccggcaggcccacccggacctcctggaccgccaggcccaccaggagtgtcgggtggaggctacgacttcggatacgatggagacttttaccgcgcagatcaacctcgcagcgccccgagcttgcgacctaaggactacgaagtggatgctaccctcaaatcgctgaataatcagattgaaaccttgctcactcccgaaggttcccgcaagaatccggcaagaacttgtagagatctcaggctttcccacccagaatggtcgtctggctactattggattgacccgaaccagggctgtactatggacgcaatcaaagtgtactgtgacttctcaactggggaaacctgcattcgagcccaaccagagaacattcccgcgaaaaactggtacaggagctccaaagacaaaaagcatgtttggcttggggagactattaacgcaggcagccaatttgagtacaatgtcgaaggggtgacgtcaaaagagatggcaacccagctcgcctttatgcggcttctggctaattacgcatcgcaaaacattacctaccattgcaagaattccattgcatatatggacgaggaaactggaaaccttaagaaagctgttatactgcagggatcgaacgacgtcgagcttgtggcagaaggtaactcgagatttacctacactgtgctcgtggacggatgttcgaaaaagactaacgaatggggaaagactattatcgaatacaagaccaacaagccgagccggttgccttttctcgacattgcccctctggacatcggcggtgcagatcaagaattcttcgtggatatcggacctgtgtgcttcaag

SEQ ID NO: 1303 - DNA, 4098 bp, Artificial Sequence
  derived and/or modified sequence
atgctgagttttgttgatacaagaaccctgcttctgctcgctgtcaccctgtgcctggcaacttgccaaagcctgcaggaggaaaccgtgcgaaagggaccagccggagatcggggaccccgcggcgaaagaggcccaccagggccgcccgggagggacggggaggatggtccgacagggccaccaggaccccccggcccccccggaccccctggcctgggtggcaattttgctgctcaatatgatggcaagggagtgggtctgggcccaggtcccatggggctgatgggaccaagaggcccgcctggagctgccggggctccaggcccgcagggattccagggcccggcgggagagcccggggaacccggtcaaaccggaccagccggggcccgcggtcccgcagggccccctggaaaagcgggagaagacggacaccctggaaagcccgggcgccccggagaacgcggggtagttggcccgcagggggcccggggttttcctggaacccctggactgccagggtttaaggggatccggggccataatgggctggacggcctcaaaggccagccgggggcccccggtgtgaagggcgaaccaggagcacctggggaaaacggaacccctgggcagacgggagcacggggcctccccggagagcgcggccgcgtgggagctccaggtccagctggcgcacgcggctctgatgggtctgtgggccctgtgggcccagctggcccaatcggatctgccgggcctcccggcttcccaggtgcacccggccctaagggcgaaatcggcgccgtgggaaacgccggtcctgcgggtccagcagggcccagaggcgaggtgggcctgccgggattgtccggaccagttggtcccccgggtaacccaggagcaaatggactgaccggcgccaagggggcagccggactgccgggagtagctggggcaccaggcctgccaggaccaagaggtatccccggaccagttggcgctgccggcgcaactggggcaagaggactggtgggcgagcccggaccagccggcagcaagggtgagtctggaaacaagggagaacctgggtcagctggtccgcagggcccccccgggccatccggagaagaagggaagcggggacctaacggagaggccggctctgccgggcctcctggacctcccgggctgcgcgggtcccctggttccagggggttgcctggggctgatgggagggccggagtgatgggcccccccggtagcaggggggcttcaggccccgccggcgtgaggggaccgaacggagacgccggaagacctggtgagcccggtctgatggggccccgcgggctccctgggtcccccggaaacatcggtccagcggggaaagagggcccagtggggcttccaggtatagatgggcgacctgggcccattggtcccgctggcgctagaggtgagccaggcaatataggatttcctggtccgaaaggtccgacaggcgatcccgggaaaaacggtgataaaggccacgcaggcctcgctggcgcacggggcgcacccggccctgatggtaacaatggcgcacagggaccccccgggccacagggtgtgcaaggtgggaaaggagagcagggtcccccaggaccccccggttttcaggggctgccagggccttcaggcccagctggcgaggtggggaagccaggagagagaggtctccatggtgaattcgggctgcccggccctgcaggccctagaggagagagaggcccaccaggcgagtctggagcagcaggtcccaccggaccaatcggctctcgcggaccctccggcccaccaggacccgatggtaacaaaggcgagccaggcgtcgtaggcgctgtggggactgccggtcccagcggccctagtggtctcccgggagaaaggggcgcggccggcatacctgggggcaaaggggaaaagggagagcccggcctccggggggagatcggaaacccaggtcgggacggcgcacgcggtgccccaggcgcagttggggcaccagggccggcgggcgctaccggcgacagaggtgaagcaggcgctgccgggccagccggtcccgcgggccctaggggcagtcctggtgaacgaggggaagttggccctgcgggaccaaacgggttcgccgggcccgctggagccgccggacagcccggggccaaaggcgagcgcggagctaagggccctaagggagaaaacggagtggtaggacccaccggcccggtaggcgcagcgggaccggccggccctaacggccctccaggaccggctggcagccggggggatggaggccccccaggaatgactgggttccccggggctgccgggcgcaccggacccccaggccctagtgggataagtggtccaccaggaccacctggtcccgccgggaaggagggactccgaggcccgcggggcgaccaggggcccgtaggacggacaggcgaggtcggagctgtcgggccaccaggtttcgctggagagaaaggccccagtggcgaggcaggtacagcaggccctcccggcacacctggcccccagggactgctgggtgctcccggaatcttgggtcttcctggctctcggggcgagcggggactgccgggggttgcaggcgcagtcggggaacccggcccactgggcattgcagggcctcccggcgcccgcggacccccgggggccgtcggaagtcctggagtgaacggtgcccccggagaggccgggcgggatggcaatccgggcaacgacggcccacccggccgggacggccagcctggccataaaggcgagcgcggctatcctgggaacattggtcctgtgggagcagccggcgcgcccgggccacacgggccagtgggccccgccggcaagcacggcaaccgcggagaaaccggcccctccggtccagtgggacctgccggggctgttggtccaaggggaccatctgggccacaggggatccgcggggacaagggagagcctggcgaaaaaggtccacgcgggttgcctggcctgaaaggacataacggtctgcaggggctgcccgggatcgctggccatcacggagaccagggcgctccggggtcagttgggccagccgggcccagagggccagcaggccccagtgggcctgccgggaaggacggacggaccggtcatcctgggaccgtgggcccagccgggatcagaggtccacagggacaccagggccccgcaggacccccaggacctccaggccctcctgggccccccggagtttccggagggggatatgacttcggctacgacggggatttttatagggcagaccagccgcggagcgccccatcactccgccctaaagattacgaggttgacgcaacactgaagtcactcaataaccagatcgagaccctgctgactccggaaggttcccggaagaatccagccaggacttgcagagaccttcgactgagccaccctgaatggagtagcggatattactggatagaccctaatcagggctgtactatggacgccattaaagtttattgtgatttttccacgggcgagacttgcatacgcgcccagcccgaaaacatcccagccaagaattggtaccggtcttccaaagacaaaaaacatgtctggctgggggagaccatcaacgctggctcccagtttgagtacaatgtcgagggggtcacgtccaaggagatggctactcagctcgcatttatgaggctgctggcaaactacgcatcacagaacatcacatatcactgtaagaactccattgcatacatggatgaggagaccgggaacctgaagaaggcagttattctgcaaggctccaatgacgttgagttggtggccgagggtaactcaaggttcacatacaccgtcctcgttgatggatgtagcaagaaaaccaatgagtggggcaaaaccatcatcgaatacaaaacaaacaaacctagtcggctgccgtttcttgacatcgccccgctggacatcggaggagcggatcaggaattcttcgtagatattgggcctgtgtgtttcaaa

SEQ ID NO: 1304 - DNA, 4098 bp, Artificial Sequence
  derived and/or modified sequence
atgttgtcttttgtcgatacgaggacactcctattactcgccgtaaccctgtgtctggctacttgtcaatcactgcaagaggaaaccgtacgcaagggcccagccggcgatcgcggcccgcgtggtgaaagaggaccacctggacctcctggacgcgacggagaggacgggcctactggccccccagggcctccgggtcctcccggccctccagggcttggcggcaactttgccgctcagtacgacggcaaaggtgtgggcctcggtcccggccccatgggcttgatgggccccaggggcccccctggtgccgctggggcccctggaccacagggcttccaggggcccgccggcgaacccggtgagcccggccagactggcccagctggcgctcgggggccagcaggacctccagggaaggcaggagaggacggccaccctggaaagcccgggcggcctggcgagcgcggggtcgttggtccccaaggagccaggggcttccctggcactcctggcctgccaggattcaaaggaatccgtggacacaacggattggatggattaaaagggcagcccggggcccccggggtcaagggtgagccaggcgctcctggggaaaatggcacacccgggcagacgggcgcacgcgggctaccaggcgaacgcgggcgggtgggagctccaggcccggccggtgcgagaggttccgatggctccgtaggcccagttggccccgctgggcctattgggtctgccggtccgcctggtttcccaggagctcctggaccaaaaggcgagatcggagctgtggggaacgctggacctgccgggcctgccggtccgagaggagaggtgggacttccaggcttatccgggcccgtgggacctccgggcaatcccggggcaaacggacttacaggcgcgaagggagctgctgggctgccaggtgtggccggagctcctggcctgccagggccacgcgggatacccggcccagttggcgccgccggcgccactggggctcgaggcctggtcggcgaaccggggccagccggctcaaaaggtgagagcggcaataagggagaaccaggcagtgccggccctcagggcccccctggcccctctggcgaggagggtaagcgcgggcctaatggagaagcagggagtgcaggtcctcctggtccccccggtcttcgtggtagccccggtagcaggggccttccaggcgcagatggccgcgcaggcgtcatgggtcctccagggtcccgaggagcctccggtcccgcaggtgtgcgaggacctaatggggacgctggtcggcccggagagcctggactgatgggcccccggggcctgcctggctctcctggtaatattgggcccgccggcaaggaggggccggtgggcctcccaggcatagatgggcgccccggccctataggtcccgctggggcccgcggagagccggggaatatcggtttccccgggcccaagggacctacgggggatcccggaaagaacggggacaagggacacgccggcttagcaggagccaggggagcgccagggcccgacggaaacaacggtgcccaaggccctccgggtccccagggtgtgcagggcgggaagggagagcagggacctcccggcccgcctggtttccagggtttaccagggccaagcggcccagcgggagaagtaggcaaacccggagaaagaggcttgcacggggagttcggactccccggcccagccggaccacgaggtgaacgcggccccccgggcgaatcaggggcagctggacctactggcccaatcggaagtaggggtcccagtggaccaccaggtcccgacggaaacaagggtgagcccggagtggttggcgccgtaggcacggccggtccctcagggccctctggccttcccggcgagcggggagcagcgggcatcccaggaggaaaaggcgagaagggcgaacctggcctccggggcgaaataggtaatcccggtcgtgacggagcaaggggcgctccaggggccgtaggggccccaggacctgctggggccactggcgataggggagaggccggggccgcaggaccagcaggtccagccggccctcggggaagccctggtgaacggggggaagtgggacctgctgggcccaatggatttgccggcccggctggagccgcagggcagcctggagcgaaaggagaacgtggggcaaagggcccgaagggcgagaacggcgtagttgggcctaccggccctgtcggtgccgcgggacctgcgggtcccaatgggcccccaggtcccgcggggtcccggggggacggcggtcctccagggatgacaggtttccctggtgctgccggaagaaccggcccacccggaccgtcggggatatcaggaccccctggcccccccgggccggctggaaaggaaggtctgcgcggcccacgtggtgatcagggaccagttgggagaaccggtgaggtcggggccgtgggaccgcctggatttgccggagaaaaggggccgtctggcgaggccgggaccgccggccctccgggcacgcccggaccccaagggttgctgggcgctccgggaatccttgggctgccgggttctagaggcgagagggggctgccaggcgtggcgggagctgtgggtgaacctgggcctttggggatcgcgggaccccccggtgccaggggtccacccggtgccgttgggtcacctggcgtcaatggagctcccggagaagcgggccgcgatggaaatccaggcaatgacggccctcccggccgcgacggccagcctggacacaagggtgaacgcgggtacccaggcaatataggaccagtcggcgccgccggcgcaccaggcccccatggcccagtcgggccagccggcaagcacgggaaccggggcgaaaccggccccagcggaccagtcggaccagctggggcagttggacctcgcgggccatctggaccccaaggtatcagaggggataagggggaaccaggtgagaagggtccgcgaggcctgcccgggctgaaggggcacaacgggctacagggacttcccggtatagctggacatcacggcgaccagggtgcacccggctccgtcggacctgccggccctcgcggacccgcaggaccctccggccctgctggaaaagatggccgaacaggccatcctgggacggtgggcccagcaggaattcggggccctcagggtcatcagggccctgcaggccctcccggtcctcccggccctcccggtccgccaggggtttccggaggcggctatgactttgggtacgatggggatttctacagggccgaccagccccgatccgcacccagcctgcgacctaaggattatgaagtggacgcaacgctaaagtctcttaacaaccagatcgaaaccctcctcacgcccgaggggagtcgtaaaaatcccgcgagaacttgccgggatctaagactgtcgcacccagaatggtcctctggctactactggatcgacccgaaccagggctgtacaatggatgctatcaaggtgtattgcgactttagtaccggagaaacatgcatccgggcccaaccagaaaacattccagcaaagaactggtacagaagtagtaaggataagaagcacgtgtggttgggggagactattaatgctggtagccagtttgagtacaacgtcgagggagtcacctccaaggagatggccacgcaattggcattcatgcggctcctggctaactatgcgagccagaatatcacttaccactgtaaaaactcaattgcttatatggacgaagagaccgggaacctgaagaaggcagtgatccttcagggttctaacgacgtagagctggtggcggagggaaacagccggttcacctacactgtgcttgtggatgggtgttccaaaaaaaccaatgagtggggaaagaccattatcgagtacaagacaaacaagccttccagactgccatttttagatatagcacccctcgacataggcggggccgatcaggaattcttcgtggatattgggccggtctgcttcaaa

SEQ ID NO: 1305 - DNA, 4098 bp, Artificial Sequence
  derived and/or modified sequence
atgctttcgtttgtcgatacccgcactctgcttctccttgcggtgacgctttgccttgcgacctgtcagtcccttcaagaagagactgtgagaaagggacccgctggagatcgaggaccgcggggtgaacggggtcctcctggacctcctggacgagacggagaagatggaccgacggggccaccgggacctccaggaccgccggggccacctggacttggaggcaatttcgcagcacagtacgatggtaagggtgtgggtctgggacctggtcctatgggactcatgggtccacgcgggcctcctggtgcagcaggcgccccgggcccacagggtttccaaggccctgccggtgagcctggtgaacctggtcagactgggccggccggtgcacggggcccggcaggaccgccaggaaaagcaggagaggacggacaccctggtaagccaggaaggcccggcgaacgtggggtcgtcggacctcaaggtgcccgggggtttccaggaactccaggactgcccggatttaagggcatccgaggtcataacggactggatggacttaaggggcagcccggtgcccctggagtgaagggcgaacctggtgcgcctggtgaaaacggaaccccgggacaaaccggtgcaagaggactgcctggcgagcgggggcgggtgggggcacccggtccggccggggcccgaggttcggatggttccgtgggccctgtgggacctgcgggcccaattggaagcgcaggcccaccaggctttcctggcgcacctggaccaaagggagagattggtgcggtcggaaatgcagggcccgcaggacccgctgggcctaggggcgaagtcgggctccccggcctgtccgggcctgtgggccccccaggtaacccgggggcaaacggactcaccggcgcaaagggagccgccggtttgccaggtgtggcgggtgctccaggcctgcccggacctagagggattcctgggccagtgggcgccgcaggtgcaactggggcaagaggactcgtgggagaacctggtccagcgggatcaaagggtgagagcggcaataaaggcgaacctggctccgcagggccccagggtccgccaggcccttctggggaagagggtaaaaggggacctaatggcgaggcaggctcagccgggcctcccggcccgcccgggctccgaggatccccgggatcccgaggactgccaggagcggatggtcgagcaggagtcatgggccccccgggctcccgaggtgcaagtggtccagcaggcgtcagaggtcctaatggcgatgccggacgcccaggcgagcctggattgatggggccaagggggcttccaggatcgcctggcaatatcggaccagctggtaaggaggggccggtggggctccccggaattgatgggcggcccggtccaatcggcccggcaggtgcacgtggagaaccaggcaatattggatttcctggtcctaaaggtcctacgggtgaccccgggaagaacggggataagggacacgctggactcgcgggtgcgaggggagcacctgggccagatggcaataacggtgcccaaggaccgcctggtccccagggagtgcaagggggaaagggggaacaaggaccccccggccctccggggttccagggacttccaggtccttcgggtcccgctggcgaggtcggaaaaccaggagaaagggggcttcatggggagtttgggcttccggggcctgctggcccacggggtgagcgtggcccacccggcgaaagcggcgcagcagggccaaccggacccatcggttcgaggggcccaagcggaccaccaggacctgacggaaacaaaggtgaacctggggtggtcggcgcagtggggaccgcgggtccttcaggcccgtcaggacttccaggggagcgcggggctgccggcattcccgggggcaagggagagaagggggaacctggactgaggggcgaaattggaaaccccggacgggatggtgcgagaggggcaccaggtgcagtcggtgcacccggacccgccggtgctaccggtgatcggggtgaagctggagcagcagggccggcagggccagcaggtcctcgcgggtcccctggcgagaggggagaagtgggtcccgcaggtcctaacggctttgcaggcccagcaggcgctgcaggacaaccaggtgcaaaaggagaaagaggagcaaagggtcctaagggtgaaaacggcgtggtgggtcctaccggacctgtgggggcagcaggtcctgccggtcctaacggtccgcctgggccagctggttcacgaggagacggggggccacccggcatgaccggattccccggagccgcaggccgtactggaccccctggaccgtcaggcattagcggcccgcctggtccaccaggccccgcaggaaaagaggggcttagaggtccacgcggcgatcaagggcctgtagggcgcaccggcgaagtgggtgccgtgggccctccagggttcgcgggggaaaaaggcccatccggagaggccggtaccgcagggccgcctggaactcctgggcctcagggtcttttgggagccccaggtatactggggttgccaggatctcgcggagaaagaggcttgccaggcgtggcaggagcggtaggggaaccaggaccactcggaattgcaggtccgccgggggccagagggccaccaggagcagtgggctccccaggtgtgaacggagcgcccggagaagctgggagggacggtaaccccggtaacgatggacctccgggcagagacggtcagccaggtcacaaaggagagagaggatacccaggaaacataggaccagtcggtgcagcgggggctccaggaccacatggccccgtggggccagcagggaagcatggaaacagaggggaaaccgggccaagcggccctgtcggtccagccggtgcagtcggacctcgtggtccctcggggccacaaggaatcagaggtgataagggggagcctggagaaaaaggacctagaggtctgcctggtttgaaagggcataacgggcttcaaggcctgccaggaatcgcgggtcatcatggtgaccaaggtgctcccgggtcggtcggcccggccggcccgcgtgggcccgccggaccttcaggtcccgccgggaaggatggccgtactggtcaccctggtactgtcggaccagcgggcatccggggtccgcaaggacatcagggtccggcagggccgccgggtccccctgggcctcccggaccacctggtgtcagcggtggcgggtacgacttcggatacgatggagatttctatcgggcggatcaacctagatcggccccttcgctgaggcctaaggattacgaagtggacgcaacccttaaaagcctcaacaatcaaattgaaacccttcttactcctgagggaagcagaaagaaccccgccagaacgtgccgggatcttcggctgtcacaccctgaatggtcaagcggttactactggattgatcccaatcagggttgtactatggacgccattaaggtctactgtgattttagcaccggcgaaacttgtattcgcgcccagcctgaaaacatcccagcaaagaattggtaccgttcgtcgaaggacaagaaacacgtttggcttggagaaacgatcaacgcaggttcgcaatttgagtacaatgttgagggagtgaccagcaaagagatggccacccagcttgcatttatgagacttctcgcaaactacgcctcgcagaatatcacttaccattgtaagaattcgatagcttatatggatgaagaaactgggaacctcaaaaaggcagtgattttgcagggttcgaacgatgtggaactggtggcagaaggaaattcccgattcacttacactgttctcgtggatggttgctccaaaaagaccaacgaatggggaaaaaccataatagagtacaagacgaacaagccatcccggcttccgtttctggacatcgcaccactggatatcggtggagcggaccaagagttctttgtggacattgggcctgtgtgttttaag

SEQ ID NO: 1306 - DNA, 4098 bp, Artificial Sequence
  derived and/or modified sequence
atgctatccttcgtcgacacacgcacacttctgttgctggccgtcaccctgtgcctggctacatgtcagagcttgcaggaggagacagttcggaaggggcctgctggagatagagggccacggggggagaggggacctcctgggccacccggccgggatggggaggacggccctaccggccctcctgggcctcccggacccccaggtccacccgggcttggaggcaactttgcagcccagtacgacggcaagggggtgggtctgggccctggccccatgggcctcatgggcccaaggggccctcccggcgctgcaggcgcgcccggaccgcaaggttttcagggcccagctggggagcccggagagcccgggcaaaccggccccgccggagctcgaggcccagccggtcctcctggtaaggccggcgaggacggtcaccccggcaaacctggccgtcccggcgagcggggcgtcgtgggccctcagggtgctcggggattcccggggactccaggtcttcctggttttaagggaatccgcggacataatggcctcgacggtctgaagggccaacccggcgctccgggagtaaagggagaacccggggctcccggagaaaatggaacccccggtcaaactggcgctagaggcctccctggcgagagaggaagagtaggggcccctggaccagctggagctcggggctctgatggctcagtaggacctgtcgggcccgcaggtccgatcggctccgccggtccaccgggatttcctggggccccaggcccgaaaggagagattggcgccgtggggaatgctggccctgctggacccgccggaccacgcggggaagtggggctgccaggcctgtctggccccgtcggaccccctggtaaccccggggccaatggtctcacgggcgcgaagggagctgcaggtctgcccggggtggctggcgcccctgggcttcctggaccacgcgggataccaggacccgttggtgccgctggtgcaacaggagccagaggactcgtgggagaaccaggcccagccggatctaagggggagagtggcaataaaggcgagcctggcagcgcgggaccacagggcccacccggacctagcggagaagaagggaagcggggccccaatggagaggccggaagcgcaggtccaccagggcctcccggcctgcggggctcaccagggtcccgcggactaccaggggccgatggtagagctggggtaatggggcctcctggctctagaggagcttccgggccggctggagtccgcggtcctaatggagatgctggaaggcctggcgagccaggcctcatgggtccacgcgggctgcctggctctccaggtaacattggccctgccggaaaagaagggccggtagggctgcccggtatagatggtcgtcctggaccaattggtccggcaggagctagaggggagccgggtaatatcggtttccctggtcccaaagggcctactggcgatcctggtaagaatggagacaagggccacgcaggtctggcaggagccaggggagcccctgggcctgacggaaataacggtgcccagggcccccccggcccccaaggagtgcagggaggcaagggtgagcaggggcccccggggccacccgggtttcagggactgcccgggccatcagggcccgcgggtgaggtgggtaaacccggcgaacgcggcctacacggggaatttggcttacctggtcccgctggaccacggggcgagaggggaccccctggggaaagcggcgccgcaggacccactggaccaataggaagccggggccccagtggccctcccgggccagatgggaacaagggagagccaggcgtcgtgggcgcggtcgggacagccggcccgtcgggacctagcgggctgcctggcgaacgaggagcggccggcatccctggggggaaaggagagaaaggggagccaggcctgcgcggggaaattggtaatccaggccgagacggagctcggggggcccctggtgctgtcggagcgcccggtcccgcaggagctactggcgaccgaggcgaagccggggcggcaggaccggccggccccgccggaccacggggtagccctggtgaaagaggcgaagtaggtcctgcaggaccaaacggcttcgcaggaccagccggtgcagccgggcagcccggggccaagggggagcgcggcgcaaaaggaccaaaaggagaaaacggtgtagtaggaccaacaggcccagtcggcgcggcgggccccgccgggcccaacggccctcctgggcccgccggaagccgtggagatggcggcccacctggaatgaccggcttccctggagcggccgggagaaccggaccacctggtccatcaggaattagcggtcctccgggtccgccgggcccggcaggcaaggaaggcctgagaggtccaagaggtgaccaggggcctgtgggaaggacgggggaagttggcgcagtgggtccacctggttttgctggagagaaggggccctctggcgaagcagggaccgcaggtccgcccggaacacccggcccgcaaggtctgctgggggctcctggcattttagggctacccgggtcgcgtggtgaaagggggttaccgggggtcgccggcgcggtgggcgagcccggccctctgggaatagcaggaccgccgggagctcggggcccacccggcgctgtggggtctccgggggtcaacggtgcacctggcgaggcagggcgggacggcaaccctggcaacgatggtcctcccggccgagatggacagcccgggcacaaaggcgagagaggctaccccggaaacatcggcccagttggtgcggccggcgcccccggtcctcacgggcccgtaggcccagccgggaagcacgggaaccgcggagagactggcccctctgggcctgtgggccccgccggggctgtcggtcctcgtggccctagtggtcctcagggaatcaggggtgacaagggggaacctggcgagaagggtccacgtgggcttccgggactcaagggccataacgggctccaggggctaccaggaattgccggacaccacggagatcagggagcgcccggctcggtggggccagccggtccaagaggaccggcaggacccagcgggcctgcaggcaaggacgggcgaaccgggcatccggggaccgtgggaccggcggggatccgaggaccacagggacatcaagggccggccggccccccaggacctcccggacccccaggccctccaggcgtgtccgggggcggctatgattttggttacgacggtgacttttatagagctgatcagcctagaagcgccccatcgttaaggccaaaggattacgaagtagacgcaactctaaaaagcctgaacaaccagatcgagacactactgactcccgaaggcagccgtaagaacccagcccgcacgtgccgggatctgagactgtcacatcccgaatggtcatccgggtattactggattgatcctaatcaaggctgcactatggacgctattaaagtctattgcgacttcagcaccggagagacttgtattagggctcagcccgagaacatccctgccaaaaactggtatcgctcttctaaggataagaagcatgtttggctgggcgaaaccatcaacgccggttcccagttcgaatataacgtggaaggggtgacatccaaggagatggcaactcagttggccttcatgagacttctggctaattatgcaagccagaacatcacctatcactgcaaaaactccattgcatacatggacgaggagactggcaatttaaagaaagctgtaatcctgcagggaagcaacgacgttgagttggtggcagaaggcaactctcgctttacatacacagtcctggttgacgggtgttcaaagaaaacaaatgaatggggaaagacaattatagaatataaaaccaacaaaccttctagattgcccttcctggatatcgcacccctggatattggcggggccgaccaggagtttttcgtggatatcgggcctgtgtgcttcaaa

SEQ ID NO: 1307 - DNA, 4098 bp, Artificial Sequence
  derived and/or modified sequence
atgctgtcattcgtggacacgcgtaccctcctgctgctggcggtgaccctgtgtctcgccacctgccaatccctccaggaggaaactgtcaggaaaggtccagcgggggacagaggaccacgcggcgaacgaggtcctcctggcccgccgggtcgcgacggagaggatggtccgactggcccaccaggacccccaggtccaccgggtccgccaggactcggaggtaattttgcagctcagtacgatggtaagggggtgggactcggcccgggtccgatgggactgatggggccccgaggcccaccaggcgctgccggtgccccgggtccgcaagggtttcaagggccagctggagagccaggtgaaccgggacaaaccggtccagccggcgcgcgaggccctgccgggccaccaggaaaagctggagaagacgggcatccgggaaagcctggccgcccaggggagcgcggagtcgtaggtccccagggagctcgcggttttccgggaaccccgggcctgccggggttcaagggcattcgaggtcacaacggactggacggtctgaagggacagccaggggctccgggagtcaagggagaacctggggcccccggggaaaacggaacccctggccaaactggcgcccgcggcttgcctggggaaaggggtagagtgggggcaccgggaccagccggtgcccgtggaagtgatgggtcggtgggtcccgtgggacccgccggaccgatcggttccgctggtccacccgggttccccggagcgcctggccccaagggggagatcggagctgtcggaaatgccggcccagcgggaccagcaggtccgcggggcgaggtggggctgccaggtctgtccggccctgtgggtccgccgggaaacccaggagctaacggcctgacgggggccaagggggctgcgggcctgcccggcgtcgcaggagcgcctggactgccgggtccgcggggaatccctggacctgtgggcgccgccggagccaccggagcccggggactcgtcggcgagccagggccggcagggtccaagggggaatcaggaaacaaaggagaaccgggctcagccggacctcaaggccctcccgggccttccggcgaagaggggaaacgcggccccaacggcgaggccggtagtgccggaccgcctggtcccccgggactccgcggatcaccgggaagccgggggttgccaggagccgatggacgcgccggagtaatgggccctccaggatcgagaggagcgtcaggacccgccggtgtgcgcggtcccaacggtgatgccggaagaccgggcgaacctgggctcatggggccacgtggactgccaggaagccctggaaacatcggcccagcaggtaaggaggggccggtcgggcttccgggcatcgacggacgtcctggaccgattggaccggccggcgctcgtggcgagccgggaaatatcggtttccctggacctaaaggaccgactggggaccctggaaagaatggcgacaagggacatgctggcctggccggtgcacgcggagcgccgggtccagatggtaacaatggagcccagggacctccgggaccgcaaggagttcaggggggcaagggtgagcagggaccaccagggccgcctggattccaaggactgccgggaccatccggtccggcaggagaagtcggcaagcccggagagcgaggactgcacggcgaattcggattgcctggaccagccggcccgagaggcgagagaggccctccaggcgaatcgggcgcggcagggccgactgggcctatcggatctcgcggaccaagcggcccacctggaccggacggaaataaaggagaacccggggtcgtaggcgccgtgggaacggccggccctagcggtccttcaggcttgccgggtgaacgcggagctgcgggcattcccggaggaaaaggagaaaaaggagaaccaggcctgcgcggggaaatcggaaacccagggcgcgatggagcgcgcggagcgccaggggctgtgggcgcgcctggaccggcgggggccacgggcgatagaggagaggctggagcagccggtccagcagggcccgctggcccgcgaggctcgccaggcgagaggggagaagtgggcccggctgggccgaacggcttcgcaggacctgcgggtgcagcgggacagccgggagccaagggcgagcggggcgccaagggacctaagggtgaaaatggtgtggtggggcctaccggacccgtcggcgctgcaggccctgctgggccaaacggaccgccgggaccggcaggcagccgcggtgacggagggcctccagggatgactggatttccgggggcagcaggaagaactggacctccgggcccgtccgggatctcgggaccccccggacccccgggcccggcgggtaaggaaggactgcgcggaccacggggtgaccagggaccagtgggcaggaccggggaagtgggggcagtgggccccccgggattcgctggagaaaaaggcccgagcggagaagctggaaccgccggaccgcccggaactccgggcccgcagggactgttgggagcgccgggaatcctgggcctccctggctcgagaggagagagagggctccccggggtggccggcgccgttggagagcctgggccgctcggaatcgcaggaccgccaggggctcgcggtcctcccggagcggtgggatccccaggagtgaacggggcgccgggagaagcgggccgggatggaaatccgggtaacgatggaccgccaggacgcgacggtcagccaggccataagggcgagagagggtacccgggaaacatcggaccggtgggcgccgcgggggctccggggccgcacggcccggtggggccggccggaaagcacggaaaccggggagaaactggaccgtcgggcccagtggggccggcaggcgccgtcggcccaagggggccctcgggacctcagggcattcggggggataagggcgagcctggagaaaagggaccgcgggggttgccgggacttaagggccataacggacttcaaggactccccggcatcgcgggacatcacggtgaccaaggggcacctggatcggtgggtccggccgggccccgcggccccgcagggccgtccggaccggcaggaaaggacggacgtaccggccaccctggcaccgtgggaccggcgggaatccggggaccgcagggacaccaaggtcccgccggacccccagggcccccaggaccgcccgggccacctggcgtcagcggcggaggatacgacttcggttacgacggcgacttttaccgggcggaccaaccaaggtcggcaccgtcgctccgcccaaaggattacgaagttgacgccactctgaagtcactcaacaaccagatcgaaacccttctcaccccagagggctctcggaagaatcctgcccggacttgtagggatctgcggttgagccatccagaatggtcgagcgggtactactggattgatcctaatcagggttgcactatggacgccatcaaagtctactgcgatttctccacgggcgagacttgcatccgggcccagcccgagaatatcccagcaaagaactggtaccgctcatcgaaagacaagaaacacgtgtggcttggtgaaactatcaatgccggctcccagttcgagtataacgtggaaggcgtcacctcaaaggagatggccacccagctcgcgttcatgcggttgctggctaactacgcatcgcagaacataacctaccactgcaagaactccattgcgtacatggacgaagaaaccgggaatctgaagaaagctgttatcctgcagggatccaatgacgtggagcttgtcgcggagggaaatagccggttcacctatactgtcctggtggatggatgctctaagaagactaatgagtggggcaaaaccattatcgagtacaaaactaacaaaccctcgcggctgccgtttctggacatcgcgcccctcgacatcggaggagccgaccaggagttcttcgtggatatcggtccggtttgtttcaag

SEQ ID NO: 1308 - DNA, 4098 bp, Artificial Sequence
  derived and/or modified sequence
atgctgtcctttgttgatactaggacgctgttgctactcgcagtaaccctatgtctggccacttgtcaatcattacaggaggagacagtgcgcaaggggcctgccggagatcggggtccccggggtgaacgcgggccaccgggtccaccagggagagatggagaggatggcccaacaggtcctcccggtccccctggtccccccggaccccccgggctgggcggcaattttgctgctcaatacgacgggaagggtgtcggccttggccctgggcctatgggactcatgggcccccgcggccccccgggcgccgcaggagcccccgggccccaggggtttcagggtcctgccggagaaccaggagaaccagggcaaaccggacccgcaggagctaggggtccagcaggcccccccggcaaggccggcgaggacggccaccctggcaaacccgggcgacccggcgagagaggagtcgttggccctcaaggggcccgtggattcccagggacaccaggcctacccggcttcaaggggatcaggggacataatgggttggatggcctgaaaggccagcccggagcccctggtgtcaaaggggaacccggagcaccaggagaaaatggtacacccggccagacgggcgcacgcggcctgcctggcgagaggggccgggtgggagcccccgggcccgctggggctcgcgggtccgacggctctgtgggcccggtagggccagcaggacccatcgggtccgctggaccccccggcttcccaggggctccgggccctaagggagagatcggtgccgtgggaaacgctggccccgccggcccggccggtccccggggtgaagttgggcttcccgggctttcaggaccagtgggaccgccaggaaacccgggagcaaatggccttacaggtgccaagggcgcagctgggcttcccggagtggccggcgcgccggggctgccagggcctcgtggcatccccggtcctgttggggccgcgggcgcgactggggcccgcggtcttgtgggggagccaggtccggcgggttccaagggggagagcggtaataagggagagccaggaagtgctggcccacagggccctcccggcccctcgggagaagaaggaaagaggggcccaaatggagaagccggtagcgctggcccacctggccccccagggctgaggggaagccccggtagccggggtctccctggtgctgatggacgcgcgggagtcatgggtcccccagggagcagaggggcctccggaccagcaggcgtcaggggacccaacggggatgcgggacgaccaggtgagcctgggctgatggggccaaggggcctgccaggatctccaggcaacatcggcccggcaggcaaggaaggccccgtgggcctgcctgggattgacggacggcccggacctatcggtcccgctggtgcgaggggcgaaccaggcaacatcggctttcccgggcctaagggaccaactggggaccctgggaaaaacggggataaggggcacgcaggcctcgcaggggctcggggagcccccggaccagacgggaacaacggagctcagggccccccaggaccgcaaggcgtgcaaggcggaaagggcgaacaaggcccaccagggcctccgggcttccaaggcctgcccggaccaagtggacctgctggagaggttgggaaacccggcgaaagggggctacacggagaatttgggctgcctgggccggcggggccccggggcgaaagaggaccccccggtgagtctggggccgcaggtcccaccggtccaatcggctccaggggaccatctggtccaccaggcccagatgggaacaaaggagagccaggagttgtgggcgccgtgggcacagcaggtcctagcggtccaagcggcctccctggcgagcggggggcggcgggcattcccggagggaaaggggagaagggtgaacctgggctgcgtggcgaaatagggaatcctggccgtgacggagcaagaggtgcacctggagccgtgggtgctccggggcctgcgggcgccacaggtgacaggggcgaggccggggccgccggccccgcgggccccgccggcccaagaggatcacccggtgaaagaggggaggtgggccccgctggtccaaatggctttgccggacctgctggggcagctggccagccaggcgccaagggtgagcgaggtgctaagggacctaaaggggagaacggtgtagtaggccccacaggccccgtgggggcggcaggaccagcgggtcccaacggcccaccaggccccgccgggtccaggggcgacggtggccctcccggaatgacaggatttccgggggctgctggtcgaacgggcccaccggggcccagcggcataagcggaccaccagggcctcccggcccagcaggcaaggagggactacgtgggccccgcggagaccagggccccgtgggccggacgggcgaagtcggtgccgttggcccccccggattcgctggtgagaagggcccttctggggaggcaggcaccgcgggcccacctggcacaccaggcccacagggcctgctaggcgcgccaggtatcctcggcctccctggatcacggggagagagaggactgcccggtgtggccggggcagtgggggaacctggtcctctcggcatcgcagggccgcctggcgcccggggccctcccggtgccgtgggcagccccggagtgaacggtgctcctggtgaagctgggcgagacgggaatcccggcaacgacggtccccctggcagggatggtcagcccgggcataagggcgaacgcggatatcctggcaatatcggccctgtgggtgctgcaggcgccccgggaccccacgggccagtgggaccagcggggaaacacggaaatcgtggcgagacaggtcccagtggcccagtaggacccgcaggggctgtgggcccccgaggacctagcggtcctcagggaattagaggggataaaggggagcccggggagaaggggccccgcgggctgccaggtctgaaaggacacaatgggctgcagggccttcccggaatagccggacatcatggggatcagggtgcaccagggagcgtgggtccggcgggaccacggggccccgcagggccctcaggacccgctgggaaggacgggaggacaggtcatcccgggacggtgggacctgccggaataagaggccctcagggccatcaggggccagcagggcccccggggcccccaggccccccaggacctccaggcgtctcagggggggggtacgattttggttacgatggggatttttaccgggctgaccagcccaggtctgcgccgagccttcgaccaaaggactacgaggtggacgctactcttaagtctttaaacaatcagattgagaccctgctgacaccagaaggctcgcgcaaaaatcctgctagaacctgtcgcgacctgcggctcagccacccagagtggagctccggttactattggatagaccctaaccagggttgtaccatggacgctattaaggtctattgtgattttagcacgggcgaaacatgcataagagcgcagcctgaaaacattcccgctaagaattggtacagatccagtaaggataaaaagcacgtgtggttgggcgaaacgattaacgccggtagccagttcgagtataacgtcgaaggtgtaaccagcaaggagatggctacgcagctggcgtttatgaggctgctggctaactatgccagtcaaaatattacttaccattgcaagaattctattgcctacatggatgaggagacagggaatctcaaaaaagcagttattcttcagggctccaatgacgttgagcttgtcgccgagggcaatagccgatttacctacaccgtactggtagacgggtgttccaagaaaactaatgagtggggcaagactatcattgaatataaaactaataagcccagccgactgccattcttagatatcgcccccctggacatcgggggcgctgatcaggagttctttgttgacatcggacccgtgtgttttaag

SEQ ID NO: 1309 - DNA, 4098 bp, Artificial Sequence
  derived and/or modified sequence
atgctatcgtttgtggatacccgtactcttcttctcttagctgtgaccctgtgcctcgctacatgccagtcgctccaggaggagacggtaaggaagggcccagcaggggatcggggtccgcgaggggagcgaggtcctcccggccctcctggcagggacggcgaggatgggcccacaggtccaccaggacctcctggtccccctgggccccctggcctcggtggaaacttcgcagcacagtacgatggaaaaggggtgggcctaggtcccggccccatgggcttgatggggcctcgaggcccacctggcgctgcgggcgcacccggtccccagggattccaggggccggccggagagccaggcgagccaggccagacggggccggcaggcgcaaggggcccagcgggtccaccagggaaagctggtgaagacggccacccaggaaagcctggcaggccaggggagcgtggcgttgtgggcccacagggggccaggggtttcccgggcactccagggctacccggatttaagggtattcgtggccataatggcctcgacggcttaaagggtcagcctggagcccctggcgtgaagggcgagcccggggcccccggcgagaatggaaccccaggccagacgggagcccgtggcctgcctggagaacggggacgcgtcggggcacctggtccggccggtgcccgcggaagtgatggtagtgtcggtccggtaggccccgccggccctatcggctccgctggcccccccggcttcccaggcgccccaggacccaagggagagatcggtgccgtgggaaatgccggaccagctgggccagcagggccaagaggagaggtgggtttaccaggcctaagtggtcctgtcggacctcccggcaaccctggggctaatggccttacaggagcaaagggagctgctggcttgcccggtgtagccggcgcacccggactgcccgggcccaggggcatccccggcccagtgggcgctgcaggtgcgacaggagctcggggtctggtgggagagcccgggcctgcaggttcaaaaggtgagagtggcaataagggggagccgggctctgccggtcctcaggggccacccggaccaagcggagaggagggaaaacgtggccctaacggcgaggcgggctcagccggacctcccgggcctccagggcttcggggttcacccggcagccggggcttgcctggcgctgatggccgggcgggggtgatgggaccacctggaagtagaggggccagtggtcccgcaggcgtgagagggcccaatggggacgcgggcaggccgggtgagcctggtttgatgggcccaagaggattgcccggatccccagggaacatcggacccgccggcaaggaaggcccagtgggcctccccggcatcgatggtaggccaggccccatcgggcccgccggcgcacgcggagagccgggcaatattggttttccagggcctaagggcccgacaggtgaccctggaaagaacggtgataagggtcacgcaggattggccggtgctcgaggtgcaccgggccccgatggcaataatggagctcagggcccccctggcccacagggtgttcagggaggcaaaggggaacaaggccctcctggcccacccggattccaaggcttgcccgggcccagcggacccgccggcgaagtggggaaaccaggcgagcgaggactccatggagagtttggattgcctggccccgcggggcccaggggcgaaagaggcccaccaggcgagagtggcgcagccgggcctactgggcccattggatctcgagggccctccggtcctcccggccctgacgggaacaagggggaacctggggttgtcggagcagtgggtaccgcaggcccttcaggtccatcagggttgccgggcgaaaggggtgctgccggcatcccgggagggaagggagagaagggtgagcccggcctgagaggagagataggtaatcccggtcgagatggagccagaggtgctcctggtgccgtaggggcacctggaccggcaggggctacgggcgaccgcggggaggcaggggccgctggccccgctggaccagccggcccaaggggcagcccaggggagagaggagaagtaggtcctgcgggaccgaatggcttcgccggacccgctggagccgctggtcaacccggcgctaaaggggagaggggggccaagggaccaaagggagaaaacggggtggttggtccaactggccctgttggagccgccgggcccgcagggcccaacggtccacctggcccagccggtagtagaggagacgggggccctcctggcatgacagggttccccggtgcagcggggagaactggtcccccaggacctagtgggatcagcggacccccagggcctccagggccggctgggaaggaaggattgagggggcctagaggtgatcaggggccggtgggacggacgggcgaggtaggcgcagtgggaccgccagggtttgctggcgaaaaaggacccagcggagaggccggtacagcagggccaccgggcacacctgggccccagggcctgctgggcgctcctggaatcctcggactgccaggcagtagaggtgaacgcggacttcccggcgttgccggagctgtcggggaaccaggcccgctgggtattgctggccctccaggagcgcgcggcccccctggcgctgtgggatccccaggagtgaatggggctcctggggaagctgggcgtgatggtaatcctggtaatgatggcccccccggtagggacggacaacctggccacaagggcgagcgcggttacccgggcaatatcgggcccgtgggggccgccggggcgcccggtcctcacggcccggtgggacctgcaggcaaacatggcaaccgcggtgagaccgggccctcaggccccgtaggaccagcaggtgctgtgggaccaagaggtccaagtggacctcagggaatcaggggagacaaaggtgagccaggcgagaagggtcctagggggctcccaggactgaagggtcataacgggctgcagggtttgccagggattgctggacaccacggcgaccagggagcgcctggttctgtgggacccgctggcccccgcggtcccgcgggaccatctggaccagccggtaaagatggtcgtactggtcatccaggcactgtaggcccggccggaatcagagggccccaaggccaccaaggtccagcaggacccccgggcccacctgggccaccaggaccacccggggtgagcggaggtggatatgatttcgggtacgacggggatttttatagggctgaccagccccgcagcgccccttccctgagacctaaggactatgaggtcgacgcgacactgaaatcgctcaacaatcagattgaaaccttgttaactccagaaggctcacggaagaaccccgccagaacctgtagggaccttagacttagtcatccggaatggtccagcggatattactggatagatcccaatcagggctgtactatggacgcaataaaggtgtattgcgatttttcaacaggagagacttgcattcgagcgcagccggagaacattcctgcaaaaaactggtaccgttccagcaaggacaagaaacacgtgtggttgggcgaaactattaacgccggttcccagttcgagtacaatgtggagggagtgacatcaaaagagatggccactcagttggcttttatgcggctgctggctaattatgcgtctcagaacatcacctaccattgcaaaaacagcatagcctatatggacgaggagaccggtaatctgaagaaagccgtaatcctccaaggtagtaatgatgtggagctcgtcgctgagggcaacagtcggttcacttatactgtcctggtggacgggtgcagtaagaagacgaacgaatgggggaagactatcattgaatataagaccaacaagccctcgaggttgcccttcctggatattgcccctctggatataggcggagccgatcaggaattcttcgtcgacatagggccagtgtgcttcaag

SEQ ID NO: 1310 - DNA, 4098 bp, Artificial Sequence
  derived and/or modified sequence
atgctgtccttcgtagatacccggacattattgctcctcgctgtcactctttgtttggctacttgtcagtccttacaagaagagaccgtgcggaaaggcccggctggtgacagaggcccacggggagaacgcggccccccaggcccaccgggccgggacggtgaagacggtcccaccgggccaccgggccctccagggccaccgggccctcccggcttagggggtaacttcgctgcccagtatgacggcaaaggtgtgggtctcgggccggggccaatgggtttgatggggcccaggggccctcccggagctgcgggggcccctggtcctcaggggttccagggaccagcaggtgagccgggggaaccaggccaaacgggccctgccggcgctcggggcccagccgggccgcccggcaaggctggcgaagatggccaccctggcaagcccggaaggcccggcgaacggggcgtggttggacctcagggggcccgagggttcccaggcactcccggactgccaggctttaaagggattcgcggtcacaatgggttggatgggctaaaaggacagcctggggccccaggcgtcaagggggagcccggggcccccggagaaaacgggacacctgggcaaacaggtgcccgcggtctacctggcgaacggggccgtgtcggtgctccgggcccagccggggctcgtggcagtgatggctctgttgggccagtgggtcctgcagggcccatcggatctgcgggtcctccaggattcccaggagctccaggacctaaaggggaaattggagcagttggcaatgccggcccggcgggacctgcgggaccccgcggggaggtgggcctccctggcctcagtggaccagtcgggccccctggtaatcccggcgctaacgggttaacgggggctaaaggagctgcaggtttacctggcgtggccggagcaccaggcttgcccgggcctcggggaattcccggccccgtgggggctgccggagcaacaggggccagggggttagttggggaacctggacctgccgggagcaagggcgagtcgggaaataagggggagccgggaagcgccgggccgcaaggacctcctgggcccagcggtgaggaaggaaaacgggggccaaatggagaagcaggttcggctggccctccaggcccacctggactgaggggctctccaggcagtagggggctccccggcgctgatggtagagcgggcgttatgggccccccagggtcacggggggcttccggccccgcgggcgtcaggggtccaaatggcgatgccgggcgccctggagaacccggcctaatgggcccccgcggcctgcccggctcgccaggaaacatcggaccagctggcaaggaggggcccgtgggcctcccaggaatcgacggaagaccaggtccaattggtcccgccggggcccggggagaaccagggaacatcggatttccagggcctaagggcccaacgggcgaccccggcaaaaatggcgacaaagggcacgccggcctggcaggagcaagaggcgctcccgggccggatggcaacaatggcgctcaggggcccccgggaccccagggagttcaagggggaaagggggaacaggggccaccaggtccccctggctttcaaggccttccgggaccttcaggtcctgctggtgaagtagggaagccgggcgaacggggccttcacggagagttcggtctccccgggcccgcaggtccccgaggggagaggggcccccccggcgagagcggcgccgcaggccccactgggcctatcgggtcccgaggaccttccgggccaccgggaccagatggaaataagggagagccaggagtggttggcgctgtgggaacagcaggaccatcaggaccgagcggcctgcctggggaaagaggtgcagcagggatccctggtggcaaaggagagaagggggagcccggcctgcgcggagaaatcggtaatcccgggcgggatggggctaggggcgccccaggggctgtgggagcccctgggccagccggcgctacgggggacagaggcgaagcaggggctgcaggaccagcaggacccgctgggcctcggggaagcccgggggaaagaggagaggttggccccgcgggccctaatggctttgccggcccggcaggggctgccgggcagcctggcgctaagggcgagagaggtgccaagggcccaaaaggcgagaacggcgtcgtgggacctacaggccctgttggagcagcaggtccggcaggacccaacggtcccccggggcctgcagggtctaggggggatggaggtcccccaggtatgaccggcttcccaggcgctgcaggccgaaccggccctcctggtccatcaggcatatccggtccccctggtcctcctggcccagccggaaaggaagggctccggggcccgagaggagaccagggcccggttgggagaacaggcgaagttggggccgtggggcccccaggatttgccggcgaaaaaggaccttcaggggaagccggcacagcagggccacctggaactcccggtcctcaggggctgctcggagccccagggattctgggtctgcccggtagtaggggagaaagaggattgccaggcgtggctggtgccgtgggcgagcctggacctctgggcatagccgggccgcccggagccagagggccaccgggagcagttggctctcccggcgtgaacggagctcccggggaagccgggagggatgggaaccctggaaatgacggtcctcccggcagagacggccagcctggacataagggcgagcgcgggtaccccgggaatatcggacccgtgggagcagcaggggctcctggaccacacggaccggtgggcccggccggtaagcatggcaacagaggagaaacgggccctagcggccctgtcggacccgccggagcagtgggaccacgaggaccctccggcccacaaggaatacggggtgacaagggtgaaccaggagaaaaaggtcctagaggcctgcctggccttaaaggtcacaatgggctacagggactgccgggcatcgccgggcatcacggcgatcaaggcgcccctggcagcgttgggccagctggaccacggggaccggccggaccctcggggcctgccggcaaggatggcaggacaggccaccctggtacggtgggtcctgcaggtattagggggccccaggggcatcaggggccagcggggcctcccggcccgcctggtcctcccgggcccccgggcgtttctggcggaggctatgatttcggttacgacggcgacttctaccgtgccgatcaacccaggagtgcaccgtccctgcgccccaaggattatgaggtcgacgccacactgaaatcccttaacaaccagatcgagacgctcctcactcccgaggggtctaggaagaatcccgccagaacctgccgtgatctgcggctgtcacatccagagtggtccagcggatactactggatcgatcctaaccagggatgcaccatggacgcaattaaagtatactgtgacttctccacaggagagacctgcattagagcgcagccggaaaatatacctgccaagaattggtaccgttctagcaaagacaaaaaacatgtatggctgggagaaaccattaatgccggctctcaatttgagtacaacgtcgaaggcgtgacatcaaaggagatggccacccaacttgccttcatgcgactgttggcaaattacgcctctcagaacattacgtaccactgtaaaaactctatcgcatacatggatgaagagacaggcaacctgaagaaagcagtgatccttcagggaagcaatgacgtggagctggtggcggagggaaattctcgcttcacttacaccgtgctggttgatggatgttctaagaagacgaacgagtggggaaagactattattgaatataagaccaataagccatcacggctcccctttctagacattgccccccttgatattggcggcgcggatcaggagttcttcgtggatataggaccagtctgttttaag

SEQ ID NO: 1311 - DNA, 4098 bp, Artificial Sequence
  derived and/or modified sequence
atgctgtcattcgttgacacgcgcacactgctgctgctggccgtgacgttgtgtctagccacctgccagagcctgcaagaggaaacggttcgtaagggcccagcgggtgaccgtgggccacggggggagcggggcccaccgggtcctccaggtcgagatggtgaggatggtccgaccggtccgccggggcctcctggtccaccgggaccgccagggctcggtggaaattttgcagcgcagtacgatgggaaaggcgtgggcttgggacctgggcctatgggcctgatgggtccacggggcccaccaggtgccgcgggcgcgcctgggcctcaaggctttcaggggccagcgggcgaaccgggtgaacctgggcagaccggtccagcaggcgcacgtggcccagcgggcccaccaggtaaagcaggtgaggacggccacccaggcaagccaggccggcctggagaacgcggcgttgtcggcccgcaaggtgcaagaggcttcccaggcacgcccggtctgccaggctttaaaggcatccgcggtcacaacgggctggacggcctcaagggccaaccgggcgcgccgggtgttaagggagagccaggtgcacctggcgaaaatggtaccccaggtcaaaccggtgcccgcggattgcctggcgaacggggtcgcgtgggggccccgggtccggcgggagctcgcggcagcgacggtagcgtcggcccagtggggccagccggcccgataggctcagcaggccccccgggtttcccaggtgcccccggccccaagggcgagataggggccgtgggcaatgcaggcccagcaggtcccgcaggcccacgcggcgaggtcggcctacctggtctaagcggtccagtgggcccacccggtaatccaggcgctaatggtttgaccggcgcaaagggcgctgccggcctgcctggcgtagcaggcgcacctggcttgccgggcccgaggggtatccctggccctgtcggtgcagcaggcgccaccggcgcgcgtggcctggtgggggagccaggtccggccggcagcaagggggagagcggcaacaagggtgagccaggtagcgcgggtccccaagggccgccgggcccgagcggtgaagaaggcaagcgaggtccgaacggcgaagcgggcagcgcagggcctccggggcccccaggattgcgcgggagcccgggatcgcgcggcctgcctggtgcggatggtcgcgctggggttatgggtccgccaggtagccgcggcgccagcggccctgctggcgtgcgcggtcctaatggtgacgcaggacgcccaggagagccgggcctgatgggcccgcgcggcctgccgggttcaccaggcaatattggaccagctggcaaagagggaccggtaggtctgccgggcatcgatggccgtccaggtccgattggtcctgctggtgctcgtggtgaaccaggcaatatcggttttccaggcccaaagggccctacgggcgacccgggtaaaaatggcgataaaggccatgctggcctggctggcgcccgtggcgccccaggaccggacggtaataatggggctcagggtccacctggcccgcagggtgtccaaggtggtaagggcgagcagggtccgccaggcccaccgggcttccagggcctgcccggtccgagtggcccagctggagaagttggaaagccaggtgaacggggtttgcatggagaattcggccttccgggacctgcggggccgcgcggtgaacgcggccctcctggagaatcgggcgcggcaggcccaaccggtccaatcgggtctcgaggcccatcagggcctccaggccctgacggcaataaaggtgagccgggggttgtgggcgccgtcggcacagcgggtccgagcggtccgagcggcctcccaggcgagcgaggcgcagcgggtatcccaggcggcaagggcgagaaaggcgaaccaggtctgcggggcgagatcggtaaccctggccgcgatggtgcgcgcggtgcgccaggcgccgtgggcgctccgggtccggcaggcgcgacgggagaccgcggcgaggcaggtgctgcggggccggctggtccagccggtccacgcggctcccccggtgagcgcggtgaggtggggccggccggtcctaacggtttcgcgggacccgcgggtgcagctggacaacctggagcaaagggcgagcgcggcgctaagggaccaaagggcgagaatggtgtcgtgggtccgacgggccctgttggggccgcggggccggccggcccaaacggcccccctggtccggcagggagcaggggcgacgggggccctcctggtatgaccggtttccctggagcggcgggtcgcactggcccgccgggtccttccggcatctctggtccgcctgggcctcctggccctgccggtaaagagggcctgcgcggtccgcggggcgatcaaggacctgtgggcaggacaggagaggtgggagccgtaggcccgccggggtttgctggcgaaaaaggtccatctggagaagcaggtaccgccggtccaccgggcactcctgggcctcagggtctgctgggtgcacctggcattttgggtttgccgggatctcgtggggagcgtggtctgccaggagttgctggggctgtgggtgagccaggcccgttgggcatcgcagggcctcctggagcaaggggcccccctggtgcggtggggtcccctggcgtgaatggtgcaccaggtgaagcaggacgcgatggcaatcctgggaatgacggcccgccggggcgtgatggacaaccgggtcacaagggggagcgaggctacccgggtaatatcggtccagtcggtgcggcgggtgcaccggggccgcatggtccagttggtcctgcgggcaaacatggaaaccgcggcgaaaccggtccgagcggcccggtcggtcctgcgggagcggtcggcccacgtggccctagcgggccacagggcattcgtggtgacaagggcgaaccaggggaaaagggcccgcgcggactgccagggctgaagggccataatggcctacagggtttgcctggcattgcagggcatcacggggaccaaggtgctccgggtagcgtgggcccggccgggcctcgcggcccagccggccctagcgggcctgcaggtaaagatggccgtaccggacatccaggaacagtgggccctgctggtatcagaggcccacagggccatcaaggacctgccggccctccgggtcctccgggcccaccagggccgccaggtgtgtctggaggaggctacgacttcgggtacgacggcgatttttaccgcgctgaccagccccggtctgcacccagcttgcgccctaaagactacgaagtagacgcaaccctgaaaagcctgaacaatcagattgagacgctgctcaccccggaaggtagccgtaagaatccagctaggacctgccgcgatctgaggctgtcgcaccctgagtggagcagcgggtattactggattgatccgaaccaaggctgtacgatggatgctattaaggtttattgcgacttcagtaccggcgagacttgcattagagcccaaccggaaaacataccagccaaaaactggtatcgtagcagcaaggataagaagcatgtgtggctgggcgagactatcaacgcaggcagccaattcgagtataacgtcgagggcgtgacgagcaaggagatggccacacagctggcatttatgcgtctgttggccaattatgcgtctcaaaacattacctatcactgtaaaaattccatcgcatatatggatgaggaaacggggaacctgaaaaaagcggtgatactgcaaggctccaatgacgtcgagctggtggcagagggtaatagccgttttacttacacggtgctggtggatggctgcagcaagaagaccaacgagtggggtaagaccatcatcgagtataaaacgaataagcctagcagactgccatttctggatatcgcccccctggacatcggcggcgccgaccaagaattttttgtggacatcggcccagtctgctttaaa

SEQ ID NO: 1312 - DNA, 4098 bp, Artificial Sequence
  derived and/or modified sequence
atgctgagtttcgtggatactagaacacttctattgctggcagtcactctgtgtctagctacgtgccagagtctgcaggaagaaacggtgcggaagggaccagccggagatagaggacccaggggggagagaggacccccaggcccccccgggcgggatggcgaagacggccccaccgggccgcccggccctcccggaccgcccggccctcccgggctcggcggtaactttgcagcacagtatgacggaaaaggagtagggttgggacccggccctatgggacttatgggcccacgagggccaccgggcgctgccggcgcccccgggccccagggatttcagggcccggcgggagagccaggtgaacctggccagactggacctgcgggggcccgcggcccagccggtccaccaggaaaggccggcgaggacggacacccgggaaaacctggaagacccggggagagaggcgtcgtggggcctcagggcgcaaggggcttcccaggtacgcctggtctgccaggctttaaagggatccgagggcacaacgggcttgatggcctgaaaggccagccgggggcccctggcgtcaagggggagccgggggctcccggagaaaacgggacaccgggtcaaacaggcgctcgggggctgccaggcgaacgcggccgtgtcggcgcacccggacccgctggagctcggggctccgacggaagtgtggggcccgtggggcctgccgggcccatcggatcagcaggaccaccagggttcccaggcgcccccggcccgaaaggagagattggcgccgtggggaatgctggtcctgctggaccagccggaccgcggggcgaagtgggactgccaggccttagtgggcccgtcggcccgcccggcaacccaggagccaatggtttaactggcgccaagggcgcagccggtttgcccggggtcgcaggagccccaggcttgccgggtccccgcggcataccaggcccagttggtgctgcaggagcgaccggtgccagaggactcgttggggagccagggccagccggcagcaagggagaaagcggaaataagggggagccgggtagcgcagggcctcagggcccccctggaccctctggcgaggaaggcaagcgcggacctaacggagaggccggctctgctggaccaccaggacccccaggactgaggggaagccctggatctcgcggtctgcccggggctgatgggagagccggcgtgatgggccccccgggctcgcgaggtgcatctggaccagctggggttcgcggacctaatggagacgctgggcgccccggagagccaggattgatgggaccaagagggcttccaggctcacccggaaatattgggcctgcaggcaaggaaggcccagtggggctccccgggattgatggtcggcctggtcctatcggcccagcaggggcgaggggggagcctggcaatatcggttttccgggacccaagggtccaactggcgatcccgggaagaacggggataagggtcatgctggacttgcgggagcccgaggcgcaccaggaccagatgggaacaacggggcgcaagggccccctggcccacaaggggtccaaggcggcaagggcgaacagggtccccccggtccgccagggtttcagggtttgcccggcccaagcggccctgctggcgaagtaggaaaacctggtgagcgcggtctgcacggcgagtttggtctccccggacccgctgggccccgaggtgagcgtggaccgcccggggagagcggcgcagcagggccaaccggtcccataggcagccggggcccgtctgggcccccaggacccgatggtaacaagggagaaccaggagttgtgggcgcagtaggcacagccggtccctccggcccgagtggactccctggcgagcgcggggccgccggaatcccgggaggtaagggggagaagggcgaaccggggctgcgaggggaaattggtaatcccggcagggatggcgcccgcggtgcaccaggcgccgtgggcgcacccgggcctgccggagcaaccggggaccggggggaggccggcgctgctggcccagccggtcctgccggtccgcgaggcagcccaggggagagaggtgaggtaggccccgctgggccaaatggtttcgccggtccagcgggcgctgcaggccagccaggcgccaaaggggagagaggcgcaaagggtccaaaaggtgaaaatggagtcgtcggcccaaccggccccgtgggagccgcaggtcccgcagggcctaacggaccaccaggcccagccggttctagaggggatggtggcccccccggtatgacaggctttccgggcgcagctggaagaaccggtccccccggcccgagtggcatctccgggcccccaggcccaccggggcctgccggcaaggaaggcttaaggggcccccgcggagatcaaggccctgtcggccgtactggcgaggtgggagcggtaggcccaccaggttttgccggtgagaagggacctagtggagaggccggaacagcgggcccccctgggacaccaggcccacaagggctccttggagcgcccggaatactcggtctgcctggtagccgcggagaaagaggcctccctggcgtagccggtgccgtgggcgagcctggaccgctgggcatcgctgggcctcccggggcgagagggccacccggggctgtcgggtctcctggggttaacggtgcaccaggggaggctggccgggatggaaacccagggaacgatggccccccaggacgtgatggacaacctgggcacaagggcgaaaggggctaccccggcaatatcgggcccgtaggagcggccggagcgcccggtccacatggacccgtaggcccagccggcaaacacggtaaccggggggaaaccggaccttccggccccgtaggacctgcgggggctgtcggccctcggggcccgagtgggccacaggggatcagaggagacaaaggagagcccggagaaaaagggccccgcggcctcccgggtttgaaaggacacaacggcctccaggggctgcctgggatagctggtcaccacggagatcagggagctcctggcagtgtaggcccagcaggcccaagaggtcccgccggcccgtctggccccgcaggcaaagatggacgcacagggcatcctggcaccgtcggtcctgccggaatcagaggcccccaggggcatcaggggcccgctggacccccggggcctccaggccccccaggtccacccggggtgtccgggggtggatatgacttcggatacgacggagatttttatcgggccgatcagccgcgctcggctcccagcctgcggcctaaggactatgaagtcgacgccacactcaaaagtttgaataatcagatcgagacactgctcacccccgagggaagtcggaagaaccctgcccgcacatgtagagatctgagactgtcacatccagaatggagctcgggttactattggatcgacccaaaccaaggctgtacaatggacgctattaaggtgtattgcgatttctcaactggggagacgtgtatacgagctcagcctgaaaacatcccagccaagaactggtatcggagcagtaaggataagaaacatgtgtggttgggagaaactattaatgccgggtcacagttcgaatataatgtggagggcgttacgtccaaggagatggcaactcagttagccttcatgcgactcctcgctaactatgccagtcagaatattacctaccactgcaagaattctatcgcgtacatggatgaagaaaccggcaacctcaagaaggccgtgattctccaaggctccaatgatgttgagctggtcgccgaaggcaactcccggtttacatacaccgttctggttgacggatgttctaaaaaaacaaacgaatgggggaagacaatcatcgaatataagactaataaaccatctcggctgccgtttttggacattgcccctctagatataggtggggcagatcaggaattctttgtggatataggccctgtgtgtttcaag

SEQ ID NO: 1313 - DNA, 4098 bp, Artificial Sequence
  derived and/or modified sequence
atgctctcgtttgtcgataccagaacccttctgcttttggcagtgactctttgtctggcaacctgccaatcacttcaggaggaaaccgtcagaaaaggcccagcgggggatagggggccgaggggagaaagaggtccccctgggccgccaggtagggatggggaagatgggcctactggaccgccagggcccccaggccctccgggccctcctggactcggcggtaacttcgctgcccagtatgatggcaagggcgtgggcctgggtcccgggcctatgggtcttatggggcctagaggcccacccggagcagccggtgcgccgggcccacaaggctttcaaggtcctgccggcgagcccggggagcctggacagacgggacctgccggagcgagaggaccagcaggcccacctgggaaggccggagaagatggccatcctggtaagccagggcgacccggcgaacggggcgtggtgggtccacaaggagccagaggttttcctggcactcccggtctgccgggatttaaggggatacgaggtcataatggactcgatggtttgaaaggacaaccaggagcccctggcgtgaagggtgagcctggtgccccaggcgagaacggtactccggggcaaactggagctagggggcttcctggggaacgtggtagggtgggggcaccgggtccagcaggtgcacgtggaagcgatggaagcgttggacccgtggggcctgcgggcccgatcggtagtgcaggtccccccggattccctggggcacccggtcctaaaggggaaattggggcggtggggaatgccggtccggctggccccgccggaccgcgaggggaagtgggtctgcctggactttcgggccctgtagggcctccggggaacccaggtgccaacggactgacgggagcgaagggcgcagcgggactccccggagtggccggagctccagggctgcctggtcctagaggaattcctggtccggtgggtgccgccggcgcaaccggagcgaggggactggtgggagaacccggtcccgcaggctcgaaaggagaatccggaaacaagggtgaacctggaagcgcgggaccacagggaccgccaggtccttctggagaagagggcaagagaggtcccaatggagaagcagggtccgcgggcccccctggcccacctggacttcgcggatcgccaggttctcgcggccttcctggtgcagatggacgtgcaggagtgatgggaccgcccgggtcccgcggagcatctggacctgctggggttagggggccaaacggagatgcaggtaggcccggtgaacctggtctgatggggccacggggtctgcccggcagcccaggcaacatcggcccggcaggtaaagaaggcccggttggtctgccaggtatagatggacgccctggtcccataggacccgccggagctagaggggagccaggcaacataggattccctggtccaaagggacctaccggtgacccagggaagaatggtgataagggtcatgcaggcctggcgggtgcgagaggtgcacctgggcctgacggaaataacggcgcacaaggaccccccggcccacaaggagtgcaagggggaaaaggtgaacaagggccacccggacccccaggatttcagggactgcctggcccgtcgggaccagcaggagaggtgggaaaaccaggggagcggggtttgcatggagagtttggacttcctgggcctgccggtccaagaggcgaacgaggtccgcctggagagagcggagccgcaggtcctaccggacctattggttcgcgtggcccaagcggaccccctggtccagacggaaataagggcgaacctggggtcgtcggagctgtgggtaccgcgggtccatcggggccatcgggacttccaggtgagcgcggagcagctggaattcctggaggaaaaggcgagaaaggagaacctggattgagaggagaaattgggaatcctggtagggacggagcaaggggagcgcccggtgcagtgggtgcgccaggtcctgcaggagcgactggcgacagaggggaagcaggcgcggcgggtcccgccggcccggcggggcctcggggtagccccggcgaaagaggggaggtcggaccagcgggccccaacggttttgcggggccagcaggtgccgcaggtcaacctggagccaaaggagagcgaggggcgaaaggacccaagggcgaaaacggagtcgtcggacctaccggaccagtgggggcagcgggccctgcgggacccaatggaccaccggggcctgctgggtcaagaggggacggaggcccaccagggatgaccggatttcctggagcagcaggccggaccggtccacctggaccatcgggaattagcggtcctcccggaccacccggaccggccggaaaggaaggactgcgggggccccggggagatcaaggtcccgtggggagaactggtgaagtgggagcagtggggccgcccggattcgcaggtgaaaagggccccagcggtgaagccggtaccgccggtcctccgggcactcctggtccccaaggactgcttggcgcaccggggattcttgggctgcccggttccagaggtgaaagaggcttgcctggagtggccggtgcggtcggtgagccaggaccactcggcatcgcaggtccacctggtgcaagggggcctccaggggcagtaggatccccgggtgtgaacggtgcccctggagaagccggaagagacggaaatcctgggaacgatggacctccaggtcgggatggacaacctggacataagggagaacgcggatacccaggaaacattggaccggtgggggcggcaggagccccaggtccacatggacctgtgggccccgctggtaagcatggaaaccggggagaaaccggaccatcgggtccagttggtccggcaggagcagtgggacctcgcggcccttccggtccacagggtattcggggtgataagggagagccgggagagaaggggccgcgagggcttccagggctgaagggccacaatggacttcaaggtctgcccggtatagccggacaccacggtgaccaaggcgcaccgggttcagtgggccctgcaggaccgagaggccctgcaggtccatccggccctgctgggaaagatggaagaactggacacccaggaaccgtcggtcctgccggaatcagaggcccccagggacaccaagggccggctggtccacccggcccacccgggcctcctgggcccccaggggtgtccggtggcggatacgattttggttacgatggcgatttctaccgtgctgatcagccaaggtcggccccgagcctgcgtcctaaggattatgaagtggacgcaactctgaagtcgctcaacaatcaaattgaaactcttttgaccccagaaggatcacggaagaacccagcacgcacgtgtcgcgatctccgactcagccatccggagtggtcatcgggttactactggattgatcctaaccagggatgtactatggatgcaataaaggtctattgtgatttcagcaccggcgaaacttgcatccgggctcagcccgagaatatcccagcgaagaattggtacaggtcctccaaggacaaaaagcacgtctggcttggtgaaaccatcaacgcgggttcccaattcgagtacaacgtggagggcgttacttcaaaagagatggccacccaactggcattcatgcgcctgctggcaaattacgcgagccaaaacatcacttaccattgcaaaaactcgatcgcatacatggacgaagaaaccggaaaccttaagaaagcagtgatcctgcaaggttcgaacgacgtggaactcgtcgcagagggtaattcccgatttacctacactgtgcttgtggatggatgctcaaagaaaactaacgaatggggaaaaaccataattgaatacaagaccaataagccatcaagacttccctttctggatatcgcacctcttgatatcggtggagcagatcaagagttttttgtggatattggaccagtgtgcttcaag

SEQ ID NO: 1314 - DNA, 4098 bp, Artificial Sequence
  derived and/or modified sequence
atgttatcatttgtagatacaagaactttattacttttagctgttactttatgtcttgcaacatgtcaatcattacaagaagaaacagtgcgaaaagggcctgctggtgatagaggacctagaggagagagaggacctccaggaccaccaggaagggacggagaagatggacctactggtccacctggaccaccaggaccaccaggtcctccaggattaggaggtaatttcgcagctcaatatgatggaaaaggagttggactaggacctggaccaatgggacttatggggccaagaggaccacctggagcagctggagctccaggaccacaaggatttcaaggtccagctggagagccaggagaaccaggacaaactggaccagctggggctagaggtccagctggtccaccaggtaaagcaggagaagatggtcatccaggtaaaccaggaagacctggagagagaggagttgttggaccacaaggtgctagaggatttccaggaacaccaggattaccaggattcaaaggtattagaggacataatggattagatggattaaaaggtcaaccaggagcaccaggagttaaaggagaacctggagcaccaggtgaaaatggaactccaggtcaaacaggagctagaggattgccaggagaaagaggaagagtaggagctccaggaccagcaggtgccagaggatctgatggatcagttggaccagttggtccagcaggaccaataggatcagcaggaccaccaggatttccaggtgctccaggtccaaaaggagaaattggagctgttggtaatgcagggccagctggaccagctggaccaagaggagaagttggactaccagggttatcaggaccagttggacctccaggaaatccaggagcaaatggattaactggtgcaaaaggagctgctggtcttccaggagtagcaggagctccaggattgcctggacctagaggaataccaggaccagttggtgcagctggagctacaggagcaagaggacttgttggtgaaccaggaccagctggatccaagggggaatcaggtaataagggagaaccaggatcagcaggaccacaaggaccaccaggtccttcaggagaagaagggaaacgaggaccaaatggagaggctggatcagcaggaccaccaggtccaccaggattaagaggttctccaggaagccgaggattaccaggagctgatggaagagcaggagttatgggtccacctggaagtagaggagcatcaggaccagctggtgttagaggtccaaatggtgatgcaggaagaccaggtgaaccagggttaatgggaccaagaggattacctggatcacctggaaatattggaccagcaggaaaggaaggacctgttggattgccaggaatagacggacgtccaggacctattggtccagctggtgctagaggtgaacctggaaacattggatttccaggaccaaaaggaccaactggagatccaggaaagaatggagataaaggacatgctggattagctggagcaagaggagctccaggaccagatggaaataacggagcacaaggaccaccaggaccacaaggagtacaaggaggaaagggtgaacaaggtcctcctggtccaccaggatttcaaggattaccaggaccatcaggtccagccggagaagtgggtaaacctggagaaagaggattacatggtgaattcggattaccaggaccagctggtccacgtggagaaagaggaccaccaggagagtctggagcagccggaccaacaggaccaattggatcccgtggtccatcaggaccaccaggaccagatggaaataaaggagaaccaggagttgttggagcagttggaactgctggaccatcaggaccaagtggtttaccaggagaaagaggagctgctggaattcctggtggaaaaggagaaaagggagaaccaggtttgcgtggagaaataggaaatccaggaagagatggtgctagaggagctccaggagctgtaggagctcctggacctgcaggtgcaacaggagatcgaggagaagctggagctgctggaccagctggaccagcaggtccaagaggatcacctggggaaagaggagaagttggacctgcaggacctaatggatttgctggacctgctggagctgcaggacaaccaggagctaaaggtgaaagaggagcaaaaggtccaaaaggtgaaaatggagttgttgggccaacaggtccagttggggctgctggaccagcaggtccaaacggtcctcctggaccagctggatcaagaggagatggaggtccaccaggaatgactggttttccaggtgctgctggaagaactgggcctccaggtccatctggtatttctggaccaccaggaccaccaggaccagcaggaaaagaaggacttagaggaccaagaggagatcaaggaccagtcggaagaactggtgaagttggagcagtaggtccaccaggattcgctggagaaaaaggaccatcaggagaagccggaacagccggaccaccaggaacaccaggaccacaaggacttttgggagcaccaggaattttaggattaccaggttcaagaggagaaagaggtcttccaggagttgcaggtgcagttggagaaccaggtccattgggaatagcaggtccaccaggagcaagaggaccacctggggcagttggaagtcctggagttaatggagcaccaggtgaagctggtcgtgatggaaatcctggtaatgatggaccacctggaagagatggacaaccaggacataagggagaaagaggatatccaggtaatattggtccagttggagctgcaggagcaccaggtccacatggaccagttggtccagcaggaaaacatggaaacaggggagaaaccggaccaagtggaccagttggaccagctggagctgtaggaccaagaggaccatctggaccacaaggtattagaggagataagggagaaccaggagaaaagggaccaagaggattaccagggttaaaaggacataatggtttacaaggattaccaggaattgctggacatcatggtgatcaaggagcaccaggatcagttggaccagctggaccaagaggtccagctggaccttcaggtccagctggaaaagacggtcgaactggacatccaggaacagttggacctgcaggtataagaggaccacaaggacatcaaggaccagctggacctccaggacctccaggaccaccaggaccaccaggggttagtggagggggatatgattttggatatgatggagatttttatagggctgatcaaccaagatcagcaccaagtttaagaccaaaagattatgaagttgatgctacattaaagtcacttaataatcaaattgaaactttattgactccagaaggtagtagaaaaaatccagcaagaacctgtagagacttaagactttctcatccagaatggtcatcaggatattattggatcgatccaaatcaaggatgtacaatggatgctattaaggtttattgtgatttttctactggagaaacttgtattagagcacaaccagaaaatattccagctaagaactggtatcgatcaagtaaagataaaaaacatgtctggttgggagaaactattaatgcaggatcacaattcgaatataatgttgaaggagttacttcaaaagaaatggcaacacaacttgctttcatgagacttcttgctaattacgcatctcaaaatattacatatcattgtaaaaattcaattgcttatatggatgaagaaactggaaatttaaaaaaagctgtaattttacaaggatcaaatgatgttgaattagttgctgaaggaaattccagattcacatatacagtacttgtggatggttgtagtaaaaaaactaacgaatggggtaaaacaattattgaatataaaactaataaaccttctagacttccttttttagatattgcaccattagatattggaggagctgatcaagaattttttgtagatataggacctgtttgttttaaa

SEQ ID NO: 1315 - DNA, 4098 bp, Artificial Sequence
  derived and/or modified sequence
atgctctcgttcgtagacacaaggacgttattgctacttgcagtaacgttgtgtcttgcaacgtgtcaaagccttcaggaggagaccgtccggaagggtcccgcaggggatcgggggccacgtggggagaggggtccacctgggccccctggccgagacggtgaggatggtccaactgggcctcctggtccacctggtcctcccggtccgcccgggcttggaggaaactttgccgctcagtatgacgggaaaggagtcgggctaggcccggggcctatgggcctcatgggtccgcgcggcccgcctggcgccgctggagcacccggacctcaaggctttcagggacccgctggagagcctggcgagccaggacaaacaggtcccgccggcgcgcgtgggccagctgggcctcctggtaaggcgggagaggacggtcacccgggaaagccaggacgtccgggtgagcgtggcgttgtcggtcctcagggggcgcgtggttttccagggactccgggactacccggatttaagggtattaggggtcataacggtctggacggcctgaagggccaaccaggcgctcccggggtcaagggagagcccggagcaccgggggaaaatggaaccccaggtcagaccggagcacgtggattgcccggtgagagaggacgcgtcggagcacctggaccggccggcgcccgtggatctgatggctcagtgggtcctgtcggtcccgcaggaccgatcggatcggcgggtcctcctggattccctggtgctcctggtccgaagggcgagatcggggccgtcgggaacgctggacctgctgggcctgctgggccacgcggcgaggtggggctccctggcctatcagggcctgttggtcctccaggtaacccgggagccaatggtctcactggtgccaagggcgcggccggactacccggcgttgccggagcacctggtttgccgggtcctcgtggaatcccaggcccagtcggagccgccggcgccacgggtgctcgtggactcgttggggagcccggacctgcaggttcgaagggagagagtggaaacaagggagagcctggttcagcaggaccgcagggccctcccggccccagtggtgaagagggaaagcgcggcccaaatggcgaggccggatcggctggtccacccggacccccaggactgcggggtagcccaggctcacgcggcctgccgggtgcggatggaagagctggggtcatggggcccccaggctcacgaggggctagtggtcctgctggagtgcgcggacctaacggcgatgctggccggcccggcgaaccaggtctgatgggaccccgtggactgcctggctctccgggaaatatcggcccggccggaaaagaaggcccggtcgggttgccgggtatcgacgggcggccaggcccaattggtcccgccggagcacgtggcgagcccggaaacatcggattccccggccccaagggccccacaggtgaccccggcaagaatggtgacaaaggacacgcaggtctcgcaggtgcaaggggtgcaccaggccctgatggcaacaacggagcccaaggcccccccggaccccaaggagttcaaggtggcaagggtgagcagggtccgcccggaccccccggttttcagggactgcccggaccgtcaggccctgccggtgaggtgggaaagccgggagagcgcggattacatggagagtttggcctgcccggccctgccgggcctcgcggcgagcgcgggcccccaggggagagtggcgctgccgggcccacaggacctatcggatcgcggggtccctctggccctccgggacctgatggtaacaaaggggagcccggcgtggtcggtgctgtgggaactgcaggacctagtgggcctagtggactccccggtgagagaggtgcggcaggtatcccggggggaaagggcgaaaagggagagccgggcctccgcggcgagattgggaatcctgggagagatggagcacgaggagcaccgggcgcggtgggtgctcctggccccgccggggcaacgggcgacagaggcgaggcgggcgcggccgggcctgccgggccagctggcccccggggttcgccaggcgagaggggtgaggtgggccccgcgggaccgaacggtttcgcaggtcctgcgggtgccgccggacaaccaggtgccaaaggggagcgaggcgccaagggcccaaaaggggaaaatggtgtggtagggccaactggccccgtgggagcggcggggcccgccggacctaacggcccccccggaccggccggaagtcgaggcgatggtgggccccctggcatgaccggcttcccaggggcggcgggccgcacgggaccgcccggaccctctggtatctcaggaccaccagggccgcccggccccgcaggcaaggagggcttaagaggcccaagaggggatcaggggcctgtcgggcgcactggtgaggtcggagctgttggtccacctggtttcgctggagagaaggggccgagcggggaggccgggaccgccggaccccctgggaccccaggcccccagggcttgttaggagcgccgggaatcctgggtttgcccggcagccggggcgagcgtggcctcccgggtgtggctggtgctgtgggcgagccagggcctctcgggatcgccggtcccccgggcgctcggggccctccaggagcggtcggttccccgggggtgaatggcgcacctggcgaggcaggccgggacggcaacccaggaaacgacggacccccaggtcgcgatggtcagccaggtcacaagggagaacggggatacccaggaaatataggtcctgtcggagcggcgggggcgcctgggccacacggacctgtcggacctgctggaaagcacggcaaccgaggcgaaacaggcccctctggcccagttggtccagcaggtgccgttggaccgagggggccttccggccctcagggtatccggggtgacaagggagaacccggagaaaaagggccacgtggattgccgggtttaaagggtcacaacggcctacagggcctaccaggaattgccggacaccatggggaccagggcgctccgggttctgttgggcctgcaggcccccgagggccagcgggaccctccggccctgctggcaaagatgggcggactggtcatcccggaacagttggtcctgccggaattcgcggtccccaaggacaccagggtccggcaggaccccctggccctcccggccccccggggcctcccggcgtctccgggggaggttatgatttcgggtacgacggcgacttctatcgtgcagaccaacctcggagcgccccatcccttcgaccgaaggactacgaagtcgatgctacacttaagtccctcaacaaccagatcgagactctattgaccccagagggctcccggaagaatcctgcccgaacttgccgtgacctccgattgagtcatccggaatggtccagtggttattattggatcgatcctaatcagggttgtactatggatgccatcaaggtgtactgcgatttttcgacgggcgaaacttgcattagggcgcagcctgaaaacatacccgcaaagaactggtatcgatcgtctaaagacaagaaacatgtctggctaggcgaaacaatcaacgctggctcgcaattcgagtataacgtcgaaggcgtcacgtcaaaagaaatggccactcaactggcttttatgcggctgctcgcaaactacgcgtcccagaacattacttatcattgtaaaaattccattgcatatatggatgaggaaactggtaatctaaagaaggccgtgatcttgcagggcagcaacgatgttgagctcgttgccgagggtaatagtaggtttacttacacagttctcgtcgatggttgttctaagaagaccaatgaatgggggaagacaattatcgagtataagactaacaagcccagccgcctaccgttcctcgatatcgcccctttggacattggaggggctgaccaagaatttttcgtggatatcggtccagtatgcttcaag

SEQ ID NO: 1316 - DNA, 4098 bp, Artificial Sequence
  derived and/or modified sequence
atgctgtcgttcgttgatacccggactctgttgctgctcgcggtgaccctgtgcctcgccacttgtcaatccctgcaagaagaaactgtgcgcaagggtccagcgggagatagagggccacgcggggagcgggggcctccaggtccacccggaagagacggggaagatggaccaaccggccccccaggtccaccgggtcctcccggcccaccaggactgggaggaaatttcgcagcccagtacgacgggaagggagtgggacttggaccggggccaatgggcctcatgggcccacggggcccgccaggagccgcaggagcgcctggtcctcaaggtttccagggcccggctggagagccgggtgagccgggacaaaccggaccggcgggcgcccgtggtccagcaggacccccggggaaggccggcgaggatgggcacccaggtaagcccggacgcccgggtgaacggggcgtagtcgggccacaaggtgcccggggatttccaggcaccccggggctgccgggcttcaagggcatccgaggacacaacggtttggacggactgaagggccagccaggagccccaggagtgaagggtgaacctggcgcgcctggggaaaacggtactccaggccaaaccggcgccagagggttgccgggcgagcgtggacgcgtcggcgctccgggcccggccggcgcgcgtggatcggacgggtcagtcgggccggtaggacccgccggaccgataggaagcgccggaccccccggattcccgggagccccgggcccaaagggcgagatcggcgccgtgggaaatgctggacccgcgggacccgctggacctcgcggggaggtgggcctccctggcctttcaggtccagttggacctccaggaaacccgggagcgaatggccttactggggcgaaaggtgcggctgggctcccgggggtggccggtgcccctggccttccaggcccaagaggcatccccggaccagtgggagcggccggagcaactggcgcacgaggactcgttggagaacccggcccggccgggtcgaaaggggaatctgggaacaagggtgaaccgggatccgcgggtccgcaaggccccccggggccttccggagaggagggaaaacggggaccgaacggcgaggcgggtagcgccggccctccgggaccaccaggactcagaggttccccgggtagccggggactgcccggcgcggacggaagagccggagtgatggggccgccagggtcaagaggggccagcggcccagcaggagtgcgcggaccaaacggagacgcagggcgcccaggagaaccaggcctgatgggaccacggggtctgccgggatcaccgggaaacatcggtcctgcgggcaaggagggaccggtgggcctgccaggcatcgacggcagacctggtccgatcgggcctgctggggcccgcggcgaaccggggaatatcggttttccaggaccgaaaggtccaacgggggatcccggaaaaaacggggacaaggggcatgcgggactcgcaggagcccggggtgcaccgggcccggacgggaataacggggctcagggaccgcccggaccgcagggagtgcagggaggaaagggcgagcagggacctccgggtccacctggattccagggacttcctgggccttcaggcccagccggtgaagtcggtaagccaggagagcggggcctccatggcgagttcggattgccgggtcctgccgggccgaggggcgagcggggccccccgggagagagtggtgctgccggcccaaccgggccgatcggctcgcgtggtccctcaggacccccagggccagacggcaataaaggagaacccggtgttgtcggcgcagtgggtaccgccggaccgtcgggtcctagcgggcttcctggggagcggggcgcagcgggcattccaggcggaaagggagagaagggcgagcctggactgcgcggggaaatcgggaacccgggacgcgacggagcccgcggagctccgggggccgtgggagcaccaggccctgcaggagcaactggagatcggggcgaggcaggcgccgcggggccggccggtcctgctggcccccgcggttcgcccggcgaaagaggtgaagtggggccggcaggtcccaacggattcgccggtcccgctggtgcggcaggtcagcctggtgccaaaggagaacgcggtgcgaagggaccgaagggagagaacggtgtggtgggaccgacggggccggtgggcgccgctggaccagccggacccaatggaccaccagggccagccggatcgcgaggagacggaggaccacctggcatgactggttttccgggtgcagcgggacggactggaccacctggaccgtcagggatcagcggaccaccgggcccgcctggcccagcagggaaggaaggcctccggggacctcggggcgaccaaggacctgtgggcagaaccggagaagtcggagcggtcggcccgcccgggttcgctggagaaaagggcccgtcaggtgaggccggcacggcaggtcctccgggtaccccggggcctcaaggcctcctgggagcaccgggcatcctgggcttgccgggatcgcgcggcgagcgcgggctgcctggagttgcgggagccgtcggagaaccaggtcctctgggaatcgccgggccccctggcgccagaggtccccctggggctgtgggatcgccgggtgtcaatggagctccaggcgaagcgggacgcgatggaaatccgggcaatgatgggccgccgggaagggacggccagccgggccataagggcgagaggggatatcctggaaacattggaccggtgggggcggcaggggcaccaggaccacatggacctgtgggacctgctggcaagcatggaaaccggggtgagacgggaccttccggcccagtgggccccgcaggtgcggtgggacctcgagggccttcgggcccacagggaattaggggcgataaaggggagcctggcgagaaaggcccgcgcggactcccggggctgaagggacacaatggactgcaaggcctccctggaatcgctggccaccatggagatcaaggagcgccaggatccgtcggtccagccggcccgcgggggcccgcaggcccatcaggtcccgcaggaaaagacggccgcactggccacccggggacggtcggaccggcaggcatcagagggccgcagggacaccagggacctgcgggacccccaggtcccccgggaccgccgggaccccctggagtgagcggaggcggatacgactttggatacgacggtgatttctatagggcagatcagccacgcagcgctccgagcctgaggccgaaggactacgaagtcgatgcgactttgaaatccctgaataaccagatcgagactctgctgactccagaagggtcgagaaagaacccagccaggacctgcagagatctcaggctgtctcacccggagtggtcgtcgggctactactggatcgatcccaaccagggatgcaccatggacgcgatcaaggtgtactgcgatttctccaccggcgaaacctgtatccgagcacagcccgaaaacatcccggcaaaaaactggtaccgcagcagcaaggacaagaaacacgtgtggctcggagaaaccattaacgcaggctcccagttcgaatacaatgtcgagggcgtcacctccaaggaaatggctacccagctggcgtttatgcggcttctcgccaactacgcctcgcagaacatcacttaccactgcaaaaacagcattgcttacatggacgaagaaaccggaaatttgaaaaaggccgtgatcctccaagggagcaatgacgtggaactggtggcggaaggcaacagtcgtttcacttacaccgtgctggtggatgggtgctccaagaaaaccaacgagtggggaaagactattatcgaatacaagactaacaaaccatcccggctcccgtttctggacatcgctcccctggacatcggaggcgccgaccaggaattcttcgtcgacatcgggccagtgtgtttcaag

SEQ ID NO: 1317 - DNA, 4098 bp, Artificial Sequence
  derived and/or modified sequence
atgctcagcttcgtggacacgcgaaccctgctgctcctggcggtgactctgtgtctggcgacctgccagtccttgcaggaagaaaccgtgcggaagggccctgctggagatcgcggaccgcgcggagaaagagggccaccaggaccgccaggcagggacggagaagatggaccaacgggccctcctgggccaccaggcccacctgggcctccgggattggggggaaacttcgccgctcagtacgatggaaagggggtcggtttgggacccggtccgatgggcttgatggggccgcggggaccaccgggcgccgcaggtgcaccgggccctcaagggttccagggaccagccggggagcctggcgaacctggacagactggtccagccggtgcgaggggacctgcggggcccccaggcaaggcgggagaggacggacatccaggcaagccgggcagaccaggtgaacggggtgtggtggggccgcagggtgccaggggctttccggggaccccaggccttccgggattcaagggaattcgggggcacaatggtctggacggactgaaaggtcagccgggtgccccgggagttaagggggagccgggtgcgcctggggaaaatggcactcccggacagactggagcccgtggcctgcccggcgaacggggcagagtgggggctccgggcccggcgggtgcacgcgggagcgacggatctgtgggaccggtgggccctgcgggtcctatcgggtcagccggaccacctggatttccgggggcgccaggaccaaagggggaaatcggcgcagtcggcaacgccgggccagccggaccagctggcccacgtggcgaagtaggcctcccgggtctttcaggcccagtgggaccgcctggcaacccgggagctaatggtctgaccggagccaaaggcgctgcagggctgccaggggtggccggagcgccgggactgccgggaccccgcggcattccaggcccggtcggagcggccggagccactggtgcacggggactggtgggcgagccaggcccggcggggtcgaagggggaaagcggcaacaaaggagagccgggaagcgcaggccctcagggtcctcctggaccctccggggaagagggcaaacgcggaccaaacggagaagccggatccgctggaccacccggccctcccgggctgcgggggtcaccaggaagccgagggttgccgggtgctgatggtcgggccggagtgatggggcctcctggttctcggggagcttcaggaccagctggagtgcgcgggccgaacggcgacgcaggccggccaggagagcccggcctcatgggacctcggggtctgcctgggtcgccgggcaacatcgggccggcaggaaaggagggaccagtcgggctccctgggatcgatggacgccctggaccaatcggacccgccggggcccggggagagccaggcaacatcggtttcccgggccctaaagggccaaccggcgatccgggaaagaatggagacaagggccacgcaggactggcgggggcgcggggagcacccggtcctgatggaaacaacggcgcccagggcccacccggaccgcaaggagtgcaaggcggaaagggagagcaagggccgccggggccgcccgggtttcaggggctccctggaccctctggaccggccggcgaggtcggtaaaccgggcgagcgcggccttcacggagaatttgggctgccgggtccggccggccctcgcggagagcggggccccccaggagagtcgggagctgcaggcccgactggacctatcggatcgagaggaccatccggtccgccaggacctgatggaaataagggcgaaccaggagtggttggggctgtgggtactgcaggaccttcgggaccgagcggtctgccaggagagcggggtgcagcagggatcccaggggggaagggagaaaagggagaaccgggactcagaggagagattggaaacccggggagggacggtgccagaggagcgcccggtgctgtcggagctccgggccctgcaggggccactggtgacagaggggaagctggagcggcaggacccgctggcccggctggaccgagaggaagcccaggggaacggggtgaagtgggaccggcgggacctaatggtttcgctggtcccgctggggcggccggccagcccggcgccaaaggagaacgcggagccaagggacctaaaggcgagaatggcgtcgtcggccccaccgggccagtgggagccgcaggacctgccggaccgaacggacctccgggtcctgctggatcgcgcggcgatggcggacccccgggcatgaccggttttccgggagcagcgggtagaactgggccccccggtccgtccggcatctccggaccgcctggaccaccaggtccggcaggcaaggagggactgcgcggaccgagaggtgatcaaggacccgtgggccggactggggaagtcggagctgtgggtccgccaggcttcgccggagaaaagggtccgtccggtgaggccggaactgctggtccaccagggaccccgggcccacaagggctgcttggagcaccaggaatcctcggattgccgggatcgcgcggggagcggggcctcccgggcgtagcgggagccgttggcgaaccgggaccactgggaatcgctggtccgccgggcgcgcgtggcccacctggtgccgtgggttccccgggcgttaacggggcaccgggagaggcgggccgcgacggaaaccccggaaatgacgggccgcccggaagagacggccaacctggacataaaggtgagagaggctacccgggaaacatcggtcccgtgggtgccgctggtgccccgggccctcacggccccgtgggaccggctggaaagcacggaaataggggtgaaaccggcccatcaggccccgtgggccccgctggcgcggtcggtcctcgcgggccttctggcccgcaagggatccgcggagacaaaggcgagccgggcgaaaagggaccgcgtggcctgccgggacttaagggacacaacggactgcaaggcctgcccggtatcgcgggtcaccatggcgaccagggcgcaccgggaagcgtgggacccgccggtccacgcggcccggcgggcccctcggggcctgccggcaaagacggaagaaccggtcacccaggaacggtcggccctgctggtatacgcggcccccagggacatcagggccctgccggccctccggggccccctggcccgcccggtcccccgggagtgtcgggcgggggatatgattttgggtacgacggcgacttctaccgcgccgatcaaccgcggagcgccccgtcgctgcgcccgaaggactacgaggtcgacgcgacccttaagtcgctgaataatcagattgaaactctcctcacccccgaagggtcaaggaagaaccccgcccgcacctgcagggatctgcggttgtcccatccagaatggagttcaggttactactggatcgacccgaatcaagggtgcactatggatgcgattaaggtctactgtgacttctcgacgggtgaaacctgtatcagagcgcagcccgagaatatccctgcgaagaactggtataggtccagcaaggacaaaaaacatgtgtggctgggggaaactatcaacgccggatcacaattcgaatacaacgtggaaggagtcacgtcgaaggagatggcgactcagctggctttcatgcgactgctcgcaaactacgcttcgcagaacataacctaccactgcaagaacagcatcgcatacatggatgaagaaaccggaaatctcaaaaaggcagtcatcctgcagggctcgaacgatgttgagctcgtggccgagggaaactcacgattcacttacactgtgttggtggacggatgctccaagaaaaccaatgaatggggaaagactatcattgaatacaaaaccaacaagccgtcgagactcccgttccttgacatcgctcccctggacatcggcggagcggaccaggaattcttcgtggatatcggaccggtgtgcttcaag

SEQ ID NO: 1318 - DNA, 4098 bp, Artificial Sequence
  derived and/or modified sequence
atgctttctttcgtggatactcggactctgctgcttcttgccgtaactctatgcctagctacatgtcagtcccttcaggaagaaacagtgaggaaaggacctgctggggatcgcgggccacggggagaacgagggccccccgggccccctgggagagatggggaagatgggcctacaggaccgcccgggccccctggaccacccggacccccaggactcggggggaattttgctgcccagtacgatgggaaaggggtcggactcggacccggaccaatggggttaatgggaccgcgaggacctccaggagctgctggagcaccaggacctcaggggttccaggggcctgcgggagaacctggagaacccgggcaaactgggcccgctggagctcgcggacctgcgggacctcccgggaaggccggagaagacggacatccaggaaaacctgggcggcctggggaacggggggtcgtcggaccacagggggccagaggattccccgggacaccagggctccctggattcaaaggaattcgcggacataatgggcttgatgggctaaaaggacaacccggagctcccggagtcaaaggagaacctggagctccaggagaaaatgggactccaggacagactggggctaggggattaccaggagaacgaggaagagtcggggcccccgggcctgctggggctagagggtccgatgggtcggtcggacctgtagggcccgcagggcccatagggtctgccgggccacccggattccctggagccccagggccaaaaggagaaatcggggcagtgggaaacgctggacccgccggaccagccggacctcgaggggaagtaggattaccaggattgtctggacctgtcgggccccctgggaatccaggagctaacggattaactggggcaaaaggggccgcagggctccctggggtcgcaggagcccctgggcttcccggacccagaggaatccctggaccagtgggagcagccggagctacaggggcacggggactcgttggggaacctggacctgctggatcaaaaggggaatccgggaataaaggggaacccgggagtgctggacctcagggacctcctgggccctccggagaagagggaaagagaggacccaacggagaagcagggtcagccggaccacccgggcctccaggacttagaggatcccctggatctagaggacttcctggagctgatgggcgagccggagttatgggaccacctggatcccgaggggcttctggacctgcaggggtgcgcgggcccaacggagatgccggacgtccaggagagcccggactcatgggacccagagggcttccaggatcccctgggaacatcgggcctgctgggaaggaagggccagttggactcccaggaattgatgggagacccgggcccatcgggcctgccggagcccgaggggaacccgggaatataggatttccaggacccaaaggacccactggggatcctgggaaaaatggagataaaggacatgctgggctcgccggggccaggggggcacctgggcccgatggaaataacggggctcaggggcctcccggaccccagggggttcaaggggggaaaggggagcagggaccccctgggcctccaggattccaggggctcccagggcctagtggacccgccggagaagtcgggaaacctggagaaagagggctccatggagaatttgggctgcccggacctgccggacctagaggagaacgaggacctcccggggaatctggagcagccggaccaactggacctatcgggtctaggggaccttcagggcctccagggccagatgggaacaaaggagaacccggggtagtgggagccgtggggactgcaggaccatccgggccttcagggctgccaggagaacggggggcagccgggatacctgggggaaaaggagaaaaaggagaaccagggttacgcggagagatcgggaaccctgggagggatggagctaggggggcccccggggctgtcggggcccctggacccgccggggcaacaggggataggggagaagccggagctgccgggcccgcaggacctgcgggaccaaggggaagtcccggagagcgcggggaagttggacctgcgggacctaatggatttgctgggcctgctggggcagccggacagcctggagctaaaggggaacgaggagcgaaagggccaaaaggggagaacggagttgtggggcctactggacctgtgggggccgccgggccagctgggccaaatggaccccccggacccgccggaagtcggggagacggaggacccccagggatgacagggttccccggagctgccggacgcactgggcctccagggccttctgggataagtgggcccccaggaccccccgggcccgctggaaaagaaggactgagaggacctagaggggatcaaggacctgtgggacgaacaggagaagtaggggccgtcgggccaccagggttcgccggggagaaggggccctcaggagaggccggaactgccgggccacctgggactcctggaccacaggggttactgggagcgccagggatactcggattgccaggatcacgaggagaacggggattacccggagtcgccggagctgtgggagagccagggcccctcggaatagccggaccccctggagcaagaggacctccaggggccgtgggatcaccaggagttaatggagctcctggggaagctgggagggatggaaatccaggaaacgatggaccacccgggagagatggacagcccggacacaaaggagagagggggtaccccggaaatataggacctgtgggagccgccggagcacccgggccccatgggcctgttgggcctgcagggaaacacgggaatcggggggagacagggccctctggaccagttgggccagctggggcagtggggccccggggaccttcaggacctcagggaatccggggagataaaggggaacccggagaaaaggggcccagagggttacctgggctcaaagggcataatgggctgcaggggttaccaggaatcgctgggcaccacggagaccagggagcccctggaagtgtaggaccagccgggcccaggggacctgctgggccatctggaccagcagggaaagatgggcgcacaggacatcctgggacagtcgggcccgccgggatacgggggccacaggggcatcagggacccgcaggacctccagggccccccggacctcccggaccccctggagtgagtggaggaggatatgatttcggatacgatggagatttttatcgggccgatcagcctcggagtgcaccctctcttaggcccaaagattacgaagtggatgcaacactcaaatcgttaaataaccagatagaaactcttctgacacctgaagggagtcggaagaatcctgctagaacatgcagggatttgaggttgtcccatccagaatggagttccgggtattactggattgatcccaaccagggatgcacaatggatgctataaaggtttattgcgatttttctactggagagacatgtattcgagcccagcccgaaaacatccccgcaaaaaactggtaccggtcatcaaaggataaaaaacacgtttggctaggagaaacaatcaacgccgggtctcagtttgaatataatgtagaaggagtcactagtaaagaaatggcaactcaactcgcgttcatgcgcttgcttgctaactatgcatcccagaacataacataccattgtaaaaattctatcgcttatatggatgaagagacagggaacttgaaaaaagctgtaatactacaggggagtaatgatgtcgaattagttgcggaaggaaattcaagatttacatatacagtgctagtggacgggtgtagtaagaaaacaaacgaatgggggaaaacaattattgagtataagacaaataaaccctcacgcctaccttttcttgatatagcccctcttgatatcggaggggccgatcaggagtttttcgttgatatcgggcccgtgtgcttcaaa

SEQ ID NO: 1319 - DNA, 4098 bp, Artificial Sequence
  derived and/or modified sequence
atgttgagtttcgtcgacacgaggacactgctactcttggccgtgactctatgcctggctacatgccagtctcttcaggaggagacggtcaggaagggaccagcaggcgaccggggaccccggggcgaacggggtcctccaggacctcccggccgtgatggtgaagatggaccaactgggccccccgggcccccaggtcctccaggcccccccggcctaggaggcaacttcgcagctcagtatgatggaaagggggttggcctgggccccgggcctatgggacttatgggacccaggggaccaccaggagctgccggcgcccccggccctcaaggcttccaaggtcctgccggagagcctggggaacctggccagactggccccgctggagctcgcggacccgcagggcctcccggcaaagcaggcgaggacgggcacccaggcaaacccggaaggccaggtgaaaggggagtcgtgggaccgcaaggggcccgaggattccccggtacgcccggactgccaggattcaaaggcattagggggcacaacgggctggacggcctgaagggccagccaggagcacccggggtcaaaggtgagcccggggcgcccggagagaatgggacccctgggcagacgggggcccggggcctccccggtgagcgcgggcgggtcggggcccccggcccagccggtgcccggggctctgatggaagcgtcggccccgtcggaccggccggtcccattggctctgctgggcctcccggattccctggtgctcctggacctaagggcgagatcggagccgtcgggaacgccggcccagctggacctgcaggacctagaggggaagtgggcttgccagggctgagcgggcctgtgggtccaccggggaaccctggcgcaaacggattaaccggcgctaaaggcgccgccggtctccctggcgtcgctggtgcacctggactcccagggcccagggggatacccggaccggtgggggccgcaggcgctaccggagcccgcggtcttgtaggggaacctggcccagccggcagtaaaggcgaatcgggcaataagggcgagcccgggtcagccggaccccaggggccccccggtccatccggggaggaagggaaacgtggaccgaatggtgaggccgggtccgcagggccccccgggccccccggtctccgcggcagccctgggtctcgtggcctgccaggcgcagatggacgagcaggtgtgatgggccctccgggctcgagaggggctagtggacctgcaggtgttcgcggcccgaatggcgatgccggccggcccggtgaaccgggactgatgggcccaaggggtcttcctggctccccggggaacatcggcccagcgggcaaggagggaccggtgggtctcccaggaatagacggcagacctggccccatcggtccagctggagcgcgcggcgaacccggtaatattgggtttcccgggcccaaagggccgactggcgatcctgggaagaatggtgataaaggacatgctgggctcgcaggggcccgaggggccccgggcccggacgggaacaatggggcacagggaccgccgggcccacagggcgtgcagggggggaaaggagagcagggaccacctggcccacctggttttcaggggcttccagggccttctggccctgctggagaggtggggaaaccaggcgaacgggggcttcacggtgaatttggtctacccggcccagctggcccccgcggcgagaggggtccaccaggcgagagcggagcagctggaccgactggcccaattggttccagaggccccagcggccccccaggacccgacggaaacaaaggcgaacctggagttgtaggcgccgtggggaccgccgggcctagcggcccttctggacttcccggtgaaaggggggccgcaggcataccaggtgggaagggggaaaaaggagaaccaggactccgtggcgagattgggaaccctggccgggacggagcccgaggagccccaggtgctgtgggtgcacccggtccagccggcgccactggtgacagaggggaagccggcgccgccggccctgccggaccagcaggccctagaggcagcccgggcgagaggggagaggttggcccggccgggccaaatggattcgccggccccgcaggcgccgctgggcagcctggtgcgaagggtgagcggggagccaaaggtcctaagggggagaacggcgtggttggccctaccggcccggtgggggctgctgggcccgccggacccaacggaccccccggccctgctggctcacgaggggacggcgggcccccaggcatgaccggtttcccaggcgcggcaggtcgaaccgggccaccaggcccttctggtattagtggtccgccggggccaccaggcccagcaggcaaagaaggactgcggggtcccaggggggaccagggccctgtggggaggaccggcgaggtgggagccgtgggcccaccaggctttgctggcgagaaaggtccatcaggagaggctggaaccgcgggacctcccggtacccctggcccccaaggcctgttgggggcgcccggcattctggggctgcccggatctcggggggagagggggctgcccggggtcgctggagcagtcggtgaaccaggacctttgggaatagcgggaccgcctggggccagaggtcccccgggggctgtgggctcacctggcgttaacggagcacccggtgaggccggtagagatgggaacccgggtaacgatgggccacctgggagagacggtcagccaggccacaaaggcgaacgagggtatccagggaacataggaccggttggcgcggccggggcccccgggcctcacggtcccgtgggcccagcagggaagcatggcaatcgtggggagacaggaccgtctggcccagttgggcccgcgggagccgtaggacctaggggtccaagtgggccccagggcattagaggcgataaaggggaaccgggcgaaaaaggaccgcggggacttccaggcttaaagggccacaacgggttacaaggactcccagggatcgccggccaccacggcgatcagggggctcctggttccgttggtccggctggtcccaggggcccggccggcccttccgggcctgctggcaaggatggcagaaccggccatcccggcacagtcgggccggctggaattagaggaccccagggtcatcagggccctgctggcccgcccgggccaccagggcctccaggaccgcctggagtttccggcggtggatacgatttcggttacgatggggatttctaccgagccgaccagcctagaagtgctccctctctgagacccaaagattatgaggtggacgcaaccctgaaatcccttaataaccagattgagactctgctaactcctgaggggtcgcggaagaatccggctcggacttgtagagacctcagactctctcaccctgagtggtcttccggatattactggattgacccaaaccaggggtgtaccatggatgctattaaggtttactgcgacttctcaacgggtgagacttgcatcagggcccagccagaaaacatcccagccaaaaactggtatcgatcgtcgaaggataaaaagcatgtgtggctgggggagactatcaacgcggggtcccagttcgaatataacgtcgagggagttacgtctaaagaaatggccactcaacttgcgttcatgcgtctcctggctaactatgcgtcgcagaatattacctaccactgcaagaactccattgcttatatggacgaggaaacaggcaacctcaaaaaagccgtgatattgcagggtagcaatgacgtagagttggtcgccgaaggaaacagccggttcacttataccgtgctggtggacgggtgctccaagaaaactaatgaatggggcaaaacaatcatagaatacaaaaccaacaagcccagccggctaccatttcttgacatcgctcctttggatatagggggcgctgaccaggagttctttgttgatattggcccggtgtgcttcaag

SEQ ID NO: 1320 - DNA, 4098 bp, Artificial Sequence
  derived and/or modified sequence
atgttgagtttcgttgatactagaactcttctactattggccgtgacactctgtctggccacctgccaatccttgcaagaagaaaccgtgcggaagggcccagcaggagatagagggcccaggggcgagaggggcccaccaggccctccgggacgtgacggtgaagatggacctacggggcctccagggccgcctggcccccccggaccaccaggcctgggcggcaatttcgctgctcaatacgatggaaagggggtcggactgggccctggcccaatgggcctgatgggccctcgcggacctcccggggccgccggcgccccgggaccacagggttttcagggaccagcaggcgagccaggtgaaccgggtcagacgggaccagccggcgcgcgcggccctgcaggtcctcctggtaaggcaggtgaggacggccacccaggcaaacccgggcgtcccggcgagcgaggggtggtgggacctcagggcgcacggggattccccgggacacccgggctccccggttttaaagggatccggggccacaatggcctggacggtctgaaagggcaacccggggctcctggggttaaaggagagcccggagcaccaggagaaaacgggactccaggccaaacaggggccagagggctcccaggagagaggggccgcgtgggtgccccaggacccgccggagctaggggttccgacggcagcgtaggccctgttggtcctgctgggcctattggatccgccggacctcccggcttccccggcgccccgggaccaaagggggagatcggggctgtcggtaacgctgggcccgccgggccagctggccctagaggggaggttgggctgcccgggctgagcggacccgtggggccccctggcaatccaggggcaaacggactgaccggcgctaagggcgctgccgggctgccaggcgttgctggcgctcctggcctccctggccctagaggcattcctggacccgtcggggccgcgggcgctaccggggcacgtggtctcgtcggcgagccaggcccagccggttcaaaaggcgaaagcggcaacaaaggcgaacctggttcggccggcccacaaggcccacccggtccaagcggagaagaagggaaaaggggccccaatggtgaggcgggatcggccggtcctcccggaccccctggactgcgcggcagccccggaagtcgcggactccccggcgccgacggccgagccggagtgatgggacctcccggttcccggggggcttctggcccagcgggcgtgcgtggaccgaatggcgacgccggcaggcccggggagccgggccttatggggccaagaggcctaccaggcagtccagggaatataggaccggctggcaaagaagggccagtgggccttcctgggatcgacggacggcccgggcctatcggccctgccggtgcacgcggggagccaggaaatattggatttccgggccccaaaggcccaacgggagaccccggaaaaaacggtgacaaaggtcacgccggcttggctggagctcgcggggctcccggaccagacggtaataatggtgcccaggggcctccaggaccacagggcgtacaaggaggcaagggtgagcagggacccccgggccctccaggctttcagggactcccaggtccctcgggtccggccggggaggtggggaagccgggtgaacgagggcttcacggagagtttggattaccaggcccagccggtccgcggggagagcgcgggcctcccggagagagtggggctgcagggcccaccggacccattggatccaggggccccagcggacctccagggccagacggcaataaaggagaacctggtgtagtcggggctgtgggaacagccggacctagcgggcctagtggactaccaggggagcgaggcgccgctggcatacccgggggcaaaggggagaaaggcgagccaggcctgcgtggggaaatcggcaaccccggcagggacggcgcccggggagcccctggtgcagtgggggcacccggtccagccggtgccacgggggatagaggcgaagcgggagccgctggcccagccgggcctgctggaccgaggggctcaccaggcgagcgaggcgaggttggcccagccgggccgaacggattcgctggacccgctggtgcagctggccagcctggcgcaaagggcgagcgaggtgccaaggggcctaagggtgagaatggcgttgtggggcccactggcccagtgggcgcagccgggccggccggacctaacggacctcctggccctgctggttcaaggggcgatggcggtccccctggcatgaccggatttccaggagctgctgggaggaccggcccaccaggcccctccggaatctcaggcccaccaggccccccgggtccggctggcaaggagggactgcgtggccctagaggagaccagggacctgtcggacggaccggcgaggtgggtgccgtaggtccccccgggtttgccggagagaaaggcccaagtggagaggcgggaacagccggaccaccagggacacctggccctcaaggtctgcttggcgcaccaggaattctcgggctgcctggatctcgaggcgagcggggtttgcctggagtggccggcgcagttggggaacccggccccttgggtattgctgggcctccgggcgctcgggggcctcccggggccgtaggcagtcctggggttaatggcgcccctggggaggctggacgggacgggaatccaggaaatgacggcccccccggccgggatggccagccagggcacaagggagaaaggggttaccctggaaatatcggaccggtgggtgccgctggagcccctgggccccacggacctgttggcccagccggcaaacacgggaacagaggagagaccggacccagcggccccgtgggtcctgccggcgcagtgggcccacgaggcccatcaggaccccagggtatacggggtgacaagggcgagccaggcgagaaaggcccccgagggttaccaggccttaagggccacaatggcctgcaaggacttccggggattgctgggcaccacggcgatcagggtgcgcctgggagcgttggaccagcaggaccccgtggccctgcaggccccagcggtcccgcaggaaaagacggaagaaccgggcaccccggaaccgtaggccccgcgggaatccgcggaccgcagggacaccaggggccagctggaccacctggccccccaggtcctcccggtcctcccggtgtgtccggtggcgggtacgatttcggctacgatggcgacttctatagagcagatcagccgcggtcagctcctagtctccgccccaaagactacgaggtggacgcgaccttgaaaagtctcaacaaccaaattgaaacattgctgacaccagagggctcccgcaagaaccctgctcgaacctgccgggatctgaggctgagccatccagagtggagctctggatattactggattgatcccaaccaggggtgtactatggatgctatcaaggtttactgtgatttctctacgggagaaacctgtatcagagcccagccagaaaacatccccgcaaagaattggtatcggagcagcaaagataaaaagcacgtgtggctcggagagaccattaatgccgggtctcagttcgaatacaatgtagagggcgtgacaagcaaggaaatggcgactcaactggcttttatgagactgctcgctaactatgccagccagaacattacttaccattgtaagaactcaattgcatacatggatgaagaaactgggaacctgaagaaagccgtgatcctgcagggttcgaatgatgtggaattggtggcagagggcaattcccgattcacatataccgtacttgtggacggctgttcaaagaaaaccaacgaatgggggaagaccatcattgagtataagacaaacaagccttctcgcttgccttttctggatattgcacctctggacatcggaggagctgaccaggaattcttcgtggacattggtccggtgtgcttcaaa

SEQ ID NO: 1321 - DNA, 4098 bp, Artificial Sequence
  derived and/or modified sequence
atgttgtcctttgttgacactcgcaccctgctgctgttggcagttaccctctgcctggcgacgtgccagtcgctccaggaagaaaccgtgcgcaagggaccagctggagacagaggtccgcgcggagagagagggccgcccggcccgcccggcagagatggagaggacggccctaccggaccaccagggccgccgggtcctccgggtccaccgggacttggtggaaacttcgctgcacagtacgacgggaagggggtgggcctcggaccgggacctatgggactcatgggcccacggggaccgccgggggccgcaggcgctcctgggccgcaaggtttccaaggaccagcgggtgagcctggtgagccgggccagaccggaccggcaggagcccggggccctgctggacccccggggaaagcgggtgaagatgggcatccaggcaaaccggggcgcccgggggagagaggcgtggtggggccgcagggtgcccgcggcttccctggaactcccggacttcccgggttcaagggaattcgcggtcataatgggctggatggactcaagggacagcctggagcaccaggagtgaaaggcgagcctggagccccgggcgaaaacggcaccccaggacaaaccggcgcgcgcgggctgccgggtgagcgcggacgcgtgggagccccgggccccgcgggcgcgagggggagcgatggctcagttggacctgttgggccagctggaccaattgggtcagcgggtcccccgggctttcctggggccccagggccaaaaggagaaattggtgccgtgggcaacgcaggccctgccggaccggccggacctcgcggggaggtgggacttcctggactctcgggcccagtgggacctcctggcaacccgggagccaacggtctgactggcgcaaagggcgccgcaggcctgccgggagtcgcaggagcccccggactgcccggacctcggggaatccccgggcccgtcggagccgctggagccaccggagcacggggactggtgggagaaccgggccccgctgggagcaagggcgaatccggcaacaaaggggaaccgggatcggcgggccctcaagggccgccgggaccgtccggtgaggagggtaagcggggaccgaacggggaagccgggtccgccggaccgcctggaccccccggtctgcgggggtcccctggctcacgcggactgcctggcgctgacggccgggcaggtgtcatggggccgccgggttcccggggggcttcgggaccagccggtgtgcgcgggccgaacggagatgccggacgcccaggtgaacccggcctgatgggtcctaggggactgccaggctccccgggaaacattgggccagcgggaaaggaaggaccagtgggactccctggcattgatgggcggcctggcccgatcggaccggcgggagctcgcggggagccgggcaatatcggattcccgggaccgaagggaccgactggagatcccggaaaaaacggtgataagggtcacgcaggcctggccggagcgcgcggagctcctggcccagatggaaacaatggagcgcagggaccacctggacctcaaggagtgcaaggaggaaagggagaacagggcccgccgggaccccctggcttccaaggcttgccaggaccaagcggacctgccggcgaggtcggcaagcccggcgaacggggattgcacggagaatttggtctgcccggcccagctggaccgagaggcgaacgggggccgcccggagagagcggtgcggccggaccaaccggaccgattggaagccggggtccatccggtcctccgggtcccgatgggaataagggagagccgggggtggtgggagccgtgggaaccgctggaccttcgggtccatcaggacttcccggcgaacggggcgccgccggcatccctggcgggaagggagaaaagggtgaaccggggctcagaggcgaaatcggtaacccgggaagagacggtgccagaggagccccgggagcagtgggagccccgggcccagcgggtgcgacgggagatcgcggtgaagcgggagccgctggaccagcggggccagcaggcccgagaggatcaccgggggagcgaggggaagtgggcccagccggcccaaatgggttcgccggcccagcgggtgcggctggacagcccggagcaaaaggggaaagaggcgccaaaggacctaagggtgaaaacggagtcgtgggaccaactgggcctgtcggtgccgccgggccggcgggcccaaatggaccgcctggcccggccgggagccgcggtgacggtggaccgccgggtatgaccggttttccgggagcagccggcagaaccggaccaccgggaccgagcggcatttcgggtcctcctggaccaccgggtccggcaggcaaggaaggacttcggggcccacggggcgaccaaggccccgtggggcggaccggcgaagtgggagccgtgggcccacccggatttgcgggagaaaagggaccgtccggagaagcagggactgcgggaccaccgggaaccccggggccccagggattgcttggagctcccggaatcctgggactgcctggatcacgaggagaaagagggctccctggcgtggcgggcgcagtcggagagccaggtccgctgggaattgctgggccgccgggagcgcggggccctccgggagccgtgggctcgccaggagtcaacggagcaccgggagaagcaggacgggatggcaatccaggtaacgacggaccccctggacgcgacggccagccaggccacaagggagaaagaggataccccggaaatatcggaccggtgggcgccgccggcgcaccgggaccgcatggaccggtcggtccagcaggaaagcatgggaataggggagaaactggaccgtcggggccggtgggcccggctggagcggtgggaccaagaggaccgtcgggcccgcaaggaatcaggggagataagggagagccaggagagaaaggtccgcggggactgccaggactgaagggacataatgggcttcaaggtttgccaggaatcgcaggccaccacggtgatcagggagcaccaggatccgtgggaccagccggaccacgcggaccggctgggcccagcgggcccgcgggtaaggatggacggactgggcatcctggaaccgtcggaccggcaggtatccgcggaccgcaaggacaccagggtccggcgggacctccgggaccgccgggaccaccaggaccaccaggagtcagcggaggcggatacgattttggctacgatggagacttttaccgggccgaccagccacggtccgccccgtcgctgcgcccgaaagactacgaggtggacgccactttgaagtcactgaataatcagatcgaaaccctcctcaccccggaggggtcgcgcaagaacccggcccgtacttgccgggacctgagactgtcccatccggaatggtcgtccggctactactggatcgacccgaaccaggggtgtactatggatgctatcaaagtgtactgcgacttctcgaccggtgagacttgcattagggcccaaccggagaacatcccagccaagaactggtacagatcgtcaaaggataagaaacacgtgtggttgggtgagactatcaacgccggatcgcagttcgagtacaacgtcgaaggagtgacctctaaagagatggctacgcaactcgccttcatgcggctgctggctaactacgcctctcagaacatcacttatcattgcaaaaactcgatcgcctacatggacgaggagacgggcaacctcaagaaagcggtcatcttgcaaggatcgaatgatgtggagttggtcgcggagggaaattcgcggttcacctataccgttctggtggatggatgcagcaagaaaactaacgaatggggtaagactattatcgaatacaaaactaacaagccgagccggttgcctttcctggacatcgcgcctctggacatcggaggggcggatcaggagttcttcgtggatattggcccggtgtgctttaag

SEQ ID NO: 1322 - DNA, 4098 bp, Artificial Sequence
  derived and/or modified sequence
atgctgagctttgtggatacccgaaccctgcttcttcttgccgtcaccctgtgccttgccacctgtcaatccctgcaagaggagactgtgcgcaagggacccgccggcgatcgcggcccgcgaggagagcggggcccaccaggtcctccgggtcgagatggggaagatggaccaactggtccacccggtcctcctgggccacctggaccaccaggtttgggaggcaacttcgcggcccaatacgatggaaagggtgtgggtcttggacctggccctatgggccttatgggaccccgtgggcccccaggcgccgctggagcaccagggcctcaaggcttccaaggccccgccggagaaccgggcgaaccaggccaaactggtcccgccggtgcccgaggtcctgccggaccccctggcaaggcaggggaagatggccatccaggaaagccaggacgccctggggaaaggggggtcgtcggcccccaaggagcacgcggctttcctggtaccccaggccttccaggatttaagggaatcagaggacacaatggacttgacgggctcaagggacaaccaggtgcaccaggtgtgaagggagaacccggggcgccaggagagaacggaactcccggacagactggagctcgggggctgccaggtgagcgaggaagagtgggggctcctggccctgccggtgcgagaggctccgatggatcagtgggtcctgttggtccggcaggtccgataggctcggcaggcccacccgggtttccaggcgcgcccggtcctaagggagaaattggtgcggtgggcaatgcaggaccagcgggccctgccggacctaggggagaagtggggctgcctggcctttccgggcctgtcggtccaccaggaaaccctggagcgaacggacttaccggcgcaaaaggagccgcaggccttcccggcgtggccggcgcacctggcctgcctggccctcgcgggattcctggaccagtgggggccgcaggtgcgaccggagcacgggggctggtcggtgaaccaggaccagccggtagcaagggggaaagtgggaacaaaggagagcccggttcggcgggaccacaaggacctcctggcccctcaggtgaagaaggaaagagggggcctaatggagaggcaggctcggcgggaccccctggtccgcctgggctccgggggagccctgggagcagaggcctgcccggagcagacggaagggcaggagttatgggtccaccgggatcgcggggagcctcggggcctgcaggggtgagaggacctaatggggatgccggtcgtcctggtgaacctggtcttatgggtccccgaggcctgcctggatctccgggtaatatcggcccggcaggtaaagaaggtcccgtgggacttcctgggatagatgggcgcccggggcccattggcccagcgggtgctagaggcgagcccggaaacattggattcccagggccaaaaggaccaactggagatcctggtaagaacggggacaagggtcacgcaggtctggcgggtgcccggggtgcccccggcccggacggcaataacggggcacaaggtccacctggaccccaaggtgtgcaaggaggaaagggtgaacagggaccaccaggaccacccggttttcaaggcctccctgggccttcaggtccagcaggagaggtgggtaaacctggggagcgcggactccatggtgaatttggtctgccagggccagcaggaccgcggggagaaagagggccccctggggagtccggcgcagctggaccaacgggtcctattggaagcagaggtccatcaggtccccccgggcccgacggcaataaaggagaaccgggagtggtcggcgctgtgggaactgctgggccatcaggcccttccggattgcctggtgagaggggtgccgcaggtatcccaggaggcaaaggtgaaaagggcgaacctggactccgcggggaaattggcaaccccggacgggacggagcacgcggagcacctggtgcagtgggggcgccgggtccggcgggggccactggcgaccgaggtgaagcaggggcagcagggcccgccggtcccgcgggtccacgaggctcgcctggtgagcgcggagaagttggaccggctggaccgaacggtttcgctggcccggcaggggcagccggtcagcccggtgcaaaaggtgaacgtggcgcgaagggaccaaagggagagaatggcgtcgtgggacctaccggaccggtgggagcagcaggaccggccggcccaaacggacctcctggaccggcaggcagccgtggagacggaggccctcctgggatgacgggttttcccggggcggcaggaagaaccggacctccaggaccatcaggaatatcagggccacccgggccccccggccctgccggcaaggagggtctgcggggacctcggggagatcagggccctgtggggcggactggggaagttggcgcagtagggccaccggggtttgcgggagaaaagggaccatccggagaagccggaaccgcgggtccgcctggaacgcctggacctcagggcttgctgggggcacctggaattcttgggcttcccggttcgagaggagagagagggctcccgggagtggcaggagctgtgggtgaaccgggacctctcggaattgccggtcctccaggcgcacgcgggcctcctggcgcagtcggttcacctggagtgaacggcgcccccggtgaggctggtcgggatggcaacccgggtaacgacggcccacctggaagagacggacagcccggacataagggcgagagaggataccctgggaatatcggaccagtcggagccgcaggtgcaccggggcctcatggacctgtcggccctgcgggcaagcatggaaatagaggtgaaaccgggccatctggcccagtggggccagcaggtgctgtgggtcccaggggcccatccggtccacaaggcattcgaggcgacaaaggcgagccgggtgaaaagggtcctcgtggattgccgggattgaaaggccacaacgggctccagggactccccggaatcgcaggacaccatggggatcaaggtgccccagggtcggtgggaccagcagggcccaggggtccagcgggcccatcggggcccgcaggaaaagatgggaggaccggtcatcctggcactgttggacctgcaggtatccgaggtccacaaggtcaccaggggccagctggacctcccggaccaccaggcccacctggtcccccgggagtaagcggaggggggtacgactttggttacgatggcgacttctaccgcgcggaccaaccccgctccgcgccaagcctgcgccctaaggattacgaggtcgatgcaaccctgaagtcgctgaataaccaaatcgaaacgctgctgactccggaaggttcgagaaagaaccctgcacgtacttgtagagatctcaggctgtcccacccggaatggtcctcgggctactattggattgatcccaaccagggctgcactatggacgcaataaaggtgtactgtgatttttcgaccggtgaaacttgtatccgtgcacagcctgaaaacatacctgctaagaactggtacagatcctccaaggataagaaacatgtatggctgggtgaaaccatcaacgcagggagccagtttgaatacaacgtggaaggtgtcacctccaaagaaatggccactcagctcgctttcatgagacttctggcgaattacgcatcgcagaatatcacctaccattgtaagaactcgatcgcatacatggatgaagaaaccggtaaccttaagaaggcagtgattctccagggaagcaatgatgttgaacttgtcgcagaaggaaattcaagattcacgtacacggtccttgtcgacggatgtagtaaaaagaccaacgagtggggtaagaccattattgagtataagactaacaagccgagcagactcccattcctggacatcgcacctttggatattggaggtgccgatcaggagttctttgtcgatattggacctgtgtgctttaaa

SEQ ID NO: 1323 - DNA, 4098 bp, Artificial Sequence
  derived and/or modified sequence
atgctatcctttgttgatacaaggacattgctgctccttgcggtgaccttatgcctggctacatgtcagtcacttcaagaagaaaccgtcagaaagggacccgcaggggatcggggacctcgcggagaaagaggcccccccggcccccctggacgtgatggggaggatggtcccaccggcccccctggtccccctggcccaccaggccctcccggattgggtggcaacttcgcagcgcaatacgacggaaagggggtgggcctcggccccggtcccatggggctcatgggccctcgggggccacctggggccgccggagctcccggaccccagggctttcagggccccgccggggaaccaggagaacccgggcaaacgggtcccgcaggggccagggggccagccggaccgccaggtaaggccggcgaggatggccatcccggtaagcccggccggccaggggaacggggagtcgtcggaccacagggtgctaggggctttccagggacccccggtctgcctggctttaagggtatccggggccataatggcctggacggtctaaagggacagccaggagcacctggggtgaagggcgagccgggagctccaggggaaaacgggactcccgggcagacgggagctcgaggcctcccaggcgaacgcggtagagtaggcgcccccgggccagcaggagcgagaggctccgacggatccgtgggcccagttgggccggctggaccaatagggtccgccggcccgcctggttttccgggggcaccaggtcctaaaggagagatcggagcggtcggcaatgccgggcccgcaggcccggcagggccgaggggggaagtgggtttacctggcttgtctggaccagtgggccctcccggaaatcctggtgctaatgggctgacaggcgctaaaggagccgctggtctgcccggcgtcgcgggagcccccggacttcctggccccagaggtattccgggacccgtgggtgcagcaggcgccacaggggctagggggttagtcggagagccgggcccggccggatctaagggtgaaagtggtaacaaaggcgaacctggaagcgcaggcccacagggcccccccgggcctagcggggaggagggaaagcggggcccgaatggagaggctgggtcagccggccccccaggccccccagggttgaggggatcccccggtagccggggactccctggcgctgacggccgagctggggtgatggggcctcctggttctcgcggcgcctcggggcctgcaggcgtaaggggccctaacggagatgctggtcggcctggcgagccgggcttgatgggacctagaggtctccctggctctcccgggaacatcggcccagccgggaaagaaggtcccgttggtttgcccggaattgatggcaggcccgggccgatcggtccagcaggcgccagaggcgagcctggaaacatcggcttccctggtcctaagggccccacgggtgacccgggaaaaaacggggacaagggacacgctggactcgctggcgccagaggagcgcctgggccagacggcaacaatggcgcccaaggacctcctggccctcaaggggtgcagggtggaaaaggcgagcagggcccacccgggccacccggattccagggcctgcccggcccttccggcccggctggagaggtagggaaacccggcgagcgcggactgcatggagaatttgggcttccagggcccgccgggcctcgcggtgagcggggcccccccggggaatccggtgctgcggggcctactggaccaattgggagtcgtggcccttccggacctccaggacctgatggaaataagggcgagccgggggtagtcggcgccgtaggcaccgctggtccttccggcccttctggacttcctggcgagagaggtgccgccggcatacccgggggaaaaggagagaaaggggaacccggtctgaggggggagataggtaaccctggtagggacggggcgcgaggcgcccccggagctgtcggagcgcctggaccagccggtgccacgggcgatcggggggaggccggcgccgccggccctgctggaccagccggtccacgtggaagccctggtgagagaggagaggtgggccccgccgggcccaatggttttgccgggcctgctggcgccgcaggccaaccaggagccaagggcgagaggggcgctaaggggcccaagggggagaacggagtcgtagggcctaccgggcctgtcggagccgctggtccggctggacccaacggtcctccaggcccagcgggcagccggggggacggagggcctccaggaatgactggattccccggggccgccgggcggacaggaccgcccggtccttcagggatttccggccccccggggcccccggggcctgccggtaaggaagggctgagggggccccggggtgaccaagggccagtgggccgcacaggtgaggttggcgcagtggggcccccgggattcgccggtgagaaaggaccctcaggagaagctggcactgccgggcctcccgggaccccaggaccacaaggccttctcggagctcccggcatcctcggcctacctggatctcgcggcgagcgagggctccccggtgtggccggagctgttggcgagccgggcccactgggcatcgctggaccacccggcgcccgggggccaccaggggcggtcggaagccccggggtgaatggggcccctggcgaggcaggccgggatgggaaccctggcaacgacggaccgcccggccgggatggccagcccggtcacaaaggcgaaagagggtatcctggcaatatcggccccgtgggtgcagccggcgcccctggcccacatggtcctgtgggtcccgccggcaagcacggaaatagaggggagaccggcccatcaggaccagtggggcccgctggggcagtcgggcctagggggcctagcggtccacaggggattcggggggataagggtgagcccggtgaaaaaggtccacgagggctccctggcctaaagggccataatggcctccagggactccccggcatcgccggtcaccacggcgaccagggggcgcccggttctgtgggcccagctggccctcgcggccccgccggcccctcaggccccgcaggtaaggacgggcgcacaggacacccgggtaccgtagggcccgccggcatcagaggccctcaggggcaccagggtcccgccggacctcctggaccccccggtccaccggggccccccggagttagtggaggaggatacgactttggttatgatggcgacttttacagagcggatcaaccgaggtccgctcctagtttgcgacctaaggactatgaagttgacgcaactttgaaatcgctgaataatcagatagagactctgcttaccccagaagggagccgtaaaaaccccgcacggacttgtcgtgacttgagactctcccacccggaatggagttctgggtattattggattgacccgaaccagggctgcactatggacgctatcaaagtgtactgtgacttttcaaccggcgaaacatgtattagagctcagccggagaacatccctgccaagaattggtataggtcatcaaaggataagaagcatgtgtggttaggcgaaaccatcaacgctggctcccagttcgaatataacgttgagggcgtgacttccaaggagatggcaactcagctggccttcatgagattactggccaactatgcaagtcagaatatcacctatcactgtaagaacagcattgcttacatggatgaagagaccgggaatctgaaaaaggctgttatcctccaaggctctaatgacgtcgaactggtcgcagaaggcaacagccgatttacctataccgtacttgtggatggttgctctaaaaaaactaacgaatgggggaaaactatcatcgagtacaagaccaataagccatctagactgcctttccttgacatcgcaccgctggacatcggcggtgccgatcaggagttcttcgtggacatcggaccagtgtgttttaaa

SEQ ID NO: 1324 - DNA, 4098 bp, Artificial Sequence
  derived and/or modified sequence
atgctttcattcgtcgatacccggaccttgcttcttcttgcagtgaccctgtgtcttgcgacctgccagtcactccaagaggaaaccgtgcggaagggtccagcaggtgatcggggccccagaggtgaacggggtcctccaggacctcccggccgtgacggtgaggacggtcccacgggcccacctggcccacctggacccccgggtcctcccggactgggaggtaactttgcagcccagtatgatggaaaaggagtcggtttgggacccggtcctatggggcttatgggccctagaggcccacctggggcagcaggagcccccggacctcagggattccaggggccagcgggcgagccaggtgaaccaggacaaaccggacctgctggagccagaggacccgcaggtccccccggcaaagccggggaggacggccaccctggcaagcccggtagaccaggagaaagaggtgtcgtcggtccccaaggagcacgtgggtttccagggaccccaggacttcctgggttcaagggtattagaggccacaacggacttgatggtctgaagggacagcccggcgcacccggagtcaaaggggaacctggcgccccaggtgaaaatggtactccgggccagactggtgcacggggtttgcctggcgaacgcggacgcgtgggagcgccaggtcctgcaggcgcaagaggtagcgacggtagcgtgggacctgtcgggccggctggccccatcggttccgcaggccctcccggctttcctggagcacctggaccaaaaggagaaattggcgccgtgggtaacgcgggtccagcggggcccgcaggacctagaggggaagtcggccttcctggcctctcaggaccagtaggtcccccgggaaatcctggtgcaaacgggctgaccggagccaaaggggcagcgggactccctggtgtggccggtgcacccggactgcctggccctagaggaattccagggccggtcggtgcggcaggagccaccggtgcccgcgggctcgtgggtgaaccggggcctgctggttcgaagggcgaatcaggtaataagggagagccaggttcggcaggcccccagggccccccaggaccaagcggggaggaggggaagaggggcccgaacggtgaagccggatccgcaggaccaccaggtcctccaggccttagaggctccccaggtagccggggcctcccgggtgcagatggccgcgcgggtgtcatgggaccccctggatcgcgtggtgcatccggtccggcaggcgttaggggtccaaacggagatgcaggccgaccaggcgagcctggcctcatgggcccccgagggctgcccggtagcccgggcaatatcggccccgcggggaaagaaggtccagtgggcctccccggtatcgatggtcggccagggcccattggccctgcaggagccaggggcgaacccggtaacattggcttccctggtccaaagggacctaccggggaccccgggaagaacggcgataagggacatgccggactggctggggccagaggggcccccgggcccgacggtaacaacggtgcacaggggccaccggggccacagggagtgcaaggtgggaaaggtgagcaaggtccaccggggcccccaggcttccagggcctgccagggccgagcggacctgcaggtgaagtcgggaaacctggagagcgcggccttcatggagaatttggtctgcctggacccgccgggccccgcggtgaacgggggccgcctggggagtccggagcagccgggcctacgggaccgatagggtcgcggggtccatccggacccccgggaccggacggaaataagggtgaaccaggggtggtcggcgccgttggtactgcaggaccttcgggacccagcgggctgccgggcgaaagaggcgccgccggcatcccaggtggtaagggagaaaagggcgaaccaggacttcgaggggagatagggaaccccggcagggatggggcaagaggcgctcctggtgcagtgggtgccccagggccggccggggcaaccggggaccgcggagaagcgggtgctgcaggaccagcagggccagcggggcctcgaggatcaccaggagagcgtggtgaggtaggtccggctggaccaaacgggtttgcagggcctgccggtgccgcgggacaaccaggtgcaaagggggaacgcggcgcaaagggtccaaaaggggagaatggagtggtgggccctactggaccagtcggcgcagctggcccagcgggcccgaatggccccccaggcccggctggctcccgtggggatggagggccccctggaatgactgggtttcctggtgccgcaggtcgaaccggtcctccgggtccttccggtatttcaggaccgccgggccctcctgggcctgctggaaaagagggacttaggggtcccaggggtgaccagggcccggtcgggagaactggagaagtcggagcagtgggccctccgggatttgcaggtgaaaagggaccttcaggggaggccggaacggcagggcccccaggtacccctggccctcaaggcttgctgggagcacctggtattcttggactgcctggatcacgcggtgagagagggcttcctggggtggcaggagcagtgggggagcccggccctctcggaatcgccggcccaccaggagcaagaggacctccgggggcagttggctcgccgggagtgaatggagctcctggagaagcagggagagatggaaaccctggaaacgacggtcctcctggtcgggacggtcagcctggacacaagggggaacgaggttaccctgggaacattggcccagtgggggcagcgggggcgccaggcccacatggacccgtgggccctgcaggcaagcacggaaacagaggcgagactgggccatcggggcccgtcgggccagctggggccgtggggccccgggggccttccggaccgcaaggcattaggggggataagggagaacctggtgagaaaggaccgcgtggcctgccgggtcttaaaggtcataacggacttcaaggcctgccaggcattgcaggacatcatggcgatcaaggagccccgggcagcgtggggcctgccggccctcggggtcctgctggcccaagcgggccagccggtaaggatggacgtactggtcatcctggcactgtgggtccggcaggaatacgtggaccacaaggacaccagggaccggcgggacctcccggtccccctggacctcctggacctccaggggtgtccgggggaggatacgattttggatacgatggtgatttctacagagcggatcagcctagatccgcaccatcgttgcgacctaaggattacgaagttgatgctacgctcaagtcgctgaacaatcaaatcgaaactctcctgacccctgagggttccagaaagaatcctgcacgcacttgtagggacctgaggttgtcccatccggaatggagcagcggatactactggatcgaccctaaccaaggctgcaccatggatgcaattaaggtgtactgcgacttcagtactggagaaacttgtatccgggcacaaccagaaaacattccggcaaagaactggtatagatcgtcgaaggataagaagcatgtgtggctgggtgaaaccattaatgcgggatcgcaatttgaatacaacgtggaaggagtcacctcaaaagaaatggctacccagcttgcatttatgcgacttctggcgaactacgcatctcaaaacatcacttaccactgtaagaattcgatcgcttacatggatgaagaaactggtaatctgaaaaaggcagtgattcttcaaggctcgaacgatgtggaattggtggctgaaggaaactcgaggttcacctacactgtgctggtggatggatgtagtaagaaaacgaatgaatggggtaagactattatcgagtacaaaaccaataagccatcccgcctgccctttctcgacatcgcacctctcgacataggtggagcagatcaagagttctttgtggatattggacctgtgtgctttaag

SEQ ID NO: 1325 - DNA, 4098 bp, Artificial Sequence
  derived and/or modified sequence
atgctgtcctttgtagacacccgcaccctgctcctgctggccgtcacgctctgcttggctacgtgccagagtctccaggaggagacagtgagaaaaggccccgcgggggatcgcggtccccgtggagaacgcggaccccctggaccgcccggacgcgacggcgaggatggtccgacaggtccgcccggtccgccgggcccgccaggtccgccgggcctgggcggcaacttcgcggcccagtatgacggaaagggcgtgggactggggccgggaccaatgggactcatgggccctcggggcccaccaggtgctgctggtgccccaggcccccagggatttcaaggaccagcgggagaacccggggagccaggccaaacgggtccagctggagccaggggtcctgctggcccccccggtaaggcaggggaagacggtcatccaggcaagcccggcagaccaggggagcggggcgtggtcggaccgcaaggtgcgagaggtttcccaggcacccccggcttgccaggatttaagggaattcgaggccataatggtctggacggcctcaagggtcagccgggggcgccgggggtgaagggcgagcctggtgcaccgggagaaaatggaaccccgggccagaccggagcgcgcggcttacctggtgagcgcgggcgtgtcggtgcccccggaccggccggcgccagggggagcgacgggagtgttgggccagtaggacccgcaggaccaattggttcagcggggccgcccggctttccgggagccccgggtccgaagggagaaataggagcagtgggcaacgctggaccggccgggccggcgggcccgcgtggcgaggtaggtctgccgggactcagcggaccagtcggcccacccggcaaccccggcgctaacggcttaacgggcgcaaagggcgcggccggtcttcctggcgtggccggagctcccggcctgcccggaccgcgtggcattccaggtcccgtcggcgcagccggcgcaacgggagcccgcggcctggtcggagaaccgggcccagcgggctccaagggcgagtccggtaacaagggcgagcccggctcggcaggcccacagggtcccccaggcccctccggtgaggaaggcaaacgtggaccaaacggcgaggctggatccgccggacccccaggcccgcccggactacgtggctccccgggcagcaggggactacccggtgccgacggacgcgcaggcgttatgggcccaccgggcagcaggggagcctcgggtcccgccggagtacgcggtcctaatggagacgctggacgacccggcgagccgggcctcatgggcccacggggtttaccggggtcgcctggtaatatcggcccggctggaaaggaaggccccgtgggtttgcccggtattgacggacgaccggggcccattgggccggccggagcgcgaggagaaccaggaaatatcggttttccgggtccgaagggccccaccggtgatcccgggaagaatggcgacaagggccatgccggcctcgccggagcacgcggagctcctggcccagatggtaacaatggcgcccagggcccgcccggcccacagggtgttcagggtggcaagggagagcagggcccccctggaccgccgggcttccagggattgccaggtcccagtggacccgcgggcgaagttggcaagcccggcgaacgcggcctgcacggcgaatttggactcccagggccagcaggcccacggggcgaacgcggtccgccaggcgagtccggtgcagccggccccacgggccccattggttcgcgcggaccctcgggtcctccaggccccgacggcaacaagggcgagccaggcgtggtcggcgccgtcggtacagctgggcccagcggaccatccggcctgccaggagagcgcggagcggccggcatcccgggtggcaagggagagaagggtgagcccggcctccgcggtgagataggcaatcccggacgagatggcgcacgtggagcaccgggtgccgtcggtgcccccggcccggctggcgcaaccggtgacaggggtgaagctggcgccgccggccccgccggtccagcaggtccacgcggttccccgggcgagcgaggcgaggtaggtcccgctggcccaaatggcttcgcaggtcccgccggcgccgccggacaacccggggctaagggcgaacgcggcgcgaaaggtccgaagggagaaaacggtgtcgtgggaccaacaggccccgtcggtgctgcaggccccgccgggcccaacggtccgccaggccccgcaggatcccgcggtgatggcggccccccgggtatgaccggctttccgggagcggccgggcgcacagggcccccaggtccatcgggcatctctggaccaccgggccctccgggacccgcaggaaaggagggccttcgcggcccccgcggagaccagggtccggtaggccgcaccggcgaggtgggagctgtgggccctcccggatttgccggagagaaggggcccagtggcgaagcaggtacggcaggtccccctggcacgccaggaccgcagggcctactgggcgccccaggcattctaggcctgcccggctccaggggagagagaggcctgccaggagtggcgggcgccgtgggcgaacccggccccctgggaatagctggaccgccaggcgcacggggacctccaggtgcagtggggagtccaggagtgaacggagccccaggtgaggccggtcgtgatggcaatccgggaaacgatggacctcctggtcgagatggtcaaccaggccacaagggtgagcgaggctaccccggaaatataggcccagtgggcgccgccggcgcgccgggaccccatggtccagtggggccggccggcaagcacgggaacaggggcgaaaccggacccagtggacccgttggtccggcgggcgcggtaggccctcgaggaccatcgggcccacaaggaatccgaggtgacaagggcgagcctggagagaagggccctcgaggattgccgggtctgaagggccataacggacttcagggactgcccggaatcgcgggtcaccatggtgaccaaggcgcccctggaagtgtgggccccgccggaccccgcggacccgccggcccttctggacctgctggaaaggatggacgcacaggccacccaggcacagttggtccagccggcatccggggaccgcaaggacaccaaggccccgcaggcccaccaggacctccaggacccccgggaccacctggtgtgagcggcgggggctacgatttcggctacgacggcgatttttaccgagcagaccagccccgctcagctcctagtctccggccgaaggactacgaggtagacgctaccctgaagagcctaaacaaccaaattgagactcttttaacaccagagggaagtcgcaagaaccccgcaagaacatgtagagatttgcgcttgtcgcacccggagtggtcgagtggctattactggattgatcccaatcagggctgcactatggatgccattaaggtgtattgcgacttttccacgggagagacctgcatacgtgctcagcccgagaacatacctgcgaaaaattggtatcgttccagcaaggataaaaaacacgtatggcttggagagaccatcaatgctggcagccagttcgagtataacgtcgagggcgtgacgagcaaggagatggcgacccagctggccttcatgcggctgctggccaattacgcctcccaaaacattacctaccattgcaagaattctatagcgtatatggacgaggaaacaggaaatctaaaaaaagccgttatactgcagggctctaacgacgttgagttggtggctgaaggaaattccaggtttacatacactgtcctggtcgacggttgctccaagaagaccaacgagtggggcaaaacgattatcgagtataagactaataagcccagtcgtctgccgtttctcgacatcgctccgctggatatcggcggcgccgatcaggagttcttcgtggacattggcccggtgtgtttcaaa

SEQ ID NO: 1326 - DNA, 4098 bp, Artificial Sequence
  derived and/or modified sequence
atgctctccttcgtcgatacccggactctgctgttgcttgcggtgaccctctgcctcgccacctgccagagtctacaggaggagacggtaagaaaaggccctgctggcgaccgcggacccagaggcgagcgcgggcccccggggccacccggccgggacggagaagacggcccgacggggccaccgggaccccccggccctccggggccaccaggactgggcggcaactttgctgctcagtacgacggcaaaggcgtcggcttgggacccggccctatggggctcatgggcccacgcggtccgcctggcgccgccggagcccccggcccgcagggcttccagggaccggctggagaacctggggaacccggtcaaacaggccctgcaggcgctagaggaccggcagggcccccagggaaggcaggggaagatggtcatcccggaaagcccgggaggccaggagagagaggcgtggtgggtccccagggagcccgtggattccctggcacgcccggacttccgggatttaaagggataagggggcataacgggctggacgggttgaaggggcagccgggagctcctggagtgaaaggcgaaccaggcgcccccggcgaaaacggaactcccgggcagaccggagcccggggcctcccgggcgagaggggccgtgtgggcgcccccgggcctgccggcgcccgtgggtcggacgggtcagtaggccccgtcgggccagctggaccaattggtagtgcagggccccctgggttcccaggtgctcccgggcccaaaggggagattggagccgtgggcaatgccgggccggcaggtccagcggggccaaggggcgaggtgggcctgcccgggctgagtggacccgtgggtccccccggcaacccgggggcaaacggactaacgggggcgaagggcgcggctggtttgccaggagtagcgggtgctcctggtcttcccggccccaggggcatccccgggccagtgggcgccgctggcgccactggagctcggggcttagtgggagagcccggacctgcaggaagtaagggagaaagcggcaataaaggcgagcccggcagtgccggcccccaggggccaccaggaccctcaggcgaggaaggtaagagaggtcctaacggtgaagccgggtccgcaggacctcccggtcccccaggtctacgtgggagtcctgggtctagaggcctccccggtgcagacggcagagccggagtgatgggccctcccgggagtcgcggtgccagcgggccagccggtgtccggggccccaatggcgacgcaggccggcccggcgagcctgggttgatgggacccagaggacttcctggtagccccgggaatattgggcctgctgggaaagagggccccgtgggtctacctgggatagacggcagaccggggccgattggacccgccggggcccgcggcgagcccggaaatatcgggtttccaggaccaaaaggaccgactggcgacccaggaaaaaacggcgataagggacatgcgggtttggcaggagcgaggggagcccccggccccgacgggaataacggggcacagggaccgcctggaccgcagggcgtgcaaggcggcaagggggaacaaggacccccaggcccacccggtttccaagggctaccaggaccttccggacccgctggtgaggtcggtaagccgggggagcgcgggctgcatggcgagtttggcctccccggccccgcaggcccaaggggagaacgggggccacctggggagtccggcgctgccggtcctaccggtccaatcgggagccgcggccccagcggccctccagggcccgatggcaataagggggaaccaggagtggtcggtgccgtgggcaccgccggcccaagtggtccatcaggcctacccggagagcggggtgcagccggaatccctggtggtaaaggggaaaagggggagcctggcctccgtggtgagatcggcaaccccgggcgcgacggcgcaaggggcgcacctggggccgttggcgcacctggccctgccggggctaccggcgaccggggggaagccggcgccgctgggcccgcaggccccgccggcccacgcggttcccccggcgaaaggggggaagttggacctgccggccccaacgggttcgcaggccccgctggagccgccggtcagcctggagctaagggggaaaggggtgcaaagggtccgaagggcgagaatggtgttgtgggacccaccggaccagttggcgccgctgggccagccggcccaaacggcccccccggccctgcaggcagcagaggcgatggggggcctccgggaatgactggtttcccaggcgccgccggtcgaaccgggcctcctggaccgagtggcattagtggcccccctgggcccccaggacccgccggaaaggagggtctcagaggccccaggggtgaccagggaccagtgggcagaaccggtgaagtaggagctgtgggaccacctggcttcgccggcgagaaaggcccatccggagaggcgggcacagccggcccgccaggaacccccgggcctcaggggctgttaggggcacctggaattctgggcttgcctgggtcaaggggggagagaggtctccctggggtcgcgggggccgtgggagagcctggcccattagggatcgcaggccctcccggggcacgtggaccaccaggggcggtaggctcccccggtgtcaacggggctcctggcgaggccggccgggacgggaacccgggcaacgacggaccacccgggagggatggacagccagggcataaaggtgagcggggctatcccggtaacattggacccgttggggcagctggggcccctggaccccacgggcccgtgggtcccgcgggcaaacacgggaatcgtggagagaccggtccttctggtcccgtagggcctgccggggctgtaggtccaagaggacccagtggtccccaaggcattagaggcgataagggagagcccggagaaaagggacctcgtggcctaccagggttaaagggccacaacggcttgcaagggctgcccggcatagcagggcatcacggggaccaaggcgccccaggcagcgtgggcccagccggtccgcggggcccggctggtccttccggtcctgcaggaaaagacggccggactggccatccaggaactgtcggaccggctggaataagagggcctcaggggcatcaaggcccggcgggcccccctggaccaccaggaccgccaggccctccaggggtttctggtggggggtatgatttcggttatgacggggacttctacagggcagaccaacctagaagtgccccttcgctgcggcccaaggattatgaagtggatgccacactcaagagtctcaacaatcagattgagacattgcttactccagaggggtccagaaaaaatcctgcccggacctgcagagacctccgtctttcccaccccgaatggtcgagtggttactactggatcgatccgaatcagggctgcaccatggatgcaatcaaagtctactgtgatttctcaactggagagacatgtatcagggcccagcccgagaatattcccgctaaaaattggtatcggagtagtaaagataagaagcatgtctggctgggtgagaccattaacgcggggtcccagtttgaatataatgtagagggggtaacaagtaaggagatggccacacagcttgccttcatgcgactactagccaactatgccagccagaacattacctatcattgtaagaatagcattgcctacatggatgaggagactggcaacctgaaaaaggctgttatcttgcaggggtccaacgatgtggagctagtcgccgagggcaactcgaggttcacctatactgtgctggtggacggttgtagcaaaaaaacaaacgaatgggggaaaactataattgaatataagactaataagccctctagattgccttttctggacatagcccccctcgatatcggtggcgcagatcaagagttttttgttgatattggcccagtgtgctttaaa

SEQ ID NO: 1327 - DNA, 4098 bp, Artificial Sequence
  derived and/or modified sequence
atgctttccttcgtggatactagaacactgcttctgctggctgtgacactttgcttggcaacctgccaatcactgcaagaagaaaccgtgaggaagggccctgctggagatcgcggccctcggggggagaggggacccccgggaccaccgggccgggacggagaggacgggcctacaggtcctcctggcccccccgggccacctggccccccgggtctgggcggaaatttcgctgcacagtacgacggcaaaggcgtggggcttgggcctgggccgatgggcctgatgggccctagggggccacccggggccgccggagcgccaggaccacagggattccagggccccgcaggtgagccaggcgagcccggccagaccggccctgccggagcacgtggtcccgccggtccgcccggtaaagccggtgaggatggacaccctgggaagccaggccggcctggcgaaaggggggtggtcggaccccagggcgccaggggcttccccgggacccctggcctaccaggcttcaaggggatccgagggcataacggcctggacgggctgaagggacagcctggtgccccgggcgtgaagggtgagcccggcgcccccggggagaatggcacaccgggtcaaaccggagcacgcggcttgccaggagagcgtggacgcgtgggcgcacctggccccgctggggcgagaggaagtgatggcagtgtgggacctgtgggaccagccggtccgatcggcagcgcagggccgcctggcttccctggagctccaggtccgaaaggtgagatcggtgctgtgggcaatgcagggcctgcggggcctgcggggcctcggggggaggtgggcctcccggggcttagcggccccgtggggcctcccggcaacccaggggccaacggcctgaccggggcaaagggcgctgccggcttgcctggcgtggctggggccccaggcctcccaggaccgaggggcatcccgggacctgtgggggcggcaggcgcgacgggtgcccgcggtctggtgggcgagccggggcccgctggatccaagggagagtcaggtaataagggagagccggggtctgcaggaccccagggcccgccggggccttcgggagaggaaggcaagagggggcctaacggcgaggccggttccgcgggccctcccggacctccggggctgcgagggtccccggggtcccggggcctgccaggggccgacggcagagccggcgtaatgggtccgcctgggtcacggggcgcgagcgggcccgccggggtgcgcggccctaacggcgatgcagggaggcccggtgagcctggcctcatgggaccgagaggcctgcccggatcacctggaaacatcggccctgccggcaaggaagggcccgttgggctacctggtatcgacgggcgccccggacccatcggtccggccggtgccagaggagagcccggcaacattggattccctggtccaaaaggccccaccggggacccggggaagaacggcgacaagggacatgccgggttagcgggcgcgcgaggcgcccccggacccgacggcaacaacggagcccaaggcccgcctggtccacagggcgtccagggaggaaagggtgaacagggcccacccggccctcccggctttcaagggctgcccgggccatcaggcccggcgggagaagtgggcaaaccgggcgagagggggctgcacggagagttcggactgccaggacctgctggtcctagaggggaacgtggtcctcctggcgagtccggtgctgccggtccaacggggcctatcggcagccgtggcccctcaggcccaccagggccggatgggaataaaggagagcctggagtggtcggggccgtgggcaccgccggcccatcaggccccagcggactgccgggggagcgaggtgccgctggcatccccggcggcaagggcgaaaagggggaacccggcctgagaggggagatcggaaaccctggaagagatggcgccaggggcgctcctggggcggtgggcgcccccggtcctgccggcgccactggggatcgaggggaagcgggcgctgccggacccgcgggtccggccgggcctcgagggagtccgggtgaaaggggggaggtgggacctgccggccctaatgggttcgctggtccagctggagccgcgggccagcctggggcgaagggtgaaagaggggctaagggtcccaagggagaaaatggggtggtgggccccaccgggccagtcggggccgctggtcctgccgggcctaatggtccccctggaccagctggctcccgcggggacggcgggcctccaggcatgacgggattccctggagctgcggggagaaccgggccccctggaccctccggcattagtggaccgcctggcccacccggtccagccggcaaagagggcctgaggggtccaagaggagatcaaggccctgtgggccgcacaggagaggttggagccgtcgggccaccaggttttgcgggggaaaagggcccttccggggaggccggcactgctgggcccccaggcacacctggcccacaaggactgctgggagcacctggcattctcggccttcccggcagcaggggtgaacgcggactgcccggcgtggcgggcgccgttggagaaccaggtccacttgggatcgccggcccgccaggcgcccgcggcccccccggcgctgtcggctctccaggggtgaatggagctcccggagaggcaggaagagacggtaaccctggtaacgacggccctccaggacgggatggacagcctggccataaaggggagcgaggttaccccggtaatatcggccccgtgggggcagccggggcccccggtccacacggccctgtgggccctgctggcaaacatgggaataggggcgagacaggcccaagtggtcccgtgggcccagcaggtgctgtcggacctcgggggccatctggtccccagggcattaggggcgacaagggggaacctggtgaaaaggggccgcggggtctgcccgggcttaaggggcataatggtctgcaggggctgccaggtatcgctgggcaccatggagaccagggcgcacctggaagcgtcggtcccgcaggaccgagggggccagccggtcctagtgggcctgccggaaaggacggtcggacagggcacccgggcaccgttggacctgccggcatcaggggcccccaaggccatcaggggccagccgggcctcctggccctcctgggccgcctgggcccccaggggtgtccgggggcgggtacgattttggatatgatggcgatttctatcgggccgaccagccacggtctgctccttccctcagacccaaagactatgaggtcgacgcaacactgaagtccctgaataaccagattgaaaccttgctgacccccgaaggtagccgcaagaatcccgccagaacttgccgtgatcttaggttgtcccatcctgaatggtctagcggctactactggattgaccctaaccagggttgtactatggacgctattaaggtatactgcgatttttctactggagaaacctgcatcagagcccagcctgaaaacatacctgccaaaaactggtaccgttcctctaaggacaagaaacacgtttggctcggggagactatcaatgctggttcacagttcgagtacaacgtcgaaggcgtcacaagtaaggagatggccacccagttagccttcatgaggctgctggctaactacgcttctcaaaacatcacttaccattgtaaaaactccattgcctacatggacgaagaaactgggaatctgaagaaagctgtgatcttgcaggggtccaacgacgtggagctcgtagcagaaggcaatagcaggtttacctacactgttttggtggacggctgctccaaaaagactaatgaatggggcaaaaccatcatcgagtataagacgaataagccatctaggctaccattcttggacatcgcacccctggacatcggaggggcggatcaggagtttttcgtggatatcggcccggtctgcttcaaa

SEQ ID NO: 1328 - DNA, 4098 bp, Artificial Sequence
  derived and/or modified sequence
atgctctcatttgtcgacacgagaacacttttgctgcttgcagtaacgttatgcctggcaacttgccagtccctgcaggaggaaacggtacggaaaggacctgcaggtgatcgcgggcctaggggagaacgcggtccaccaggaccgccgggaagggatggtgaagatggaccgacggggccgcccgggccgccaggacctcctggacctcccggattaggaggcaactttgccgcccagtatgacggtaaaggcgttggcttaggcccaggtccaatgggtttaatgggaccgcgtggtcccccaggtgccgctggagctcctggccctcaaggctttcagggcccagcgggggaacctggtgaaccgggtcagacagggccagccggagctcgtggccctgcgggaccgccgggtaaggctggtgaggacggtcatccaggaaaaccgggcagacctggcgagcggggcgtcgttgggcctcagggcgcccggggtttccctggaacaccaggccttccaggatttaaaggtatcaggggccataacggattagacggtcttaaaggacagccaggcgctccgggagtcaaaggcgaaccgggcgccccgggagaaaacggtacgcctggacaaacgggcgcaagaggccttccgggggagagaggccgagtcggtgctccgggtccggccggcgcgagaggttcagacgggtctgtaggcccggtcggacccgccggaccgattggttcagctggaccgccaggctttccgggagcacctggtccgaaaggagagataggcgcagtcggtaatgccggaccggccgggccggcgggtccaaggggtgaggttgggttgcctggactttcaggccctgtaggaccaccgggtaacccgggggctaatgggttaaccggagcgaaaggagccgcgggtttacctggcgttgctggcgctccgggactaccgggcccacgcggtattccaggccctgtcggtgcggccggggcgactggcgcgagaggtttggtcggggaaccgggacctgccggttctaaaggtgagtctggaaataagggtgagccgggctccgccggcccccagggtcctcctggaccgagtggcgaagagggtaagagaggcccgaacggagaagctggttctgcgggtcctccaggcccaccgggcttgagaggatcgcctgggtcacgcggcctgccgggcgcggatgggcgtgcgggagtaatgggaccgccgggctctagaggggcttccggcccggccggagttagaggcccgaacggagatgctgggcggcctggggaaccgggtctgatggggccgcgaggactccccgggtctccaggtaatatcgggcctgccggaaaggaaggcccggtaggcctgcctggaattgacggaagacctggacctatcggtccggccggcgccagaggcgagcctggtaatattggttttccaggccctaaagggccgacaggggaccctggaaaaaacggcgataaaggacatgcagggttagccggggctcggggtgcccctggcccggacggcaataacggagcacagggccctccgggccctcagggcgttcaagggggcaaaggagaacaaggcccgccgggcccaccaggcttccaggggttgcctggcccgtcaggaccggcgggcgaagttggaaaaccgggagaaagaggcctgcatggggaattcggactaccaggccccgcgggccctcgtggggaacgcggaccaccgggagaatctggggccgcggggccgacaggaccgataggctcacgcggcccgtctggtccgccggggccggatggaaataaaggtgagccgggagttgttggggccgtgggcacggcgggtccttcggggccttctgggcttcctggcgaaagaggtgcagcaggcattcccgggggcaaaggcgaaaaaggcgaaccgggacttcggggcgagattggaaatccaggcagggatggcgcgcgtggggcaccaggcgcagtgggagcgccaggcccggctggagctacaggcgaccgcggcgaggcgggggcggcgggccctgcagggccggctggcccgaggggcagtccaggtgaaaggggcgaggtgggtcccgcgggcccgaacggattcgctggtccggctggtgccgccggccagcctggcgccaagggagaaagaggagctaaaggtcctaagggagaaaatggtgtcgtcggacctacgggccccgtaggtgctgctggtcctgcaggtcctaacggaccgccaggccctgctgggtctaggggagatggaggaccgccgggcatgacgggctttccgggcgcagccggaagaacaggcccaccggggccttcaggtattagcggaccgccgggccctccggggcctgcagggaaagaagggcttcgaggacctagaggagatcagggaccggtcggaagaacgggggaggtaggcgctgtggggccgccaggttttgcgggcgaaaaagggccaagcggggaagccggcacagccggaccgcctgggacaccgggcccgcaaggcctcttaggcgctcccgggattctgggtctgccgggatcacgtggcgaaagaggcctcccaggagtcgcaggcgcagttggtgaaccgggccctctcggaattgctggcccgccgggagcgcgcggcccgccgggcgcggtcggctctcctggtgttaacggtgctccaggtgaagcgggaagagatggcaaccccgggaatgatggcccacctggccgtgacggacagccgggtcacaaaggggaaagaggatatccgggaaacatcggcccggtcggtgctgctggggcgccgggaccgcatggcccagttggccctgcagggaagcacgggaataggggggaaaccgggccatctggaccggtgggcccggcgggtgccgttggtccgcggggacctagtggaccgcagggtattagaggagacaaaggagaaccaggcgagaaagggcctcgcggcttaccgggtctgaaggggcacaacgggctgcagggtctgccgggtattgccgggcatcacggagatcagggagcaccgggttccgttggacctgctgggccgagaggacctgctgggccatcaggcccggccgggaaggacggacgaacaggacatccgggcacagtcgggccagctgggattagaggtccgcaagggcaccagggccccgctggacctccaggcccaccgggcccgccagggccgcccggggtgtccggaggagggtacgattttggctacgacggcgacttttatcgcgcagatcagcctagaagtgcgccgtctttaagacctaaggattatgaagttgatgcgacactgaagtcgcttaacaatcagattgaaactttgttgactccagaagggtcacgtaaaaacccggcgcgtacatgcagagacttacgtttatcacacccggagtggtcgtcaggatactattggatcgatccaaatcagggatgcacaatggatgctatcaaggtctattgtgacttttcgacaggagaaacatgcattcgtgcacaacccgagaacattcctgctaaaaattggtacagatcaagcaaggataaaaagcatgtctggcttggtgagacaataaatgcaggttcccagtttgaatataatgtagagggcgttacatcaaaagaaatggcaacccagctcgccttcatgcggttactggccaactatgcgtctcaaaatatcacgtatcattgtaaaaactccattgcttatatggatgaagagactgggaacttgaaaaaagcagtcattttgcaaggtagcaatgacgtggaactggtagccgaaggcaactctcggttcacgtatacagtgctggtcgatggatgttcgaaaaagaccaatgagtggggaaagaccataattgaatacaagacaaataaaccgagtcgcctgccttttttggatatcgccccgcttgacatcgggggcgcggatcaagaattttttgtcgatataggccccgtatgctttaag

SEQ ID NO: 1329 - DNA, 4098 bp, Artificial Sequence
  derived and/or modified sequence
atgttgtcttttgtggacaccagaactttactactcctcgccgtgacgctgtgcctggccacctgtcagtccctgcaggaggagacggtaagaaagggacctgccggcgacaggggccccaggggagagcgaggcccgcctgggcctccgggtcgagatggggaggatggacctacaggccctcccggtccgcccggaccacccggtccccctggacttggtggtaacttcgccgcccagtatgacggaaagggcgtggggttgggccccggacctatgggattaatggggcctcgaggtccccctggggcggctggcgcgcctggccctcagggattccaagggcctgccggggagcccggcgagccgggccagactggccctgccggcgcaaggggacccgccggccctccaggaaaagctggtgaagacggacacccaggtaaacccgggaggcctggcgaacgaggggtcgtggggcctcagggcgcacgaggatttccaggcacacccggcctccctggatttaaagggatcaggggccacaacggattggacggcctcaagggccagccaggtgctcctggagttaaaggtgaacctggtgcacctggggaaaatggcacccctggccagaccggtgcccggggcttgccaggtgaacgtgggcgagtcggcgcaccaggtccagcaggagccaggggctctgatggcagcgtcggcccagtcggtccggccggtccaattggcagtgcagggcctcccgggttccccggagcccccggaccaaagggagaaattggagctgtaggtaatgcaggcccggctggccccgccggccctagaggtgaagtcggacttcctggactgagtggccctgtgggccccccaggaaaccctggcgccaatggactgacaggcgctaagggtgcagccggcctgcccggtgtggccggggctcctggtctccctggccccagggggattcctggccccgtgggcgctgccggcgcaaccggtgccagggggctagtaggagagccaggtcccgccggttcaaaaggggagtcgggtaacaagggcgaaccgggatctgcaggccctcagggccccccaggccccagcggcgaggaggggaagcgaggacctaacggggaggctgggtcagccggcccgcccggtccacccggactgcgtggaagtcctggctcccgaggactcccaggagccgatggacgagccggagttatgggaccccctggcagtagaggtgcctccggacctgctggtgtgaggggacctaacggcgacgctggacgcccgggagagccaggcttgatggggccgagggggcttccaggtagtcccggaaacataggtccagctgggaaagagggaccggtgggactccctggcatcgacggaagacctgggcccataggccctgcaggcgcccgaggcgagcctggaaacattgggtttcctggacctaagggcccgacaggggaccccggaaaaaatggagacaagggccatgctgggctggcaggcgcccggggcgctcctgggccagacgggaacaatggagcccagggccctcccgggcctcagggtgtgcagggcggcaaaggagaacagggacctccgggtccacccggcttccaggggctgccgggaccttccggtccggcaggagaagtcgggaaacctggcgagagaggacttcacggggagtttggccttccaggacccgctggccccagaggggaacgcggtcctcccggtgagagtggggccgcaggcccaaccggcccaattggctccagggggcctagtgggcctcctggccctgacggtaataaaggtgaacctggcgttgtcggcgccgtcggaacagctgggccttctggcccctctggtttgcccggggagagaggtgctgcggggatcccaggaggcaagggagaaaagggggagcctggcctgcgaggagaaatcgggaaccctgggagggatggggctagaggagcacccggcgctgtgggtgcacccgggcccgccggagcaaccggggaccgaggcgaggcaggtgctgccggcccagccggccctgccgggccaaggggatctcctggcgagcgcggagaggtcgggcccgccggccctaacgggttcgccggacctgccggcgccgcgggtcagcctggggcgaaaggggaaaggggggctaaggggccaaagggtgagaatggcgtggtggggccgaccggtccagtcggcgcggcgggcccagccggtcctaatgggcccccaggaccggctggcagccgcggggatgggggtccaccaggcatgactggatttcctggtgcagccgggcgcaccggcccccccggaccgtctggtatctccggccccccaggcccacccggtcctgcaggaaaggagggactgagagggccacgaggtgaccaagggcccgtgggtcgtactggcgaagtaggagccgtaggaccccctggcttcgctggtgagaaggggccatcgggggaggcaggaaccgcaggtcccccaggtactccaggcccacagggcctccttggtgcccccggaatattggggctgcccggctcgcgaggcgaacgtggattacccggcgtagcgggtgctgtaggagagcccggacccctagggatcgcgggcccaccaggcgcacgaggaccgcctggtgcagtgggcagtcccggagtgaacggggcgccgggagaggcgggtagggatggtaatccagggaatgacgggcctcccggccgagacggacagcctgggcataaaggggaacggggttatcctggcaatatcggtccagtcggcgcggccggtgcacctggaccacatggccccgttgggccagctggaaagcatggaaacagaggagagacagggcccagcggaccggtggggccagcaggagcagtgggccccagaggtccatccggcccccagggcatcagaggggacaagggagaacccggcgaaaaagggccaaggggtctacctgggctgaagggccacaacggactgcagggcttgcccggaattgcaggtcaccacggtgatcagggagcacctggttcggtgggcccagctggccctcgaggcccggccgggccctcgggcccggctgggaaggacggccgtacaggccatccagggacagtgggccccgccggcatcagagggcctcagggtcaccaggggcccgcagggcccccagggcctccaggaccgcccggcccacctggggtctctgggggaggctatgattttggttatgacggtgatttctaccgcgcggaccaaccgaggtcagctccatcactgagacccaaagattatgaggttgatgcgacattaaaatcgctgaacaatcagattgagacactgctgacaccagaagggagtaggaagaaccccgcacgaacatgtagggatctccgactgtcccaccccgaatggagctctgggtactattggattgatccaaatcaaggatgtacaatggatgctattaaagtttactgtgacttctcaaccggggaaacatgcatccgagctcagccagaaaacatacctgccaaaaattggtataggtcatctaaggacaagaagcatgtttggctaggggagaccataaacgcagggtcccaatttgaatataatgtagagggcgtgacgagtaaggagatggcaactcagctggcatttatgcgtctactcgcaaattatgctagccagaacatcacataccactgcaagaacagcatcgcctatatggacgaagaaacaggaaacctaaaaaaggccgtgatcctgcagggctccaacgacgtcgaactagtcgcagaaggaaactcgcgcttcacttacaccgtgctcgtcgatgggtgctcaaaaaagacaaacgaatgggggaagacaattattgaatataagaccaacaagccctcccgactgccatttctagacattgcacccctggatatcggcggagccgatcaggaattctttgttgatatcgggcccgtgtgtttcaaa

SEQ ID NO: 1330 - DNA, 4098 bp, Artificial Sequence
  derived and/or modified sequence
atgcttagctttgtcgacactagaaccctgctgcttctggccgtgactctctgtcttgccacttgtcagagtctgcaggaggaaactgtgagaaaggggcctgcaggcgaccgaggaccccgcggagagcggggacctcccggtcccccaggcagagatggtgaggatggaccgaccggtcctcctgggccaccaggaccccctggtcccccagggcttggagggaacttcgcagcacaatacgacggtaagggtgtggggcttggaccggggccaatgggactcatgggtcctcgtggtccacccggggcagcaggagcacctggacctcaaggttttcaggggccagcaggtgagccaggggaaccaggtcagactggtccggcgggggcaaggggtccggccggcccgcccggtaaggccggagaagatggacatccaggaaaaccaggacgccctggcgagcggggagtcgtcggaccccaaggtgcacggggcttccctggaactcctgggcttcctgggtttaagggaatcaggggacacaatgggctggacggactcaagggtcagcctggcgcaccgggagtgaaaggagaacctggagcccccggcgaaaatggtaccccaggacaaactggtgctagagggctgcctggagaacggggtcgggtgggagcaccaggcccggcaggtgcaagaggctcagacggctcggtcgggccggtgggacccgcaggcccgattggatcggcaggtcccccaggattcccaggagctcccggtcccaaaggggagataggcgcggtgggcaatgctgggcctgcagggcctgctggcccacgcggagaagtcgggcttccggggctctcgggtccagtgggtccacctggcaaccctggagcaaacgggctgacgggagcaaagggtgccgccggactccccggagtggccggtgcgcctggtctgcctggtcctaggggaatccccggacctgtgggcgcggcaggagcgaccggagcgaggggacttgtgggagaacctggtccagctggatcgaaaggcgaatcggggaacaagggtgagccgggtagcgcaggaccacagggtccccctggcccgtcaggagaagaagggaagcggggtcctaacggggaggcaggtagtgcagggccaccaggtcctcctggcttgagaggttcgcctggatcaagaggccttcccggcgcagatgggagagcaggagtgatgggcccacccgggagccgcggagccagcggacccgccggagtccggggaccaaacggcgatgccggtagaccgggcgagcccggactgatgggccctaggggcctgcctggatcgccgggtaacatcgggcctgccggtaaggaaggtcccgtggggcttccaggtattgatgggcggccaggtccaataggtccggctggtgccaggggcgaacccggaaacatcgggtttcccgggccaaagggtcctacgggggatccaggtaagaatggtgacaagggccacgcaggacttgcgggtgcaagaggggcccctggtcccgatggtaacaacggggcacaaggacctcccgggccccaaggagtccaaggaggaaaaggagaacagggtccaccaggacctcctggatttcagggcctcccaggtccatccggaccggcgggcgaggtaggcaagcctggggaacgtggcctccatggcgagtttgggcttccgggtccggcgggaccccgaggtgagagagggcctcccggagaatcaggcgcagccggtcctactgggccaattggctcaagaggcccgagtggtccgcctggaccggatggaaacaaaggagaaccgggcgttgtgggagcagtgggaaccgcgggcccctcaggacctagtgggctccctggggagcggggtgcagccgggattcctggaggaaagggggaaaagggggaaccgggactgagaggtgaaatcggtaaccctggcagagatggcgcccggggagcgccaggagcagtcggtgcccctggccccgctggagcgaccggcgatcgcggcgaagcaggagccgctggtccagcaggacccgctgggcctcgaggctcgcctggtgaacgcggcgaagtaggacccgcaggacctaatggcttcgcaggcccggcgggggccgcaggacagcctggtgccaaaggcgaaagaggagcaaaaggtccgaagggagaaaatggtgtggtcggaccaacgggccctgttggtgcagcaggacctgcaggacccaacggtccaccgggtccagccgggagcagaggagacggaggtcctccgggaatgaccggattccctggagccgcaggaagaactggacctccgggcccatcaggaatctctggccccccgggaccacctggaccagctgggaaggaaggactgcgcggaccacggggagatcagggacctgtgggtcgtaccggagaggtcggcgccgtgggccctccagggtttgcaggggaaaagggacctagcggagaagcaggtacggcaggcccccctggtacccccggtcctcaggggcttcttggcgcgcctggtattcttggacttccaggttcaaggggagaacgcgggctgccgggagtggctggcgcggtcggcgagccagggcctctcggaatagccggccctcccggagcccgggggccaccgggggccgtgggatcacctggggtgaatggagcccctggggaggcgggaagggatggcaatccaggaaatgatggcccgcccggccgtgatgggcagccaggacataagggagaacgtggctacccgggaaacatcggaccagtgggggcagcaggtgcgcccgggccacacggacctgtcggaccagccggaaagcatggaaacagaggagagactggtccttccggacctgttggaccagcaggtgccgtcggaccacgcgggccctccggacctcaggggattcgaggagacaaaggagagccgggagaaaaggggccccgaggtctgcctggactgaagggccacaacggactgcaaggcctcccaggaattgccggtcatcatggtgaccagggagcccctggatcggtcgggcccgcaggccctcgcgggccggctggcccgtcgggccccgcagggaaggatggtagaaccggccacccaggaaccgtgggacctgccggaattaggggacctcagggtcatcaaggcccagcagggccacccggaccaccaggcccgccaggtccgccaggtgtgagcggcggaggatacgattttgggtacgatggagatttctacagagccgatcaaccgcggagcgctccatcactgcgcccaaaagattacgaggttgatgctacgctgaagtccctgaacaaccaaattgaaacgctcctcaccccagaagggagccgcaagaacccggcacgaacctgccgcgatttgaggcttagccatcccgaatggagctccggctactactggatcgaccctaatcaagggtgcactatggacgcaataaaggtgtactgtgatttttcgaccggtgaaacctgtattcgggcacaacccgagaatatccctgcgaaaaactggtatcggtcctccaaagacaagaaacacgtgtggttgggtgaaaccataaacgcaggttctcaatttgagtacaacgtggaaggggtgacttcgaaggaaatggcgactcaactggcttttatgcgtctgctcgcaaactatgcatcgcaaaacattacctaccattgtaagaactcgattgcttacatggatgaggagactgggaatctgaagaaggcagtgattttgcaaggatccaatgacgttgaactggtggcagaaggcaattcccgatttacttacactgtccttgtggatggatgttccaaaaagacgaatgaatggggtaagacgatcattgaatacaaaaccaacaaaccttcaagacttccattcttggacatcgccccactggacatcggtggagcagaccaagagtttttcgtggacattggcccagtgtgctttaag

SEQ ID NO: 1331 - DNA, 4098 bp, Artificial Sequence
  derived and/or modified sequence
atgctcagtttcgtggacacgcggaccctgttactcttagctgtcacactgtgcctcgccacctgtcagtctctacaggaggagaccgttaggaagggtcctgcaggagatagggggcccaggggagaacgtggcccccccgggccacctggccgcgatggtgaagatggtcccacagggccccccgggccccctggcccccctggcccccctgggttgggtggtaattttgcagctcagtatgatgggaagggcgtggggttgggaccaggacccatggggttaatgggccccagggggcccccaggtgcagcaggagctcctggtccgcagggtttccaaggaccagccggagagcctggtgagcccggccagactggaccagctggtgctcgcggacctgcgggacccccaggtaaggctggtgaagacgggcatccaggcaagcccggtaggcctggcgaacgcggcgtagtcggccctcagggggcccgcggatttcctggcacccctgggcttccaggttttaagggcattcggggacacaacggcctggacggcctcaaggggcagccaggcgcaccaggcgttaagggcgagccgggggcacctggggaaaacggaactccaggacagactggggcgaggggtctgcccggcgaaaggggccgggtgggagcacccggcccagccggagcaagaggcagtgatggaagtgtgggacccgtcggacccgccggccccattggatctgctggaccccccggctttcccggcgcccctgggcctaagggagagataggcgcggtggggaatgccggccccgccggccccgccgggccgcggggcgaggttgggcttccaggcctcagtgggccggtgggacccccaggcaatcccggcgcaaatggattgaccggcgctaagggggccgccggacttccaggagtggctggtgcccctggtttacccgggcctaggggaattcccggacctgtcggtgccgccggagccaccggtgctcgcggcctagtgggggagccaggacccgccgggtcaaagggagagagtggaaacaaaggggagccagggtcggctgggccgcagggtccccccggaccttcaggagaagagggcaagcgcggcccaaacggggaagctggctcagctggcccaccagggccccccgggcttcgaggttcgccaggttcccggggtctgcccggagctgacggtcgggccggagtgatgggtccacctgggtcaagaggagcctcaggacccgctggcgtgagaggtccaaatggcgacgccggacgcccaggcgagcctggcctgatggggcctcgcggcctcccaggcagccctggcaatattggccccgctggcaaagagggtcccgtgggacttccaggtattgatggcagacccgggcccattggccctgcaggggccaggggtgaacccggtaatatcggattccccggcccaaaaggccccacgggcgatccagggaaaaatggtgataaaggacatgcaggactggctggagccaggggagctcctgggccagacggcaataacggtgctcaaggtcccccgggccctcagggtgttcagggaggcaaaggcgagcaaggcccacctggcccaccaggattccagggactgcctggacccagtgggcccgcaggcgaggttggtaagcctggtgagagagggctccacggggaatttggacttcctgggccagccgggcctcgcggggagcggggcccaccaggcgagagcggcgccgctggtcccactggcccaataggtagccgcgggccatcgggtcccccaggacccgatggtaataaaggtgaacccggcgtggtgggagctgtgggaactgctggacccagcggcccttccggtttgcctggagaaagaggcgctgccggaatacccggcggaaaaggtgagaagggggagcctggtctccgaggagaaattgggaacccagggcgcgacggggcccgcggtgcgcccggcgcagtgggggcccccggcccagctggggcgacgggcgaccgcggcgaggcgggggccgctggcccagcaggtccagccgggccacgaggcagccctggtgagaggggcgaggtgggccccgcagggccgaacggtttcgctgggcccgccggcgcagctggacagcccggggctaaaggagaaaggggagctaaaggcccaaagggcgagaatggggtggtgggccccaccgggcctgttggagcggctggacctgcgggtcctaacgggcctcccggtccagccggctctcgtggagacgggggaccccccggcatgacaggattccctggggccgcaggccgcaccggcccacctggaccttctgggatttcgggcccccctgggcccccgggcccagccggcaaagagggcctgcgtggacctcgaggcgatcagggacccgtggggcgaaccggggaagttggtgccgtgggacctccaggcttcgcaggcgagaagggtccatctggggaagcgggcactgctggacctccggggactcccggaccgcaggggctcctgggcgcccctgggatactgggtctgcctgggagccgtggtgaacgggggttacctggcgtggcaggagcagttggggagcctggcccactcggcatcgctggacctcctggggcgcgaggcccgcctggggccgtgggtagtccaggcgtcaatggcgcgcctggtgaggctggacgagacggaaatcccggcaatgacgggccacccggaagggacgggcaaccaggtcataagggcgagcgcgggtacccaggtaatattggccctgtcggtgctgcgggcgcacccggaccccacggccccgtggggcccgcaggcaagcacggcaatcgaggtgagactggccccagcggccccgttggcccagccggggcggtgggcccgagaggtccttctggtccacaaggcatccggggagacaagggggaaccaggcgaaaaaggaccgcgaggcctgcccggactcaaggggcacaatggcttgcagggcctgcccggcatcgctggccaccacggcgatcagggcgctccaggatccgtcggtccagccggccctcggggtccggctggaccctccggccccgccggcaaggatggaaggaccggacatcctggtacagttggacccgcaggaattagaggaccccagggtcaccagggccctgcggggccgcccgggcctccaggcccgccgggaccacccggcgtttcaggcggtggctatgacttcggttatgatggtgacttctatcgcgcagatcagccgcgaagtgcacccagtctgcggccaaaggattatgaggtcgacgccaccctgaagagtctgaacaaccaaattgaaacactgttaacgcccgaagggagccgcaaaaatcctgcccgtacatgcagagaccttagattaagccaccctgagtggtcgtccggttactattggattgatcctaaccaggggtgcacgatggacgcgatcaaagtttactgtgatttcagtacaggcgaaacatgtatcagggcgcagccggagaatatccctgccaagaactggtatcgatcatcaaaagacaagaaacacgtgtggctgggcgaaactatcaatgcaggcagtcagtttgaatataacgtggagggcgtgacgagtaaagagatggcgacacagctggcgtttatgcgactgctcgccaactacgcttcccagaacattacatatcactgtaagaactccattgcatacatggatgaggaaaccgggaatctgaaaaaggcggttatcctgcaggggtcaaacgacgtggagcttgtggcggagggaaacagtcgattcacgtataccgtcttagtggatggctgttccaagaagaccaacgagtggggcaagaccattatcgagtataagacaaacaagccatcacgcctccccttcctggacatcgcacccttagacattggcggagcggatcaagaattctttgtagatatcggacccgtgtgttttaaa

SEQ ID NO: 1332 - DNA, 4098 bp, Artificial Sequence
  derived and/or modified sequence
atgctgtcctttgtggacacaaggacactgctactgctggctgttactttgtgtttggcaacctgtcagtccctccaggaagaaactgtcagaaaggggccagctggcgatcgcggccccaggggcgagagaggccctccgggtcctcccggccgtgacggagaagatgggccgacagggccccctggaccacccggacctcctgggccccctggactgggaggaaatttcgcagctcaatacgatggcaagggggtaggtttgggaccaggacccatgggcttgatggggccccggggcccccccggggcagccggtgcacctggccctcagggattccagggacctgctggcgagcctggggaacccggccagaccgggccggcgggcgccaggggcccggccggcccacccggcaaggcaggggaggacggacaccctggaaagcctgggcgaccaggggaaaggggagtagttggaccacagggcgcacgtgggttccctggtacacctgggctgcccggatttaagggcatcaggggccacaatggcttagacggcctgaagggccagccgggtgcaccgggggtcaaaggggaacccggcgccccgggtgaaaatggcaccccagggcagacaggcgcccggggcctgcccggagaaagaggacgcgtgggcgcccccgggcccgcaggtgcccgcgggagcgacggatcggtgggtcccgtggggcccgctggccctataggctctgctggcccaccagggtttccgggcgcccctggcccaaagggcgagatcggggccgtgggcaacgccggcccagccggacccgcgggaccaagaggcgaggtggggttgcccggcctctccgggcccgttgggcccccaggaaacccaggggcaaacgggctgaccggtgccaagggtgccgccgggctacctggggtggcgggagccccagggttgcccggtcctaggggtatcccaggccccgtaggggctgccggagccacaggtgctagggggctcgtgggagaacccggaccggcgggttccaagggggagtccggaaacaagggagaacccgggtccgccgggccacaggggccccccggcccaagcggggaggagggaaaacgggggcctaacggcgaggccgggtcagccggcccacctggcccccccgggttacgaggctcacccgggtcgcgaggtctaccaggggccgacggtcgggccggggttatgggcccacccggaagccgaggagcttccggacctgccggagtgcggggaccgaacggcgacgctggtagacctggtgagccagggttgatgggaccacggggcctgccaggaagccctggcaacattgggccggcgggaaaagaaggtcctgtagggctgccgggcatcgacggacggccaggacctataggtccggccggcgctagaggtgaacccggaaacatcggcttccctggtcccaagggccccacgggtgaccccgggaagaatggcgacaaaggccacgccgggctcgccggagcaagaggagcccccgggccagacggtaataatggtgcacaaggtcctcctggaccacagggagtgcagggaggaaagggggagcaaggccctccgggcccgcctggatttcagggcttacccggaccatccggtcccgctggggaagtcggaaagcctggcgagcggggtttacacggcgagttcgggctgccaggacctgccggtccacggggggaaagaggaccaccgggagagtctggcgctgccggccccaccgggccgatcggaagtcgcggcccttcggggccacctggtcccgatgggaacaaaggggagccaggggtggtgggagccgttggtactgcaggccctagtggaccatctggtctgcccggcgagcgtggggctgcaggtatcccgggagggaagggagagaagggtgagcccgggttaaggggagagatagggaaccccggacgcgatggagccaggggcgcaccgggggccgttggagcgcccggacccgccggggccaccggagacaggggggaggccggcgcagcaggccccgctggacccgccggacctagggggagcccaggggaacggggagaagtgggcccagcgggccccaacgggttcgctgggccagcgggggctgcaggccagcccggggcaaaaggcgagcggggtgctaaaggacctaaaggagagaatggcgtggtcggtccaacagggccagttggtgctgctggacctgccggccccaacggcccgccaggaccggcaggttcgcgaggcgatggcgggcctcctgggatgaccgggttccctggtgccgctgggcgaaccggcccccccggaccgtcagggattagtgggccccctggaccccccggtccagcagggaaagaaggcctcaggggccctcgcggcgatcaagggcccgtcggacggaccggagaggtcggcgcggttgggccccccggttttgccggtgagaagggcccctccggcgaggcaggtactgcgggtcctcctggaactcctggccctcaaggactcctgggggcgcccggcatcctcgggctccctggctctagaggggaacgcggattgcctggggtggcaggcgcagtgggggaaccgggccccctgggtatagcaggccctcccggagctagaggaccacctggagctgtgggttcgccaggtgtaaacggagcccctggagaggcggggcgggatggcaatcctggcaacgatggaccacctggtagagacggccagccaggacataagggcgaacggggatatcccggcaacataggccctgtgggagcggcaggcgccccaggaccgcatgggcctgtaggtcccgctggtaaacatggcaacagaggagagaccgggccgtctggccctgtaggaccagctggggctgttggacctagaggacccagcggaccacaaggcatcaggggcgataagggcgagccgggggaaaaaggtccgagaggcctccctggattaaaaggacacaacggcttgcagggcttacctgggattgctggccatcacggcgaccagggtgcacccggatctgtcggaccagccggaccaaggggaccggctgggccttcaggtcccgccgggaaggatggtaggacaggacatcctggcaccgtaggcccggccggcatccgagggcctcaggggcatcagggccccgcgggaccacctgggcctcctggcccgccggggccacccggtgtgagcggggggggctacgactttggatacgatggagacttttacagagctgaccagccgaggtcagctcccagcctccggccaaaagactatgaagtggacgctaccctcaagtctctcaataaccaaatcgagaccctattgactcctgagggcagtagaaaaaaccccgcaaggacctgtcgagacctgcgcctgtctcatccggagtggtctagcggctactactggatcgacccaaaccagggatgcactatggatgcgataaaagtatactgtgacttttcaaccggcgagacatgcatccgtgcccagcctgagaacattcctgccaagaattggtaccggagctctaaggataagaaacacgtttggctgggggaaaccataaacgctggcagtcaatttgaatataacgtggagggggttacgagcaaagaaatggccactcagcttgcctttatgcgcctcttagctaactacgcttcccagaatataacttaccattgcaaaaattcgatcgcctacatggatgaggaaacgggaaacctgaagaaggctgtgattttgcaaggctccaatgatgtggaactagttgctgaggggaactctagatttacctatacagttctggttgacggctgctctaagaaaacgaatgaatgggggaaaaccatcatagagtataagacaaataaaccgtctcggctgccatttctggacatcgccccattagacatcgggggtgctgatcaggaattttttgtggacataggtccagtgtgctttaag

SEQ ID NO: 1333 - DNA, 4098 bp, Artificial Sequence
  derived and/or modified sequence
atgctatcctttgttgacacaaggacactactcctccttgctgtcaccttatgcctagcaacctgccagagtctacaggaggagacagtgcggaaggggcctgcaggagatcgtggacccagaggcgagcggggcccccctggacctcctggtcgcgatggagaagatggaccaacaggccctcctgggcctcccgggccgcctggaccgcccggtttgggggggaattttgctgctcaatacgacggcaagggtgtcggtttagggcccgggcccatgggtcttatgggaccccggggccctcccggcgcagcaggtgccccgggcccccagggattccagggccctgcaggagagcccggcgagccaggccagactggacctgcaggagctagaggcccagctggcccgcctgggaaagccggggaggatggccaccccggcaagcctggccggcccggtgagaggggagtggtgggtcctcagggcgctagagggttccctggtactcccgggctaccaggttttaaagggatacgggggcacaatggcttggatgggcttaaaggtcagcccggagcccccggagtcaagggggagcccggcgcccctggggaaaacggcaccccaggtcagactggtgcccggggattgcccggtgagagaggcagggttggtgcacccggtccagcgggcgcaagggggtctgacggctcagtgggccccgttgggccggccgggccaattggcagtgccggccccccgggattcccaggggctcctggaccaaagggcgagattggggcggtcggtaatgcgggccccgccggaccagccgggcctcgtggagaggtaggtcttccaggtctctccggtcctgtcgggccaccaggtaacccaggggcaaacggactgactggcgcaaagggtgcagccggactccctggcgttgcaggggcccccgggctgcctggaccccgagggataccagggcctgtgggggccgccggggctaccggagcccggggattggtgggtgaacccggacccgcggggtctaaaggagagtcaggtaataaaggcgaaccaggcagtgccggacctcagggtcccccagggccatcgggggaggaaggcaagaggggacctaatggtgaggctgggtctgcgggaccccccgggccaccaggtctgcgtggaagccccggcagcagggggctgccgggcgcagacgggcgagctggggtcatgggcccaccaggatctagaggcgcgtctggccctgcaggggtcagggggccaaacggagatgccggcaggcccggtgaacccggattgatgggcccacggggactgcccgggtcgcctggcaatatcggacctgccggtaaggagggtcccgttggcttaccagggattgacggaagacccggacccattggccccgccggcgcacggggggaaccgggaaacattgggtttcccggaccgaaaggccccaccggggatccagggaaaaacggagataaagggcatgcgggcctcgctggtgcccgcggcgcccctgggcctgatggcaataacggagcgcagggtccccctgggcctcagggagtgcaggggggaaaaggggagcagggaccacctggcccacctgggtttcagggcctgcccgggccgagtggtccagcaggggaagtaggcaagcctggggaacgcgggctgcacggcgaattcggtctcccaggacccgcgggtccacgcggcgagcgagggccaccaggagagtctggggcagccggacctacaggccctataggctctaggggcccttccggccctcccggaccagacgggaacaaaggcgagccaggcgtagtgggggccgtgggcactgccggcccatcggggccatcaggtcttcctggtgaacgaggagccgcaggtatcccaggagggaaaggagagaaaggagaaccagggctgcgcggcgaaataggtaatcccgggcgagacggcgcaaggggagcgcccggtgcggttggagctccagggcccgccggtgctaccggggatcgaggcgaggccggagcggcgggacccgccggcccagccggacctaggggcagtcccggagagaggggtgaggtagggcccgctggacccaacggctttgcagggccagctggcgcggctggccagcccggtgctaaaggcgagaggggcgctaagggccctaaaggtgagaacggcgttgtcggacccaccgggccggttggcgcggctggcccagcaggcccaaatggcccgccaggaccagccggctcccgcggtgatggagggcctccaggcatgaccggatttcccggcgctgcaggacgcactgggcccccggggccaagcggaatttctggccctcctggaccgccaggcccagcaggcaaggaaggattgagaggtcccaggggcgaccaggggccagtgggccggaccggggaggtgggtgctgtggggccacctggatttgctggagagaagggccctagcggagaggccggcacggctggtcctccgggaacccctggtccacagggactgttgggagccccagggatcctcggactgcctggatctagaggggagcgcgggctgccaggggtagcgggcgccgtgggcgagccagggccgctggggatcgcaggcccaccgggagctagaggcccaccaggggcggtgggatcgcctggggtaaacggggcccctggcgaggcaggaagggacggtaatcccgggaatgacggacctcctgggcgtgacggacagcccggacataaaggagaacgtggttacccgggcaatattggccccgtgggagcagccggcgcccctgggcctcatggccccgtagggcctgcagggaagcatgggaatagaggtgaaacagggcctagcggacctgtaggccccgccggagcagtggggcccagaggcccgagcggccctcaaggcattaggggcgacaaaggggaacccggggagaaggggccaagaggactgcccggacttaagggtcataatggactgcagggccttccagggatcgcagggcatcacggagaccagggtgcgcctggatcagtgggccccgccggaccccgggggccagcgggtccttccggaccagctggtaaggacggtcggactggccatccagggactgtgggtcccgccgggatccgcggtccccagggccaccagggccccgcaggcccccctggccccccaggtccccctgggccaccgggtgtgtcggggggcggttacgacttcggatacgatggcgatttctatcgcgcggatcaacctcggagtgccccatcactacggccaaaagactacgaggtcgatgcaaccttgaagtctctgaacaatcagattgagactctgttaacacccgaaggctcacggaaaaaccccgctcggacctgccgggatctgcgtctgagtcaccccgagtggagtagcggatactactggatcgacccgaatcaaggctgcaccatggacgctatcaaggtgtattgtgatttttctaccggagaaacctgcatcagagcccagcccgagaacatccctgccaagaattggtacagaagctcaaaggacaagaaacatgtgtggctgggcgagaccataaatgctggcagtcaattcgagtacaatgtggagggagtaactagcaaggagatggctacacagttggcttttatgcgattgctcgcgaactatgctagtcaaaacatcacctaccactgcaagaattctattgcttacatggatgaggagaccggcaatttaaaaaaagccgtcatattacaggggagcaatgacgttgaactcgttgctgaagggaacagccgctttacctacaccgttctcgtggatggctgctctaaaaagacaaacgaatggggaaagaccatcatcgagtacaagacgaacaaaccaagccgacttcccttcctggatattgcccctttggatattggtggggccgatcaggaattctttgtggacattgggccagtgtgttttaaa

SEQ ID NO: 1334 - DNA, 4098 bp, Artificial Sequence
  derived and/or modified sequence
atgctgtcctttgtggacacgcgcactcttctcctgcttgccgtcactctttgcctcgctacctgccagtcgctgcaagaggagactgtgcgcaagggaccggccggcgatcgcggacctcgcggcgaacggggtccaccgggacccccgggaagggatggggaggacggacctactggtccccctggaccgccagggcctccgggcccgccgggcctcggaggaaatttcgcggcacaatacgatggaaagggcgtgggcctgggaccgggtccaatgggactgatgggaccacgggggccgccgggggccgctggagcaccgggcccgcagggcttccaaggcccggcaggagagccaggagaaccgggacaaaccgggccggccggagctcgaggtccagcagggccgccaggaaaagccggagaagatggacacccgggtaaaccgggacgccccggagagcgcggtgttgtgggaccgcagggagcccggggctttccggggacccctgggctcccaggcttcaagggaatcagagggcataacggtctggacggactgaagggacagccgggcgcaccgggcgtgaagggcgaacctggggcgcctggtgaaaacggaactcctgggcagaccggagccagaggactgcctggagagagggggcgcgtgggagcgcctgggccggccggtgccagggggtcagacggaagcgtcgggccagtcggtccagccgggccgattggctccgctgggcctcctggatttccgggggcacctggaccgaagggagaaatcggcgcggtcggaaatgcgggcccagcagggccagcgggaccaagaggagaagtgggactccccggtttgtctggaccagtgggaccaccaggcaatccgggggcaaacggactgactggggccaagggagctgcgggcctgccgggcgtcgccggcgcccccggactcccgggtccgagaggaatcccaggtccggtaggcgcagcaggcgcgaccggcgcgcggggtctggtgggggagcctgggccagcaggttcaaagggggaatcgggaaacaagggtgaaccaggatcagccggacctcagggacccccaggtccgagcggagaagaagggaaacgggggccgaacggtgaagctggcagcgccgggccgcccggtccgccgggactgcgcggatcccctgggagtcgcggcctcccaggtgccgacggtagagctggtgtcatgggccccccaggatcccgaggcgcctccggccccgccggggtgcgagggcccaatggagacgcgggtaggccaggcgagccaggtctgatgggtccacggggcctgccaggtagcccgggtaatatcggacctgcagggaaggaaggaccggtcggcctgccaggcatcgacggacgcccgggtccaatcggcccagccggagctcgtggcgaaccgggcaacatcggcttcccgggccccaaaggccctaccggggaccctggaaagaatggagacaaaggacacgcaggactcgctggagcgcgcggagcgccgggccctgatggaaataacggagctcaggggcctcctgggccacaaggtgtgcagggtggaaaaggcgaacaaggacccccaggcccgccgggattccagggactcccgggaccttctggcccggccggagaggtgggaaagccgggagagcggggactccacggcgaattcggcctgccgggtcccgccggacccaggggcgagcgcggaccgcccggagagtcgggcgccgcgggtcccacgggcccgattggaagccgggggccatccggcccacctgggccggacggaaacaaaggagaacctggcgtggtgggcgctgtgggaacggccgggccaagtggaccgtccgggcttccgggtgaaagaggtgccgcaggcatcccgggaggtaaaggcgagaagggagagcctggactcagaggagagatagggaatcctggacgggacggagcgcgaggagctccaggtgctgtcggagctccggggccagcgggggctaccggtgaccgcggagaggcgggcgcagcggggcccgctggaccagcgggtccacgcggctcccctggcgaacggggagaagtgggtccagccggcccgaacggattcgccggtccggcaggtgcggccggacagccgggagctaagggtgaacggggggctaagggcccaaagggcgagaacggagtggtggggcccacgggtccggttggcgccgcagggccagctggtccaaatggacctccagggccggccggctcaagaggcgacggaggaccgcctggaatgactggctttcctggagcagcgggccgcaccggacctccgggccctagcggcatctcaggacctccgggtccaccagggcctgcaggtaaggaggggttgcggggcccgcgcggcgatcaagggcctgtgggaagaacgggcgaggtcggagcagttgggccccccggtttcgctggagaaaagggaccgtctggggaggcgggcactgcgggaccgccggggaccccgggtcctcaggggctgttgggagccccgggcatcctgggtctgccaggctcgcgcggagaacgtggcctcccgggggtggccggagccgtaggagagcctgggccgctgggaatcgccggaccacctggggccagagggccgcccggagccgtgggaagcccaggtgtgaatggggcaccgggagaagcaggaagagacgggaacccgggaaacgacggccctccaggacgggatgggcagcccggacataagggggaacgcggatacccaggcaacatcggtcctgtgggtgcagccggagcccctggcccccacgggcctgttggaccggcgggcaagcacggcaacagaggcgaaaccggaccgtcagggccggtcggaccggccggggccgtcggccctagaggtccctccggaccgcagggtatccgcggcgataagggggagcccggagaaaaaggaccgcgaggtttgcccggcttgaagggacataatggacttcaaggccttccaggaatcgcagggcaccatggagatcagggagcccctggatcggtgggaccagctggaccccggggaccagcgggaccgagcggccccgcggggaaggacgggcgaacgggacacccgggaactgttggacccgcgggtatccggggtcctcaaggccaccaaggaccggccggaccgcctggcccacctggtccaccgggccctccaggcgtctccggtggaggatatgacttcgggtacgacggagacttctaccgagcagatcagccaaggtccgccccgtcactgcgaccaaaggactacgaggtggatgcaactttgaagagcctcaacaatcaaatcgaaactctgctgactccggagggatctcggaaaaaccctgctagaacctgcagggatctgcgcctctcgcacccagagtggtcgtcgggatactactggatcgatccgaaccagggctgcaccatggatgcgatcaaggtgtactgcgacttttcaaccggggaaacctgtatccgggcgcagccggaaaacattccggcaaaaaactggtatcgctcaagcaaggataagaaacacgtgtggttgggagaaaccatcaacgctggatcgcaatttgaatacaacgtggagggggtgacttcgaaagaaatggcaactcagctcgcgttcatgcgcctcttggctaactacgcctcccagaacataacttaccactgtaaaaactcaattgcctacatggatgaagaaaccggtaatctgaagaaggccgtgatcttgcagggctccaatgacgtcgagctcgtcgcagagggaaatagccggttcacttacaccgtactggtggatggatgctcgaagaaaactaacgaatggggaaagactattatcgagtacaaaacgaacaagccatcccggctcccattcctggacatcgccccactggatatcggcggagctgaccaagagttcttcgtcgacattggaccagtgtgtttcaag

SEQ ID NO: 1335 - DNA, 4098 bp, Artificial Sequence
  derived and/or modified sequence
atgttgagcttcgtggatacgaggactcttcttctcctcgctgtgacgctgtgcctggctacctgtcagtcactccaggaagagacagttaggaaaggcccagcaggagatagaggcccaaggggagagcgcgggcctccaggccctcctggtcgggatggagaagacggcccaaccgggccccccggcccaccaggaccaccggggccccccgggcttggcgggaactttgcagcacagtacgacggaaaaggcgtgggactgggccctggcccaatgggcctcatggggcctaggggaccccctggcgctgccggcgcacctggcccccaagggttccagggacctgctggcgagcccggggagccagggcaaacaggacctgccggagctcgaggccccgcaggccctccagggaaggccggagaggatggtcatcctggcaaaccgggcaggcccggtgagagaggtgtagtaggcccccagggggctaggggcttccctggcacacctggcctccccgggttcaaaggcattcgtggacataacggtttggatggactgaaaggacaaccaggcgcacctggcgtgaagggtgagcccggtgcacccggtgagaacggtactcctgggcaaaccggtgcacgcggcttaccaggggagcgcggaagggtgggcgcccccggcccagcgggggctcgcggctctgatggcagtgtaggacccgtgggacctgctggtccaatcggcagtgcgggacccccaggctttcctggagctcctggccccaaaggagaaatcggagcggtcggtaacgcaggacctgccggccccgcagggccaaggggcgaggtcggcctgcccggtctgtcaggccctgttggcccccccggtaatcccggcgctaacgggctgaccggggctaagggcgctgctggtctccccggagtggctggggctcccggactgccagggccacggggaattcctggccctgtcggggcagctggggcaaccggagccagggggctcgtcggagagcctggaccggccggctcaaagggggagagcggaaacaaaggcgagcctggatcagccggccctcagggcccccctgggcctagtggcgaggaaggaaaacgaggtccaaacggagaggcaggcagcgctggaccacctggacctcccggacttagaggcagcccaggcagcaggggcctgccaggggccgatggaagagcaggagtgatgggtccaccggggagccggggcgctagtggccccgcaggcgtacgcggccccaatggagacgctgggaggcccggagagcccgggctcatgggcccacgtggactgccagggagtccaggcaacattggccccgctggcaaagaaggacccgttgggctgcccggcatcgacgggaggcctggacctataggcccagctggcgcaaggggagaaccaggcaacattggcttcccgggaccaaagggtccaaccggggaccctgggaaaaacggagacaaaggccatgccggactggctggcgctaggggggcccctggacctgacggaaataacggcgcacaagggccaccaggaccccagggagtgcagggaggtaagggcgaacagggccctcccggcccgcctggtttccagggactccctggaccaagtgggccagcaggcgaggtgggcaaaccgggcgaacgcggcttgcatggagagttcggactaccaggacctgctggtcctagaggagaaagaggcccacctggggagtcaggagcggccgggccaacaggaccgattggatcacgcggccctagcggccccccaggccctgatggtaacaaaggggaaccaggagtggtcggggctgttggaacagcaggccctagtggaccgtcaggtctccctggcgaacggggagctgctgggatcccgggcggtaaaggcgaaaagggggaaccaggcttacgcggggaaataggcaacccgggcagagatggagcccgcggagctcctggagccgtgggagctcctggcccagcaggcgctaccggggacagaggcgaggctggcgctgcagggcccgcagggccagccggaccccgtgggagtccaggggaacgcggagaggtgggcccggctgggccaaacggatttgcgggaccagcaggagcagcaggccagcctggagctaaaggcgaacggggagcaaaaggtccaaaaggggaaaacggtgtggtgggcccaaccggaccggtcggcgcagcaggacctgccgggccaaacggtcctcccggtcctgccggaagcaggggggacggtggtccgcccgggatgaccggctttcctggggcagctggacgaacggggccaccaggcccatccggcatttctggtccgccgggtcccccaggacccgctggaaaggaaggattgagagggcccaggggagaccagggaccagtgggacgcactggagaggtgggcgctgtggggccaccaggattcgcgggtgaaaaaggcccgagcggcgaggccgggacagcaggtccacctggaacacccggcccccaagggctgctgggagcaccgggcatattaggactcccgggatctagaggtgaaagaggacttcctggggtggcaggtgctgtcggggaacccggccctcttggcatagctggaccccctggggcccgcggaccgcctggagcggtgggcagtcccggagttaacggagcccccggagaagcgggccgagatggtaaccccggaaacgacggtcctcctggaagagatggacaaccaggacacaaaggagagcgcggttaccccgggaacatcggacctgtaggcgctgctggagcaccaggacctcatggccctgtgggccctgcagggaagcatggcaaccggggtgaaacaggccctagtggtcccgtaggacccgctggggctgtcggaccacggggtccatcaggtccacagggtattaggggcgataaaggagaacccggggaaaagggcccaagaggcctgccaggcttgaagggccacaacgggttgcagggactacctggaatcgcaggacaccacggtgatcagggagctcctggcagcgtgggtccagcgggaccaagaggaccagcaggacctagcggaccagcaggaaaagatgggaggaccggacatcctggaacggtcggtcctgctgggatccggggccctcaggggcaccaaggacccgctggaccccccggccctcccggccctcccggtccacccggagtgtctggtggtgggtatgattttgggtacgatggggatttctatagagccgatcagccccgcagtgccccgtcgctgagacctaaggactatgaggtggatgctacgcttaagagcttgaacaaccagatcgagaccttactgacacccgagggctccagaaagaacccagcgagaacctgccgtgatcttaggctgtcacatccagagtggagttctggatactactggatcgatccaaaccagggatgtacaatggatgctattaaagtgtattgtgacttctctaccggtgagacttgcatcagagctcaaccagaaaacatccccgcaaaaaattggtacaggagcagtaaggataagaagcacgtctggctcggagagacaataaatgctggcagccagtttgaatacaatgtcgaaggagtgacaagtaaagagatggcgacccagttggcattcatgcggcttctggcaaactacgcatcccaaaacattacataccattgtaaaaactctatcgcttatatggatgaggagaccgggaacctgaaaaaagcagtcatcctgcaaggcagcaacgacgtcgagctggtcgctgaagggaactcccgcttcacttacaccgtcctggtggatggctgtagcaagaaaaccaatgaatggggaaaaaccataatagagtacaaaaccaacaagccttctagacttccatttctggatatcgccccattggacatcggtggagctgatcaggagttctttgtcgacatcggacctgtgtgctttaaa

SEQ ID NO: 1336 - DNA, 4098 bp, Artificial Sequence
  derived and/or modified sequence
atgctgtcattcgtggatactcggacgctgctgctgttggctgtgactctctgccttgccacctgccaaagcctccaggaggagactgtgcgcaaaggccctgcgggtgatcggggcccgcgtggtgaacggggaccccccggccctccgggacgggacggagaggatggccctaccggtccaccagggccgccgggtccccccggaccaccaggattgggagggaacttcgcagcccaatacgatgggaaaggagtcggcctcggcccagggcctatgggactcatgggtccaagaggtccccctggcgcagcgggagcgccaggaccacagggattccaaggacctgcgggagaaccgggggagccgggacagactggcccggccggcgccagaggcccagccggcccacccgggaaagcgggagaggacggtcatccaggcaagcctggacgccccggtgagcgtggagtggtgggaccccaaggagcgcggggtttcccgggaacgccgggactgcctggttttaagggaatccgcggccataacggactggatggattgaaagggcaaccgggggcgccgggtgtgaagggcgaaccgggagcaccaggagagaacggcaccccgggtcagaccggagcgaggggacttccaggtgagcggggccgcgtcggtgcgccagggccagcaggggctcgcgggtccgacggcagcgtcggaccagtgggtcctgccggaccaatcggctctgctggaccacccggctttcccggagccccgggaccgaaaggtgaaattggagcggtcggcaatgccggaccagcgggccccgccggcccgcgcggtgaagtgggactgcccggtctgtccggaccggtcggtccaccggggaacccgggagcaaatggactcacgggggctaaaggcgcggcgggattgcctggagtcgctggagccccaggcttgccgggaccacgcggaatccctggaccggtgggagcagccggagctactggcgcccgcggtctggtcggagaacccggacccgccggctccaagggtgaaagcggaaacaagggagagcctgggtcggccggcccgcaagggcctccgggaccgagcggagaagagggcaagcgaggacccaacggagaagccggctcggcagggccaccaggtcccccagggctccgcggttcgccaggcagcagagggctgcccggagcagacggacgggcaggtgtgatgggacccccggggtcacgtggggctagcggccctgcaggcgtgcggggaccgaatggcgacgctggccgccctggcgaacctggactcatgggacctcgagggctcccgggctctccaggaaacattggacccgctggtaaggagggcccggtgggcctcccaggtatcgatgggcgcccaggaccaatcgggcctgcgggcgcgcgcggcgaaccgggcaatataggcttccccggaccgaagggtccaacgggggacccggggaaaaatggcgacaagggacacgctggactcgccggggcccggggtgccccgggccctgacggcaacaacggagcacagggcccgccaggaccccagggagtacagggcgggaagggagagcaaggcccgcctgggcctccgggctttcagggactcccaggaccgagtggaccagcgggggaagtcgggaagccaggcgaacgagggcttcacggcgaattcggactgcctggaccggcgggaccgaggggagagcggggtccgcccggtgaatcgggggccgccggcccgaccggcccgatcggatcgcggggcccatccggaccacctggaccggatgggaacaaaggtgagccaggagtcgtcggcgcggtcggaactgcaggaccatcaggaccatctgggctgccgggagagaggggagcggccggaatccccggaggaaagggtgaaaagggtgaacccgggctgcggggagaaatcggaaatcccggcagggacggagcccgcggagcaccaggcgctgtgggagcccctggaccggctggagcaactggtgatcgcggagaggcgggtgccgcaggcccagcaggacccgctggcccaagagggtccccaggagagcgaggtgaggttggacctgccggtcctaatggatttgctggacccgccggagccgctggtcagccgggagccaaaggggaaagaggagcgaaaggccctaagggcgaaaacggcgtggtcggccctaccgggccagtgggggcagccggacctgcaggacctaacggaccgccggggccagctggatcccggggagacggaggaccccctggtatgaccggcttcccaggagccgccgggcgaactggcccccctggaccctcgggcatcagcggtcccccaggcccgccaggtccagccggcaaggagggccttcgtggcccgagaggggatcaaggtccagttggacgcaccggagaagtcggagctgtcggtccgccaggatttgcaggtgagaagggaccatcgggagaggccggaaccgctggcccgcccgggaccccgggaccacaggggctgctgggagccccgggcatcctcggcctcccgggctcgaggggggaaagaggtttgcctggagtggcgggcgcagtgggggagcccgggccactgggcatcgcgggaccgccaggagcccgcggtcctccgggggccgtgggatcccctggggtgaatggcgccccgggcgaagcgggccgcgatggaaacccaggaaacgacgggcctccggggagggatggacagccggggcataagggcgagcggggctatccgggtaacatcggtccggtgggtgctgcgggagctcctggcccgcacggtcctgtgggtccagccgggaagcatggaaatcggggagaaaccggacccagcggtccagtgggtcccgcaggggccgtcgggccacgcggaccttccgggccgcaggggattcggggagacaagggggagccaggtgagaaaggcccgagaggactgcccggccttaaaggacacaatggcctccagggtctgccgggaatcgcggggcaccatggagatcagggggcaccaggttcagtcggtccggccgggccgcgggggccagcaggaccatccgggccggccggaaaggacggaagaaccggtcacccgggaactgttggcccggcgggcatcaggggcccccaaggacaccagggtccagctggtccccctggtcccccaggaccgccaggtcctccaggagtgagcggaggaggctacgacttcggatacgacggagacttctaccgggcggatcaaccgcgttcagcgccgagtctgcgccctaaggattacgaagttgatgctaccctgaagagcctcaacaatcagatcgagactctgctgactccggaaggatcgagaaagaatcctgcccgcacttgccgcgaccttcgcctctcccatccagaatggtcgtccggatactactggatcgacccgaaccaaggatgcactatggacgcaatcaaggtgtactgtgacttcagcaccggtgaaacctgtatccgggcgcaacctgaaaacattccggccaagaattggtaccgctcgtcaaaggacaagaaacacgtctggctgggggagactatcaacgctgggtcacagttcgagtacaacgtggaaggagtgacgtcgaaggagatggctacccagctggcctttatgaggctgctggccaactacgcctcgcagaatatcacctaccactgcaagaacagcattgcctacatggacgaggaaactggaaacctgaagaaagcagtcatactccagggctctaacgatgtcgaactggtggctgaaggcaattcaagattcacgtataccgtgctggtggatgggtgctcgaaaaagactaatgaatggggaaagaccatcatcgaatacaagactaacaagccatcgcggctgccgtttcttgatattgctccgctggacatcggtggcgctgaccaggaattcttcgttgacatcggaccagtgtgctttaag

SEQ ID NO: 1337 - DNA, 4098 bp, Artificial Sequence
  derived and/or modified sequence
atgctcagctttgttgacactaggaccctgctgcttttggctgtgactctttgtctggcaacctgccagtccctgcaggaagaaaccgtgcggaaaggtcctgcgggagatcgggggcctcggggtgaacgcgggccaccaggcccacctggccgggacggagaggacggacctaccggaccacccggccctccggggcctccagggccacccggactcggaggaaatttcgcggcccagtacgacggcaagggtgtgggactgggcccgggaccgatgggactgatgggtcctcggggccccccgggagcagccggggccccaggcccacagggtttccagggtcccgctggcgagcccggtgagccgggccaaaccggaccggctggggctcgcgggccggccggaccgcctggaaaagccggcgaggatggacatccgggcaagccgggacgaccgggcgagcggggagtcgtgggacctcagggtgccagaggattcccaggaacgccaggcctgcccggattcaaggggatcagaggacacaatggcctcgacgggctgaaggggcaacccggagctcccggcgtcaagggggagccgggcgcaccgggggaaaatggtaccccgggacagactggagcccgtggtctgccgggagaacgcggacgcgtgggtgccccgggaccggccggagcccgcggaagcgatggctccgtggggcccgtgggaccggcaggcccaatcggtagcgccggccctccaggtttcccaggggccccagggccgaaaggcgagatcggagctgtgggcaatgcgggccctgccggaccggcggggccacgcggtgaggtgggcctgccaggcctgtccggaccggttggtccgccagggaatccaggggcgaacggtctgaccggagctaagggtgccgctggactgcctggagttgccggagcgcccggactgcctggtcctcgcgggattccgggcccggtgggtgccgccggcgcgacgggtgcccgcggcctggtgggagagcccggcccggccggatcaaagggagaatctggaaacaaaggggagccaggaagcgcgggaccccagggaccgccgggtccatcgggcgaagaaggcaagaggggacctaacggcgaagccggatccgcaggacctcccggtccacctggactccggggctcgccggggtcgagaggactccctggcgcggacggaagggctggagttatggggccgccaggctcccggggagcgtcaggaccggccggcgtgcgcggccctaacggcgacgcaggacgcccaggagaaccagggctcatgggaccccgcggcttgccaggatctcccggtaacattggacccgcaggaaaggaaggcccggtcggattgccgggaatagacggtcggcccggcccgattgggccggctggtgcccgtggcgagccggggaacatcggctttccaggtccaaagggcccgaccggcgatcccggaaagaatggcgataaaggtcatgccggcctggcgggcgcccgtggagcccccggaccggacggaaataacggggcccaagggcccccgggaccgcaaggcgtccaagggggcaaaggggagcagggaccgcctggcccccctggatttcagggcttgccgggaccatcaggtcccgccggagaagtcggaaagccgggggagcgcggactgcacggtgaattcggacttccaggtccggcaggccctagaggcgagagaggtcctcccggagaatcgggagctgccggccctactggaccgatagggtcacgcggcccgtcgggaccgccaggacctgatggaaataagggagaaccgggcgttgtgggcgccgtcggtactgcaggaccatccggcccaagcgggcttccgggcgagcgcggtgcagctggaatcccgggtggaaagggggagaaaggagagcccggtctgcggggagaaattggaaatccaggacgggatggagcccgcggcgcccctggagcggttggcgcccctggtccagcaggcgcaacgggcgacaggggagaagcaggcgctgccgggccggcgggaccagccgggccccggggttccccgggcgaaaggggagaggtaggcccagcgggaccgaacggattcgccggcccagccggcgctgctggtcagcctggagccaagggtgaacggggtgcgaaaggaccgaagggtgaaaacggtgtcgtgggcccgactggccctgtgggcgcggcaggaccggcaggaccgaacggtccgccgggaccggctggtagtcgcggagatggaggcccacccggaatgacgggtttcccgggggccgccggccgcactggcccgcctggaccgagcgggatctcgggacctccaggcccaccagggcctgcgggaaaggagggcctgcgaggaccgcgcggggaccaaggcccagtgggacgcaccggcgaggtgggggcagtcggcccgccgggatttgccggggaaaagggaccgtcaggagaggccggaaccgcgggtcccccaggaaccccaggaccgcaaggactgcttggagcgcccggtatcctcggacttcccggatctcgcggagagagaggcctgccgggggtggcaggagcggtcggcgaaccgggaccgctgggaattgccggccctcctggcgctagagggccgccgggggcggtgggatcaccgggagtgaacggagcgccgggagaagccggacgggacgggaatcctggaaacgatggtccccccggtcgggatggacagccagggcataagggggaaagaggctacccgggaaacatcggaccagtcggggcggcgggagcaccgggaccgcacggtccggtggggcctgctggtaaacacggcaacagaggagaaactggaccgtctggacctgtgggtccggcgggcgcagtgggaccacgggggccgtccggaccacaaggtattcggggggacaagggagagccaggagaaaagggcccacggggactcccgggactcaagggacataacggactgcagggactccctggtatcgcgggacatcatggtgaccagggagcacccggcagcgtgggacccgcagggccgagggggccagcagggccctccgggccagcgggaaaggatggtaggaccggacacccgggcaccgtcgggccggctggaatcagagggccgcagggacaccaggggcccgcaggtccccctggacctcctggaccgcccggtccgccaggagtatccggtggaggctatgactttggctacgacggggacttctaccgcgcggatcagccgcgctcagcaccaagcctgcgccctaaagactatgaagtagacgctaccctgaagagcctcaacaaccaaattgaaactctgctcacgccggagggttcgcggaaaaacccggcccgcacttgtcgagatcttagactgtcgcacccggaatggtcgtcggggtactactggatcgacccaaaccaaggatgcaccatggatgccatcaaggtctactgtgatttctccaccggagaaacgtgcatccgggctcagccagaaaacataccagcgaagaattggtacaggtcctccaaggacaagaaacacgtctggctcggcgagactatcaatgccggcagccagttcgaatacaacgtcgaaggagtgacttcgaaggagatggccactcagctggccttcatgaggttgttggcgaattacgcttcacaaaacatcacctaccactgcaagaacagtatcgcatacatggacgaagaaaccggcaacctgaaaaaggctgtgatcctccagggatcgaacgatgtggagctcgtggccgaaggaaactcgcgattcacctacactgtgctggtggacgggtgcagtaagaaaactaatgagtggggtaagaccatcatcgagtacaagaccaataagccgtcacgcctcccattcttggatatcgcgcctctggatatcggaggagccgaccaagagttcttcgtggacatcgggccggtgtgctttaaa

SEQ ID NO: 1338 - DNA, 4098 bp, Artificial Sequence
  derived and/or modified sequence
atgttgtcatttgtggacactcgaaccctgcttctgttggccgtcactttatgccttgcaacatgtcagagtctacaggaagaaacagtgagaaagggacctgccggtgatagaggtccgagaggagaacggggaccgcctggaccgccaggaagggatggagaagatggacctactgggccaccgggaccacctggacccccgggaccaccaggacttggaggaaacttcgcagctcagtacgatgggaagggggtcggtcttggtcctggtcctatgggattaatgggacctcgagggccgcctggagccgctggagctcctggaccgcagggatttcaaggtcccgcaggagaacctggagaaccgggacaaacaggaccggccggagcacgaggacctgctggacctcctggaaaagccggagaggatggtcacccaggaaaaccaggaaggccgggagaacggggagtagttggaccccaaggagccagaggattccctggcactccgggcttgccaggatttaagggcattagaggtcacaacgggttggacggattgaagggacaaccaggcgcgccaggtgtcaagggagaaccaggagcaccaggagaaaacggaactccaggacaaacgggagcacggggcttgcctggtgagcgcggaagagtcggcgcgccaggaccagcgggagctagaggatcggatggatctgtgggtcctgttggacccgctggaccaattgggtcagctggaccgccaggtttcccaggagcacccggacctaaaggtgaaataggcgctgtcggaaatgcaggaccagcgggtccagctggaccacgaggcgaagtaggactgccagggctttctggtccggttggtccaccaggaaatccaggggctaatggtttgacaggcgcaaagggagctgctgggttgccaggagttgcgggagcgccaggtttgccgggtccacgaggcattccaggaccagtaggagctgcaggagcaaccggagcccgcggactggttggagaacctggacccgctggctctaaaggagaatctggaaataagggagagccaggatccgcgggaccgcagggacctccaggaccgtcgggagaggagggtaagcgtggtcctaacggagaagcagggagtgctggaccgccaggaccacctgggctccgcggatcaccgggttctagaggtctgccaggagcagatggacgtgctggagtaatgggtccaccgggatcgagaggggcttcaggtccggcgggtgtgcgaggacctaacggtgatgctgggcggccaggtgagcctggcttaatgggcccaaggggacttccaggatcaccaggtaacattggaccagccggaaaagaaggtccagttggcctccctgggatcgatggacgcccaggaccaattggaccggcgggtgctagaggagagccgggaaatatcggatttccaggaccaaaaggaccaacaggagatccaggaaaaaatggagacaagggtcacgcaggattggctggggcacgtggagcaccaggacccgacggaaataacggcgcccaaggaccgccgggaccacaaggtgtccagggaggtaagggagaacaaggaccaccaggaccacccggattccaaggactcccagggccatcgggacccgcaggtgaggttgggaagccaggagagagaggtcttcatggcgaatttggacttccaggtccggccggacctcgtggcgagcgaggacctcctggcgagtctggagcagctgggccaacaggtccgatcggaagtcgtggtccgagtggccccccaggtccagatggaaataaaggcgaacctggtgttgttggagctgtcggaacggctggaccatcgggtccatcagggttgccaggtgagaggggtgctgctggtataccaggaggaaagggtgagaagggagagcctggtcttaggggagaaatcggtaaccctggacgagatggagctcgtggtgcaccaggagcagtcggagccccaggaccagccggagcaactggggatcggggagaggcaggagctgcggggccagcaggaccagcaggacctcgtggttcgccgggtgagaggggtgaagtggggcctgctggaccaaatggattcgctggtccagctggtgcagcaggacagcctggtgcaaagggtgaaagaggtgcaaaaggaccaaaaggagaaaatggtgtagtcggacctactggaccagttggcgctgctggaccagcggggccgaacggaccaccaggaccagctggatcacgcggagatggaggacccccaggtatgactggatttccaggagctgcgggacgaaccggtccaccaggacccagtgggattagtggtccaccaggaccacctggccccgcaggaaaggagggtctgcgtgggcctagaggtgatcaaggtcccgttggacgaacaggagaagtcggagccgtgggcccaccgggatttgctggtgaaaaaggaccatcaggagaagcgggaacagctggaccgccgggaacaccgggaccccaaggattgcttggagccccaggaattctaggacttcctgggtctcgtggagaaagaggactcccaggagtggctggagctgtcggagagccgggacctttgggaattgctggaccaccaggagcacgaggtccaccaggagctgtcggatccccgggagttaatggagcaccgggagaggctggtcgagatggaaatccgggtaatgatggaccaccaggtcgtgacggccagcccggccacaaaggagaaagaggctatccagggaacatcggaccagtgggtgcagcaggtgcaccgggccctcatggaccagttgggccggcaggaaagcacggaaatcgcggagaaaccggcccatcgggtccagtggggccagcaggtgccgtgggcccgcggggaccttcgggtcctcagggaataaggggggataagggcgagcctggcgagaaaggaccgcgcggattgccaggattaaaaggacataacggtttgcaaggccttccaggaattgctggccatcatggagaccaaggagctccaggaagcgttggaccagcgggtccacgtggacccgcgggtccttctggaccggccggaaaagacggacggacaggccacccaggtacggtcggtccagcaggaattagaggtccgcaaggccatcagggtcctgcaggccctccaggcccgccaggcccaccaggacccccaggagtttccggtgggggatatgacttcggatatgatggagatttctaccgagctgatcagccgcgatcggcaccgtctcttagaccaaaagattacgaagttgacgccactctaaagtctctcaataaccaaattgaaacacttttgactccagagggatcgagaaaaaatccggcgcggacgtgccgtgatctccgtctcagtcatccggaatggtcatcaggttactattggatcgaccctaatcaaggctgcacgatggacgctatcaaggtttattgtgacttcagtacgggagaaacatgcattagagcacagccagaaaatataccggcaaaaaactggtaccgatcttcaaaagataagaagcatgtgtggttaggggaaaccatcaatgctggttctcagttcgaatacaatgttgagggtgttacaagtaaggaaatggcaacacaactggccttcatgaggctgctagctaactacgcttcccaaaatattacttatcattgtaaaaattccatcgcttatatggatgaagaaacaggaaacctcaaaaaggcagttattctacagggtagcaacgatgtagaattagtcgcagaaggaaactcacgatttacgtatactgtccttgtggatggatgttcaaagaagacgaatgaatggggcaaaaccataattgaatataaaacaaataagccctcgagactgccattccttgatattgctccactcgatattggaggggcagaccaggaatttttcgttgacattggacctgtgtgttttaaa

SEQ ID NO: 1339 - DNA, 4098 bp, Artificial Sequence
  derived and/or modified sequence
atgctcagcttcgttgacacacggacactgctgttactagcagtgactctttgcctagctacctgccagagtctccaggaggagaccgttaggaaagggcccgcaggggatagaggacctcggggggagcgcgggccccccggacccccaggcagggacggcgaggatgggcccactggaccgcctggtcccccagggccccccggcccccctggtctgggaggtaattttgcagcgcaatatgacggtaagggcgtaggactcgggcctggcccgatggggttgatgggacccaggggacctcccggtgctgccggtgcgccaggcccacagggcttccagggacctgccggagagcccggggagcccggacaaactgggcccgctggcgctaggggacctgcaggaccgccaggaaaagctggcgaggatggacatccaggaaagcctgggaggcccggagaacgcggggtggtgggcccccagggcgcacgtggctttccaggaacaccgggtttacctggatttaagggaattcgcggccataatggccttgacggattgaagggacagccaggagctccaggcgtgaagggcgagcctggggccccgggggaaaacggtacacctggacagactggcgctagagggctgcctggcgaaaggggccgcgtgggcgcaccggggcctgcaggcgcaagaggttctgacgggagtgtcgggcccgtcggccctgctggacctataggttctgctgggcctcctggatttcccggagctcccgggcccaagggcgagattggagcagtgggtaacgccggacctgctggtcccgccgggcccagaggcgaggtcggccttcctggactgagcggccccgttggcccacctggaaacccaggtgctaacggccttactggcgctaagggagcggcaggcttgcctggggtggcaggcgccccagggttgccaggacctcggggaatccccggacctgttggtgcagcaggagcaactggagcacgcggcctcgtgggggagcctggaccggccggcagtaaaggagagtcgggcaacaaaggagaacccggttcagccggccctcagggcccccccggcccttcaggcgaggaaggcaagagaggcccaaacggagaggctgggagtgcgggaccaccaggccccccgggcctcagaggatctcctggctcgcgcggtctgccaggagcggacgggcgcgcgggcgtcatgggccccccaggcagccgaggagctagcggaccggcaggtgtgcggggccctaatggagacgccggccgccccggagaaccgggtctgatgggaccccggggcctccctggatcgcctggcaacattggccctgccggcaaagaggggcccgtaggacttcccggtatcgatggaaggccaggccccattggacccgccggagcgagaggcgagcccggaaatatcggttttcctggccctaagggacctacgggcgatccaggaaagaatggtgacaaaggacacgctgggctcgccggagcgagaggggctcctggacctgacgggaacaatggcgctcagggccccccaggaccacagggggtccagggcggcaaaggcgaacaaggcccaccagggccacccggcttccaggggctgcccggtccaagtggacctgcaggagaagtcggcaagcccggggagagaggattgcacggggagtttggcctgccaggccctgctgggccacgtggagaaagaggcccccccggggagagcggggctgctgggccaacaggacctattgggagtcgcgggccctctgggccccctggaccagacggtaacaaaggcgaaccaggggtggtgggcgccgtagggaccgcaggaccctctgggccttctggcctgccaggtgagcgcggagccgctggaattccaggagggaagggcgaaaagggtgagcccgggttgagaggcgaaatcggcaacccaggtagagacggcgcccgtggcgcccccggagctgtaggcgcacctggacctgccggtgccacgggagacaggggcgaggctggagccgcaggccctgctggaccagccggaccccgcggaagtccgggagagcggggtgaggtggggcctgcagggcccaacggctttgccggcccagctggggccgcagggcaacccggggccaaaggagagcggggggcaaaaggccctaagggagaaaatggagtggtgggtccaacaggcccagtcggcgccgcaggtccagccggaccaaacggacctcctggtcctgctggaagccgcggagatggcgggccaccgggcatgaccggcttcccaggagccgccggcagaaccggacctccgggaccaagtggaatatcaggccccccggggccgccaggtccagctggaaaagaaggcttgcgaggccccaggggcgatcaagggcctgttggaagaacaggggaggtgggagctgtgggacctccaggctttgcgggagaaaaagggcctagcggagaagcaggcaccgccggccctcctggcacaccaggcccacagggcctcctgggggctccaggaattctgggactgccaggctctcggggcgagagaggccttcctggcgtggctggagctgtcggtgaacctggcccacttggcattgcgggcccaccaggggctagggggccccctggagctgtcgggtctcccggagtgaatggcgcccctggagaagctggacgggacgggaacccaggcaacgacggcccacccggcagagatggtcaacctggacacaaaggcgagagaggttacccaggcaatatcggcccagttggcgcagcaggtgcccctggcccacacggcccggtcggacctgcgggaaaacacggaaaccggggcgagaccggcccttcaggcccagtggggccagccggggccgttggaccgagaggcccatcagggccacaaggtatcagaggcgataaaggcgaacctggggagaagggtccgagaggtctccccggtttgaagggtcataacggacttcaaggactccctggtatcgcaggccaccacggggaccaaggagcacctggcagtgtcggtcccgcaggacctaggggaccagcaggcccctcaggccctgctgggaaggacggcagaacagggcaccctggaaccgttggaccagccggcattaggggcccccaaggacaccaaggccctgccggtccacccgggcctcctggacctcccggccctccaggagttagcggtgggggttacgatttcgggtacgacggcgatttttacagggccgatcaacctcgctccgcccccagcctcaggcctaaggattacgaagtcgacgccaccctgaagtccctcaacaaccagatcgaaaccctgcttacccctgaggggagtcgaaagaacccggctcggacatgtagagatctgagattatctcatcccgagtggagtagtggttactactggattgacccgaatcaaggatgcacaatggatgcaattaaagtgtactgcgattttagcactggagagacatgtattagggcacaacccgagaatatccccgcaaagaactggtaccgatcttccaaggacaaaaagcatgtctggctcggcgagactatcaatgctggtagccaattcgagtacaatgtggagggagtcacaagcaaggagatggccacccagttggcctttatgcgcctgcttgctaactacgccagtcagaacattacctatcattgcaaaaactccatcgcttacatggatgaagaaaccggaaacctcaaaaaggccgtcattttgcaaggttcaaatgacgtggagcttgtggccgaaggaaactcgcgcttcacatacaccgtcttggtcgacggctgtagtaaaaaaaccaatgagtggggcaaaactatcatcgagtacaagactaacaaaccttcacggctcccctttttagacatcgcccctctggacatcggaggtgcagatcaagaattctttgtggatattggaccagtgtgctttaaa

SEQ ID NO: 1340 - DNA, 4098 bp, Artificial Sequence
  derived and/or modified sequence
atgttgagcttcgttgatactcgcaccctgctgctgcttgcggtgactctttgcctggccacttgtcaatcactgcaggaggaaaccgtaaggaagggccccgccggagatagaggacctcggggcgagcgcggtccacctggtcccccgggacgggatggagaggacgggccgactgggccacctgggcctccagggccgcctggaccccctggtcttggtggcaacttcgctgcccagtacgacgggaagggtgtgggtctgggaccagggccaatgggtctgatgggacctcgaggcccaccaggagcagccggggctccagggccccaagggtttcaagggcctgctggggaaccaggcgaacccggccagactgggcctgcaggagcaagaggtcccgccggtcccccaggtaaagccggtgaagatggacacccaggtaagccagggaggccaggagaacggggcgtcgtggggccgcagggagcccgtggttttcctggcactccagggctgccaggtttcaaaggcattaggggacacaacggacttgacggactgaagggacagccaggagcaccaggcgtgaaaggggaacccggggcacccggcgagaatggaacccctggtcaaaccggtgcacgaggactgcccggcgaaaggggacgggtgggtgcccccggaccagccggcgcaagaggatccgacggttcagtcggccctgtcggacctgcgggaccaattgggtccgctggtccgccgggctttccgggcgcacctgggcccaagggagaaatcggggcggtgggaaatgccgggcccgcgggaccagccggtccacgcggggaggtgggacttcctggactttccggacccgttggacctcctgggaaccctggcgcaaatggattgactggagccaagggtgcagccggcctgcctggagtcgcaggtgcaccaggcctccccggtccaagaggaatccctggaccggtcggcgcagcaggggctactggggcaagagggcttgtgggtgaaccgggacctgccggatcaaaaggtgaatccggcaacaagggcgagccaggctccgctgggccccaaggacccccaggacctagcggagaagagggcaagagaggaccaaatggagaagccggatcggccggaccgcccgggccgcccggactgcgaggctccccgggatctcgcggcctcccaggtgctgatggaagggcaggtgttatgggacctcctggttcaagaggcgcatcgggcccagcaggagtgcgcggccccaatggagatgccggcaggcctggagaaccagggctcatgggccccagaggcctgcccggctcgcccggtaacattggacctgcgggcaaggagggtccagtgggcctcccgggtatcgacggccgacctggtccaatcggccccgcaggtgcacgcggtgagcctggtaacataggattccccggccctaaaggacctactggggatcctggaaagaatggcgataaggggcatgccggattggcaggtgcccgcggtgcacctggccctgatggaaataacggagcccagggtcctcccggcccccaaggcgtgcaaggtggcaagggcgaacagggtcctccggggccgcccgggttccaagggcttcctggcccctcgggcccagcgggagaagtaggaaaacctggagaaagaggtctgcatggtgagtttggtctgcccggaccagcgggtcccagaggagagcggggaccacccggtgaatctggggcggcaggtccaactggacctattggtagccgtggtccctccggacctcccggaccagacggtaacaagggtgaaccaggcgtggtgggtgccgtgggaactgcagggcctagcggaccctccggcctgccgggtgagagaggagccgccggaattcccggcgggaaaggtgaaaaaggtgaacccggactccgaggagaaattggtaacccaggtcgagacggagcacggggggcacctggggcagtgggggcgcccgggccagcgggagcaaccggggatcgtggagaggcaggcgctgcaggtccggcaggcccagcagggccgcgcgggagccccggagagagaggcgaagtcggacccgcaggaccaaacggctttgcaggcccagctggagctgcgggccagcccggtgctaagggggagcggggggcgaagggaccaaagggtgaaaacggagttgtgggacctaccgggccagtcggcgcggccggtccagctggtccaaacggcccgccagggcccgcagggagcagaggagatggaggcccacccggcatgactggctttccaggagctgcgggacggaccggaccaccaggcccatcggggatatcaggccctcctggccctccaggaccagctgggaaagaggggcttcgcggtccccgcggtgatcagggcccggtgggacgcactggcgaagtgggtgcagtgggaccgccaggcttcgcgggggaaaagggaccttccggagaggctggaaccgcgggaccaccaggaacgcctggccctcagggtttgcttggtgcgcccggcatcctgggtctgcctggtagccggggtgaacgtggacttcctggcgtggcaggcgccgtcggagaaccaggaccgcttgggattgccggaccccctggcgcacggggcccgccgggagcagttggtagtcctggtgtgaatggagcacccggtgaagctgggagagacggaaatcccggtaatgatggacctccaggaagggatggtcaaccgggtcacaaaggggaacgtggttacccaggaaacattggccccgtcggcgcagccggcgcaccgggaccacatggaccagtgggcccggccggcaaacatggaaacagaggtgagactggtccatcgggccctgtaggtccagcaggcgcagtcgggcctcggggaccttcgggtcctcagggaatcaggggtgataaaggggagccgggagaaaaagggcctcgaggactcccaggacttaagggtcataatggacttcaaggcctccctggaatcgcaggacatcatggagatcagggggcaccaggctcggtagggcctgcgggtcctcgggggccggctgggccgtccggaccagcaggaaaagatggacgtaccggacaccctgggacggtggggcccgcaggaattagaggtcctcaaggccaccagggaccagcaggtcccccaggaccacccgggcctccgggtccccccggagtgagcgggggcggttacgattttggatacgatggggacttttaccgcgcagaccaaccaaggagcgcaccttcgctgcgtcccaaggattacgaagtcgatgcaactctcaagtcgcttaacaatcaaatagagactctcctgacccccgaaggttcgcgcaagaaccctgcgcgaacttgcagagatcttcgcctgtcacacccagagtggtcaagcggatactactggatcgaccccaaccagggttgcaccatggacgcaattaaggtgtattgtgacttttccaccggggaaacctgtattagggcccaacctgagaatataccagcaaagaactggtacagatcgtccaaggacaagaagcatgtctggcttggagaaaccattaatgcagggtcacaatttgaatacaacgtcgagggtgtcacctcgaaggaaatggcaacccaattggcattcatgagactgctggcaaactacgccagccagaacattacgtaccattgtaagaacagtattgcctacatggatgaagaaaccggaaacctcaagaaagcggtgatcctccaaggttcaaatgacgtggagctcgtggcagaaggtaacagccggtttacctatacggtgcttgtggacggatgttccaaaaagactaacgaatggggtaagacgataattgaatacaagaccaataaaccgtcccgtttgccctttttggatatcgcacccctggacatcgggggagcagatcaagaattcttcgtggatattggccctgtgtgttttaag

SEQ ID NO: 1341 - DNA, 4098 bp, Artificial Sequence
  derived and/or modified sequence
atgctaagtttcgtggatacaagaactttattattgctggcggtaactctttgtctggcaacttgtcagtcacttcaggaagagacagtgcgcaaggggcctgctggggataggggaccaaggggggaaagggggccccccgggcccccagggcgagacggggaagacggacccactggaccccctggacctcccggaccacccgggccccctggactgggagggaactttgcggcccagtatgatgggaaaggggtgggactcgggcccgggcctatggggttgatgggaccaagggggcctcctggagcagctggagcccccggaccacagggatttcaggggcctgcgggagaacccggggaacccggacagactggacccgccggagcccgcgggcccgctgggccaccaggaaaagccggggaagatgggcaccccgggaaacccgggcgcccaggggaaaggggagtcgtcgggccccagggagccagggggttccccggaactccaggactccctggattcaaagggataagaggacacaacgggctagatgggttaaaaggacagcctggagcaccaggagtgaaaggggaacctggagctcctggggaaaatggaactccagggcagactggggcccggggattacctggagaacgaggaagggtgggggcccctgggccagccggggcacggggaagtgacggaagtgtgggacccgttgggcctgctgggcccataggaagtgctgggccccctggatttcctggggccccagggcctaagggggaaatcggagccgtcggaaatgcagggcccgccggaccagctgggccgcggggggaggtgggactgccagggttatctggacctgtcggacctcccggaaatccaggggctaatgggctgacaggagcgaagggagcagccggactaccaggggtcgcaggagcacctggactcccaggaccacgcgggataccaggaccagtgggagcagccggggctacaggggctaggggactggtgggggaacctggacccgccggatccaaaggagaatccggaaacaaaggagagcctggatcagcagggcctcagggaccccccgggccttccggggaggaaggaaaacgcgggcccaacggagaagctggaagtgccgggccgccagggccaccagggctgcgaggatcccctggatcacgcgggttgcctggagcagacggaagagctggagtaatgggacctcccggatcacggggggcctctggaccagccggggtacgagggcctaacggagatgccgggcgacccggggaacccgggctcatgggaccccgcggattacccggatctccagggaacatagggcctgcaggaaaggaaggaccagtggggttgcccgggatagatgggaggcctgggcccatcggacctgcaggggcaagaggggaaccagggaacataggattccccgggcctaaagggcctacaggagaccctgggaaaaatggagataagggacatgccggattggccggggctaggggggcccctggacctgatggaaataatggggcacaggggccccctggaccccagggagtgcagggaggaaaaggagaacaggggccccccgggccacccggattccagggactgcccggaccttctggaccagccggggaagtgggaaaacctggggaacgcgggctgcacggagaattcggactgcctgggccagctgggccacgcggggaacgaggaccacccggggaatctggagccgctggacccactggacctatcggatctcggggaccatctggaccacccggacccgatggaaataaaggagaaccaggggtcgtcggagctgtaggaactgcagggcctagtgggccctcagggttacccggagaacggggagcagcaggaattccaggagggaaaggggaaaaaggggagcctggactgagaggggaaataggaaatcccggacgagatggagcccgcggagctcccggagctgttggagcacccggacccgctggagccactggggataggggagaagcaggggcagcagggcctgctggaccagccggacctaggggatcccctggagaaagaggggaagttgggcctgctgggcctaatgggtttgcagggccagccggagcagctggacagcctggagcaaagggggaaagaggagctaaagggcctaaaggagagaatggagtcgtgggacccactgggcccgtcggagcagcaggacccgctgggccaaacggacctcccgggccagccgggtccagaggggatgggggacctcccgggatgacagggtttccaggagccgctggacgtacaggacccccagggccatctggaataagtgggcctccggggcctcccggacccgccgggaaagagggactgcggggacccaggggggatcagggacccgtcgggcggacaggggaagtgggagcagtgggaccacctggatttgcgggagagaaaggaccatccggagaggcggggacagcaggaccacccggaactcccgggccccaggggctcctgggggccccaggaatcctaggactccccggatcccggggggagcggggactcccaggagttgccggagctgtgggggaacccgggcccttagggatcgctggaccacccggagccagggggcccccaggggcagtaggaagtcccggggtgaatggagcccccggggaggctgggcgggatggaaaccctggaaacgatggaccacccgggagagatggacagcccgggcataaaggggaaagaggatatcccggaaatataggacctgtgggagccgctggagcccccgggccccatgggccggtagggcctgctgggaaacatgggaacaggggggagacagggcccagtgggcctgttgggcccgcaggggcagtagggccaagagggccatcgggacctcaggggatcagaggggataaaggggaaccaggggaaaaaggacctagggggttgcccggacttaagggacacaatggacttcagggattacccgggatcgcagggcaccatggggaccaaggggcccctggatctgtcggaccagctgggcccagggggcccgcgggaccatcagggcctgccggaaaagatggacggactgggcaccctgggacagtggggcctgccgggattcggggacctcaagggcaccaggggccagctgggcccccagggccccctgggccccccgggcctccaggggtctcaggaggagggtacgactttgggtatgatggggatttttaccgagctgatcagcctcggtctgcaccctcactccgacctaaagattatgaagtggatgccacactaaaatccctaaataatcagattgaaacactgctaacacccgagggatctcggaaaaatcccgctaggacttgccgcgatctaagactttcccaccccgaatggtcttccggatattactggatcgaccctaatcaggggtgcactatggatgctattaaagtgtattgtgatttttcaactggggaaacttgtatccgggcccagcccgaaaatatcccagctaaaaattggtatagatcctccaaagataaaaaacatgtgtggctgggagagacaataaacgcagggagtcaatttgaatataacgttgaaggggtcacttcaaaagaaatggctactcaattggcatttatgaggctcctggccaactatgctagtcagaacatcacatatcactgcaaaaattctatcgcctacatggatgaagaaacagggaacctcaaaaaagctgtaatactccaggggagtaatgatgtggaactggtagctgaaggaaactcaagattcacatatacagtgctcgttgatggatgctctaaaaagacaaacgaatgggggaaaacaataatagaatataaaacaaataaacctagtcggctcccattcctggatatcgcgcccctggacattggaggagcagatcaggaattctttgtggacattggaccagtttgtttcaaa

SEQ ID NO: 1342 - DNA, 4098 bp, Artificial Sequence
  derived and/or modified sequence
atgctatccttcgtcgacacccgtactctgctactgttggctgtcactctgtgtctggccacctgccagtccctccaggaggaaacggtgagaaaagggcccgccggcgatcgaggtcccagaggagagcgtggaccgcccggaccgccaggaagggacggcgaagatggtcccactggccctccaggcccaccagggcctccaggacctcccgggctggggggcaatttcgcagctcagtatgacgggaaaggagttggcttgggtcctggccccatgggtttaatgggacccagggggcctcctggtgcagcaggcgctcctggtcctcaggggttccagggcccagccggggagcctggggaacccggtcagacgggacctgcaggtgcaagaggacccgccggccctcctggcaaggctggcgaagacggtcaccccggaaaacctggaaggcctggtgaacgaggagtggtgggaccccaaggagctcgaggatttcccggtacaccaggtttaccgggttttaagggaatccgtggacacaatggtcttgacggactcaaaggccagccgggagctcctggggtgaagggcgagcctggcgccccaggcgagaatgggacaccaggccagactggcgcaagagggctgcctggcgaacgcgggcgagttggcgcacccggcccggccggtgctagaggttcagatgggtcagtcggccccgtgggcccggcaggtccgatcggatctgctggccctcccgggttccctggagcccctggcccaaaaggcgaaatcggggccgtgggcaatgcagggccagccgggcccgctggcccccgtggggaagtgggtctgcctggcctctccggccccgtgggccctcctggcaatccaggagcaaacgggctgactggcgccaagggagcagccggtctcccaggagtggccggcgccccaggacttcctgggccacggggcattcctggacctgtgggggcagctggtgccaccggggcaagggggcttgtaggggagcccgggcccgcggggtctaaaggggagagtggaaacaagggcgaaccaggctccgccggcccccagggccccccgggcccctcaggagaagaaggcaagcggggccctaacggggaagccggctccgctggtccgcctggaccgccagggttaagggggtcacccgggagtcggggactgccgggagcagacggcagggccggagtaatggggccacccggcagtagaggcgcctccggtcccgccggtgtgagaggaccaaacggtgatgcgggaagacccggtgaacctggattgatggggcctagaggcctgccggggagtcctggcaacattggacctgccggaaaggaagggccagtggggctgccggggatagacgggcggcccgggcccatcgggccagctggcgcacgcggtgagccagggaacatcgggtttccaggacctaaaggaccgacaggggaccctgggaaaaatggggataagggccacgcggggctggcaggggcccgtggcgccccagggcctgatgggaacaatggagcccaaggccctcctgggccccagggcgtgcaggggggtaagggcgagcagggtcccccaggcccacccggatttcagggcttacctggaccgtcagggccggccggtgaggtgggcaaaccaggcgagaggggactccatggagaatttgggctgccaggccctgctggacctcgaggggaaagggggcccccaggcgaatccggagcagccggccctaccgggcccatcggcagccgaggacccagtggaccgccgggccccgatgggaacaaaggagaacccggagtggtgggcgccgtgggcactgctggcccatccgggccatctgggctgcccggggaaagaggagccgccggaatccctggtggcaaaggtgagaagggtgaacctggactccggggagaaatcgggaatcccggcagggacggcgcacggggggctccgggagcagtcggagccccagggcccgccggcgcaacgggcgacagaggcgaggctggtgcggcgggacctgctgggcccgcaggcccaagaggatcccctggggaaaggggtgaagtgggaccagcgggtccaaacggttttgccggccctgctggcgcagccggccagcccggcgctaaaggcgagagaggagcgaaaggacccaagggggaaaacggtgtggttggaccaactggccctgtgggagccgcagggcccgcaggacccaacggaccacctggtcctgccggatctcggggcgatggggggcctcccggaatgactggatttcctggggccgccggcagaaccggtccccccggaccttctggtatctccggaccgcctggcccgccaggccccgcgggtaaagagggtctacgaggaccaagaggcgaccagggcccggtggggagaacaggagaggttggtgctgtcggacctcctggatttgccggcgagaaggggccttctggggaggcgggcacagcggggcccccaggcacgcctggcccacaggggttgctgggagctccgggcatcctgggcctgcctggtagtagaggggagcgagggctgcccggagtcgctggtgctgtgggcgaaccaggccctctgggtatagccggccccccaggcgcccgtgggcctcccggtgccgtgggcagtcctggagtaaatggcgccccaggggaagctggccgagacggaaacccaggcaacgatgggccaccgggccgcgatggccaaccagggcataagggtgagcgcgggtaccctggaaacatagggcccgtaggcgcagccggtgcgcctggaccgcacggtcccgtgggccccgctggcaaacatggtaatcgaggggaaaccgggccaagtggccccgtgggccccgccggcgccgtgggccctcgtgggccctcaggcccccaaggaattagaggtgataagggcgagcccggggagaaggggccgagagggcttcccgggctgaaggggcataacggcctccaggggctccctggaatagcaggccatcatggggatcagggcgcacctgggtcagtcggacccgccgggccccgggggcccgccggcccgtccggacctgccggcaaggacggaagaaccggccatccaggaacagtggggcctgcagggattagggggcctcagggccaccaagggcctgccggccccccaggaccccctggacctccaggccctcccggggtgagcggtggcggatatgactttgggtatgatggcgacttctatcgagccgaccagccccgaagtgccccctctctcagacccaaagattacgaggtagacgctacactgaaatccctgaacaaccagattgagaccctcttgacccccgaagggtcaagaaaaaacccagcacgaacctgcagggatcttcgattgtctcatccagaatggtcctccggctactactggatcgatcctaatcaggggtgcactatggacgccattaaggtgtactgtgacttttctaccggtgagacgtgcattagggctcagcccgaaaatattcccgctaagaactggtaccggtcttctaaggacaaaaagcacgtgtggctgggagagaccatcaacgcaggatctcagttcgagtacaacgtggaaggcgtgacatccaaagagatggccacgcaattggctttcatgagactcctggcgaactatgcatcacagaacataacctatcattgtaagaatagcattgcctatatggacgaggagactgggaatttgaagaaggccgtcatcctgcaggggtctaacgacgtggaactggttgcagaagggaactctcgtttcacctataccgtgcttgtggatggatgctccaagaagacgaacgaatgggggaagaccataattgagtataagactaacaagccctcccgactgcccttcctggacatagcgcctctggacattgggggggctgatcaggaattcttcgtcgacattggccctgtatgtttcaaa

SEQ ID NO: 1343 - DNA, 4098 bp, Artificial Sequence
  derived and/or modified sequence
atgctcagctttgtggacacacggaccctgctgttgctggcggttacactgtgcctggcaacatgccagtcactgcaggaggaaactgttcgaaaggggcccgctggagatagaggtccccgcggcgaacgagggccccccgggccccccgggcgagacggagaggacgggcccacagggccccctggcccccctggccccccaggcccgcccggactgggaggcaatttcgccgcgcagtatgatggcaaaggcgtcggcttaggcccaggcccaatggggctcatgggccccagaggccctccgggggcagcgggagctcccggcccgcaagggttccaggggccagctggcgaacctggcgagcctggacaaaccggacctgcgggcgcgcggggcccagccggacctccaggaaaggcaggggaagatggtcaccctgggaagcccggccgccctggagaaagaggggtggtgggcccccagggcgcccgcgggttcccaggcacccctggactgccaggctttaaaggtatccgtggtcacaatggtctggacgggttgaagggacaacctggagcccctggagtgaaaggcgagcctggcgcccctggggaaaatgggactcccggacagactggcgctcgggggcttccgggagagcggggacgggtaggggcacctgggcctgccggcgctagaggtagcgacggaagcgtgggtccagtgggccccgctggccctatcgggtctgcgggtcccccgggcttccccggcgcccccggaccaaaaggagaaataggtgccgtgggaaatgccggaccagccggccccgctggacccaggggagaggtaggtttgcccggcctatcaggcccggtgggcccacccggcaacccgggggcgaacggtctgacgggggctaagggagcagcaggtctgccaggtgttgcgggagcacccggtctgccagggccaagggggatccccggccccgtgggagccgctggcgcgacaggggctagggggttagtgggcgagccagggcctgctgggtccaaaggggagagtggtaacaaaggagaaccgggcagcgccggaccacagggaccccctggaccttccggggaggaaggcaagaggggccctaatggagaggctgggtcggctggtccgccgggcccccccggactgagaggctctcctgggtctcgaggcctgcccggcgcagacggaagggccggtgtgatgggcccacctggctccagaggggctagcggacctgccggcgtaagaggacccaatggcgacgccgggcgcccaggtgaacctgggctgatggggccacgaggcctgcccggaagcccaggcaacatcggtccagcaggaaaggagggcccagtgggcctccccggaatcgatggacgccctggtcccattggtcccgccggggcacgtggggagcctgggaatatcggcttccctggccctaaaggccccacaggcgacccggggaaaaacggagacaagggccatgccggactggctggagccaggggagccccagggccggacggaaataacggggctcaggggcctccaggtccgcagggcgttcaggggggtaaaggggaacagggccctcccggccctccaggattccagggacttccagggccttcagggcccgctggggaagttggcaaaccaggagagcgcgggctgcacggcgagttcggcctgcccgggcccgctgggccacgtggcgagcgagggcctcccggcgagtcgggtgccgcaggaccaactgggcctatcggatcccgaggcccaagcggcccaccaggccctgacgggaacaagggcgagcccggcgtggttggcgcagtgggcacagctgggccttctggaccatccggtctcccgggcgaacgaggcgccgcagggatccccggcggtaaaggagaaaaaggagaacctggactgaggggcgagattggaaatcccggtcgggacggtgcccgcggtgccccaggcgccgtcggtgctcccggcccagccggagccactggtgaccgtggtgaagccggcgccgcagggccagctggccctgccgggccccgaggatctccgggtgaacggggagaggtaggaccagctggacctaacggattcgccggcccggccggagctgccggtcagcccggtgccaaaggagaacgaggggccaagggaccaaaaggtgagaatggagtggttggtcccactgggccagtgggcgcggccggccctgcagggccgaacgggccaccggggccagctggctctcgaggggatggaggtccccctggtatgaccggcttccctggggccgcaggtaggacaggcccccctggtcccagtggcatcagcgggccccccgggccaccaggccctgccggtaaggagggtctcagagggccccgaggagaccagggccccgtgggccggacaggcgaagtgggagccgtcggcccaccagggtttgcgggggagaaaggcccgagtggagaagccggaacagccggtcctccaggaacacctggacctcaaggactgctgggagcccctgggattctgggattaccgggctctcgaggagaacgcggccttccgggtgtggccggcgctgtgggcgagccaggacctcttgggattgctgggcccccgggagctcgtggcccccccggcgcagtgggatctcctggcgtgaatggcgctcctggggaggccggcagagacggaaatcctggtaatgacggaccccctggtcgggacggccagccgggacacaagggggaacggggatatccaggcaacatcggacccgtaggggccgccggcgcccccggtccacacggtcccgtcggtccagcaggaaagcacggaaatagaggcgaaacgggcccctccggacccgtgggtccagccggtgcggtcgggccaagagggccttcagggccccaggggattcgaggcgataaaggggagccgggtgagaaagggccacgtgggttaccaggtcttaaggggcacaatgggttgcagggcctccctggtatcgcagggcaccacggcgatcagggtgctccggggtctgtagggcccgctgggccacggggacccgctggaccatccgggccggctggaaaagacggccgcactgggcaccctgggacagtcggaccggcaggaatccgagggccacaaggtcatcaaggaccggcagggccacctggtcctccagggcccccagggccgcctggcgtgtctgggggcggttacgattttggttacgacggagatttttatagggctgatcaaccgcgcagcgctccttcgctgcggccgaaggactatgaggtggatgctacactgaagagcctgaataatcagattgagacactcctgaccccagagggctctcggaaaaatcctgccaggacctgtagagacctacgtctgtcccacccagagtggtcctccggctattactggatcgatccgaaccaaggctgcacaatggatgctatcaaggtgtattgtgattttagcaccggcgaaacatgtataagagctcaaccggaaaacattccagctaagaactggtaccggtcttctaaggacaaaaagcacgtgtggctcggggagactattaatgcagggagtcagttcgaatacaatgtggagggcgtcacttctaaggaaatggctactcaactggccttcatgcgcctgctggctaattacgcttctcagaacattacctaccactgtaaaaattcgatagcctacatggatgaggaaaccgggaacctgaagaaggcggtgattctccagggctccaatgacgtcgagttggtagcagaagggaactctcgtttcacatatacggtcttggttgatggctgcagcaaaaaaacaaatgaatggggtaagaccatcatagagtacaaaacgaataaaccttctagactacctttcctcgatatcgctccactcgacatcggcggagcagatcaggagttcttcgtcgacataggaccggtgtgctttaag

SEQ ID NO: 1344 - DNA, 4098 bp, Artificial Sequence
  derived and/or modified sequence
atgctgtcctttgtagacacccgcactcttttacttctcgctgtgacactgtgtctcgcaacatgccaatcattgcaggaggagaccgtgagaaaaggacctgccggggaccggggacctcgcggagagaggggtccccctggccctcccgggcgggatggcgaggacggtccgacaggcccacctggaccacccggtcctcccggtcctcctggacttgggggcaactttgcggcccagtacgacggtaaaggcgttgggcttggcccgggccctatgggacttatgggcccccgtgggccacccggcgctgccggggcccctggccctcagggatttcaagggcccgcaggggagccgggagaaccaggccagactgggcccgccggcgccaggggcccggccggcccccctgggaaggccggggaagatggccaccccgggaagcccggaaggccaggagagagaggggtcgttgggccacagggtgctagaggcttcccaggcacccccggcctgccagggtttaagggcatccgcggtcataatggtctggatgggttgaaggggcagccaggcgcccctggtgttaagggagagccaggcgcacctggagagaatggtacgcccggccagactggagcgcgagggctgcctggcgagagagggagggtgggagctcccggccccgcaggggcaagaggatcagacggctcagtcgggcccgttggtcctgccggtcccataggaagtgctggccccccaggatttcccggcgcgcctgggcctaaaggggaaatcggcgccgtaggcaatgcggggcctgctggaccagccggacccaggggcgaggttggactcccggggctgtcaggtcctgtcggccctccaggaaaccctggtgctaacggcctgaccggagctaagggagccgccggactgccgggtgtggctggcgctccaggtttgcctgggccccggggcatccccggtcctgtcggggcggcaggagcaacaggcgccaggggactggttggcgaacctggccccgccgggtccaagggtgagtcaggcaataaaggtgaacctggcagcgctgggccccaggggcctcctgggcctagcggagaagagggaaaacgtgggcctaatggcgaggccgggtctgccgggcctcctgggccacccgggctcaggggttccccgggttcccgtgggcttcccggcgccgacggaagagccggcgtgatggggcctcccgggagtcgtggtgccagcgggcctgcgggtgtccgaggtcctaacggagacgctggccgacccggcgagcccggcttgatgggcccccgagggctgcccgggagtcccggcaatatcggaccggcggggaaggagggtccagtgggcctaccgggaatcgacggaagaccaggacctattgggcccgccggagcaagaggtgagccgggaaacatcggctttcccgggccaaaggggcctactggcgatcccggaaagaacggcgataaagggcacgcggggctcgcaggagcgcggggggccccaggacctgatgggaacaatggcgctcaaggcccgccaggcccgcagggagtgcaaggaggtaagggggagcagggtcctcctggcccacccggattccaaggtctccccggccccagtggacccgccggtgaagtcgggaaaccaggcgagcggggcctgcacggcgagttcggacttcctggccccgcgggcccacgaggggagcgtggcccccccggcgagtcgggagctgctgggcctacagggcctatcgggtctagagggcctagtggcccccctgggccagatggaaacaagggagagcctggggtagtgggagccgtagggactgccgggccctccgggcctagcgggttacccggcgaaaggggagccgcggggataccgggggggaaaggagagaagggggagccaggtctgcgcggcgaaattggaaatcccggccgcgatggtgccagaggcgccccaggcgcagtgggagctccaggacctgccggggcgaccggggaccggggcgaagcaggagctgccggcccagcgggacctgcgggcccgcggggctcgcctggagaaaggggcgaagtcggtcccgccggaccaaatggctttgctggacccgccggcgcagctggccaaccgggtgccaagggcgagaggggagctaaggggcctaaaggggagaacggggtggtgggaccgaccggcccagtgggggcagcgggaccagcaggacctaatggccccccaggccccgccggcagcaggggcgacggcggaccaccagggatgacgggcttccctggagccgcaggaaggaccggaccacccggaccaagcggaatctctgggcctcccggcccccctggacctgctggaaaggaaggcctccgggggcctcgtggcgatcagggccctgtgggccggacaggcgaggtaggcgcagtggggcctcccgggtttgcaggcgagaagggccccagcggtgaggcggggaccgccggtccaccagggaccccaggaccgcagggactcctgggggcccctggcatcctggggttgccggggtcacggggagagaggggactccccggcgtggccggggcagtcggtgagcccgggcctctcggaatcgcgggaccgccgggtgctcgggggccgcccggcgcagtcggctcaccaggagtaaatggggcccccggtgaagccggccgggacggaaaccccgggaatgatggtcctccaggacgagatggtcagcctggccacaagggcgagcgaggttatcccggcaacattgggcctgtcggagcggcaggcgcaccaggtccgcacgggcctgtgggtcccgcgggtaagcatgggaatcgcggtgaaacggggccaagtggccccgtgggaccggccggcgcagtcggccccagaggcccgagtgggccccaaggcatccggggcgataagggtgagccgggcgaaaaagggccccggggtctgccgggattaaaggggcacaatggtcttcaaggcttgccaggtatcgccgggcatcatggtgaccagggtgcgcccggttctgtgggaccagccggccctagaggacctgccggtccctccgggccggcaggtaaggacggtcgtacggggcatccgggcacggtgggcccggccggcatccgcggaccgcagggccaccagggtcccgcaggacctccaggcccacccggtcctccagggccccccggcgtgtctggtgggggttatgactttggatacgacggcgatttctatagggcagatcagcctcgctccgccccttccctgaggccaaaagactatgaagtagacgccacgctgaaatccctgaataaccagatcgaaacactgctcactcctgaaggctctcgcaaaaacccggctagaacttgcagggacctacggttatcacatcccgagtggagtagtggttactactggatagatcctaatcaaggctgcacaatggacgcaattaaggtgtattgtgatttctccaccggcgaaacctgcatcagggcacaacccgagaatatcccagctaagaattggtaccgatcttccaaagacaaaaaacacgtgtggctaggagagactataaatgctggaagtcagtttgagtataacgttgagggcgtgacttccaaggagatggccactcagctggcattcatgcgcctgttagccaactacgcatcccagaacatcacctatcactgcaagaactctattgcttatatggacgaagagactggcaacctcaagaaagctgtcattttgcagggtagcaacgatgttgaactggtcgcggaaggcaattcaaggttcacttatactgttctggtcgatggttgctccaagaagaccaatgagtggggtaaaacaattattgagtataagaccaacaaaccttcccgactgccatttctcgatattgctcccctggatattggaggcgccgaccaggagttctttgtcgacatagggcctgtatgtttcaag

SEQ ID NO: 1345 - DNA, 4098 bp, Artificial Sequence
  derived and/or modified sequence
atgctgtcgttcgtggatacccgcaccctgctgctgctggccgtcaccctgtgtctggcgacgtgccagtccctgcaggaggaaactgtccggaagggcccggcgggcgaccggggaccaagaggtgaacgcgggcctccgggcccgcccggccgcgacggtgaagatggtcccacgggaccgccaggaccaccaggtccaccgggccccccaggactcggaggaaatttcgccgcgcaatacgacgggaaaggagtgggcctgggccctggtccgatgggactcatgggaccgaggggacccccaggtgcggctggggctcctggaccgcagggattccaaggccctgccggcgagccgggcgaaccggggcagactggaccggccggcgcacggggacccgctggaccacctggtaaagccggtgaggacgggcacccggggaagccgggtaggcccggcgaacgcggagtggtcggaccacagggagctagaggctttccgggcaccccgggcctgccgggcttcaagggtatccgtggacacaacggactggacggtcttaagggccaaccaggggccccaggagtgaagggcgagccaggcgcccctggggagaacggcactccgggtcagactggggcccgcgggttgccgggggagcgaggtcgcgtcggcgcccctggcccggcaggagcacgcggatccgacggatcagtgggacccgttggcccagccgggccgatcggatcggcaggaccgccaggcttccctggagcgccaggtcctaaaggtgaaatcggcgcagtgggaaacgccggtccagcaggtccagctgggccgaggggagaagttgggcttcccggcctttccgggcctgtgggccccccgggtaaccctggtgcaaacggccttaccggcgcgaagggggccgccggcctgcctggggtggccggtgctcccggcctcccaggtccgcgaggcatccccggtccagtgggagcagccggcgctacgggagcgcggggactggtcggagaaccagggcctgcaggttcaaaaggtgaaagcggcaacaagggggaaccaggctcggctggcccgcagggtccgccgggcccgtcgggcgaagagggaaagcggggtcctaatggagaggcaggctcggccggacctccagggcctcccgggctgcggggatcccctggaagcaggggcttgccaggtgccgatggacgggccggagtgatgggtcctcctggttcccgcggagcgagcggaccggctggagtccgcggcccgaacggagacgcgggccgcccgggtgagccgggactgatgggccctcggggcctgcctggaagcccaggtaacattggtcccgcgggaaaggaaggcccagtcggactcccaggcattgatggtagaccagggccgattggacctgccggtgcacgtggggaacccggcaatatcggattcccgggaccgaagggtccgaccggggatcccggcaaaaacggagacaaggggcacgccgggctcgctggagcaaggggagcaccgggaccggacggcaataatggagcccagggtccgccagggccccagggagtgcagggaggcaagggagagcaggggcctccgggaccaccgggatttcagggactcccaggacccagcggacccgcgggtgaggtggggaaaccgggagagcgtgggctccacggggaattcggattgcccgggcccgcaggccctcggggggaacgcggaccgcctggtgaatcaggagctgcgggtccaactggacctattggctcaagagggccgagcggacctcctggtccagatggaaacaagggcgagcctggcgtagttggagcggtcgggaccgcaggtccatcaggcccgtcggggctcccgggcgaaagaggcgccgccggcatccctggcggtaaaggagaaaagggggagcccggtctgcgcggagagatcggaaatccgggacgcgatggcgcgagaggcgctccgggagctgtgggagcgccgggaccggcgggggcaaccggagatcggggcgaggcaggggcagcaggtccggctggacccgccggaccgaggggtagcccaggagaacgcggagaagtaggtcctgcgggacctaacggatttgcaggaccggctggcgcagctggacaacctggagccaaaggcgaacggggagccaagggaccaaagggcgagaatggtgttgtcggcccgactggaccggtgggcgccgctggcccggctggccctaacgggccaccgggtcctgcgggttcgagaggcgacggaggaccgcctggaatgactggatttccgggcgcggccggtcggactggaccgcccggcccctcaggcatctcaggtcccccgggcccgccagggcctgctgggaaggagggactcagaggcccacggggcgaccaaggtccagtgggccggactggcgaggtgggagcagtggggccgccaggattcgctggggagaagggcccgtctggcgaggcgggaaccgctggtccaccagggacccctggcccacaagggctgctgggagcgccaggaattctcggacttcctggatcgcgaggagagcgggggttgccgggagtcgccggagcagtcggcgaaccagggccactgggaatcgccggtccgcccggagcccggggcccaccaggagccgttggatcccccggagtgaacggagccccaggcgaggcgggcagggatggaaaccctggcaatgacggaccccctgggcgggatggccaacccggccataaaggggagcggggttaccccgggaatataggtccggtgggggcggcaggggcaccaggcccgcatgggccggttggaccagcagggaaacatggaaaccgcggcgaaactggaccttccggaccagttggaccggcaggcgcagtgggtccacgcggaccaagcggaccgcagggtatcaggggagacaagggagagcctggagaaaaaggaccgcgcggcctgccaggactgaagggacataacggattgcagggtctgccaggtatcgcggggcaccacggcgaccagggagcaccaggatccgtggggcctgccggcccccgcggtccagcggggccgtcgggccccgctggtaaggacggacgcaccggacaccccggaaccgtcggccctgcgggaataagaggtccgcaaggacaccagggccccgccggcccccctggcccgccggggccgccgggacccccgggagtgtccggaggcggatacgacttcggctacgatggagacttctaccgcgccgaccagcccagatctgccccttccctccggccaaaagattacgaagtggacgctaccctgaaaagcctgaacaaccagatcgagactctcctcactccggaaggatcgcgcaaaaaccctgcgcgcacttgccgagatctgagactgtcccatccggaatggtcctccggatactactggatcgatccgaaccaaggatgtaccatggacgccattaaggtgtactgcgatttctcgactggagaaacctgcatcagagcgcaaccagaaaacatcccggcaaagaattggtacagatcatcaaaggacaagaagcatgtgtggctgggagagactatcaatgcaggttcgcaatttgaatacaatgtcgaaggggtgacttcaaaggaaatggcgactcagctcgcgttcatgcgcctgctggccaattacgcgtcccagaatatcacctaccactgcaaaaactcgatcgcttacatggatgaggaaactggaaatttgaagaaggctgttattctccaagggtcgaacgatgtcgaactcgtcgctgaaggtaatagcagatttacgtataccgtgcttgtggacggctgctcaaaaaagaccaacgaatggggaaagaccatcatcgagtataagacgaacaagccgtcccgactccccttcctcgacatcgctcctctggacatcggtggagccgaccaggagttcttcgtggacatcggtcctgtctgtttcaag

SEQ ID NO: 1346 - DNA, 4098 bp, Artificial Sequence
  derived and/or modified sequence
atgctttccttcgtggacacccgcaccctgctgctgcttgcagtcaccctctgcttggcgacctgtcagagcctccaagaagaaaccgtgcgcaagggtccagcaggagacagaggaccccggggagagagaggccctcctggtccgcccggaagggacggagaagatggacccactggcccgccagggccaccaggtccgccggggccaccaggactgggcggaaacttcgcagcccagtacgacggaaagggagtgggacttggaccaggaccgatgggtcttatggggccaagaggaccgccaggtgccgctggagcaccgggaccgcaggggttccaaggaccggctggcgagccgggggaaccagggcaaaccgggcctgcaggtgcgcgggggcccgctggcccacctggtaaggccggagaggacggacatccaggaaaaccgggtcggccgggagagagaggtgtggtcgggccgcagggagctcgaggattcccgggaacgccaggactgccaggattcaagggcatcagagggcacaatggactcgacggcctgaaaggacaaccgggcgcgccgggcgtgaagggcgaaccaggcgcccccggagaaaacggaactcctggccaaaccggtgcccgcggactccctggagaaagaggccgcgtcggggcccccggccctgcaggggcgcgcggtagcgatggttccgttggacctgtggggcctgccggtcctatcggtagcgcgggccctccgggattcccaggggccccggggccgaaaggagaaattggtgccgtgggaaatgctggcccggccggacctgccggtccgcggggcgaagtgggactgccaggcctgtctgggccagtagggccaccgggaaacccgggcgcgaatggcctgacgggagccaagggagcggccggcttgcctggcgtcgcaggagccccaggcttgccaggcccgaggggcatcccggggcctgtcggagcagctggagccaccggcgcccgggggctcgtgggagaaccaggcccagcaggatccaagggcgagtcgggcaacaaaggggaacccggatccgcgggacctcagggaccacccggaccttcaggagaggagggaaagagggggccgaacggagaggccggcagcgccggaccgcctgggccgcccggactgcggggaagcccggggtcgagaggtctgccaggagcggatggacgcgcgggtgtcatgggaccgcccggatcgcgaggagccagtggtccagccggtgtccgtggccccaatggagacgcgggacgccctggtgagccaggactgatgggaccgcggggattgccgggatcacctgggaatataggtccagcagggaaggagggacctgtgggactgcctggaatcgatggtcgccctggaccgatcggtccggctggcgcacgcggggaaccaggcaacatcggtttccctggaccaaagggcccgaccggtgacccgggaaagaatggagacaagggccacgccgggctggctggcgctcgcggcgctcccggtccggacggtaataacggagcacagggacctcccggccctcagggcgtgcagggaggcaagggggaacagggcccgcccggccccccgggatttcaaggactgccgggaccttccggaccagcaggtgaagtgggtaagccaggtgagcggggtctgcatggtgagttcgggctgcccgggccggcaggccccagaggagagaggggtcctccgggggagtccggagcagccggcccgacgggcccaatcggatcgaggggtccaagcggccctccgggaccagatggaaacaagggagaacctggagtcgtgggggccgtcggaactgcgggtccgtccgggccctcaggactccccggcgaacgcggtgccgctggaattccgggaggaaagggagaaaaaggggagccgggactcaggggagaaatcggaaatccaggacgggatggcgccagaggggcacctggggccgtcggtgcgccgggacccgccggagctactggcgacagaggagaagcgggtgcggctgggcccgccggaccagctggcccgcgtggatccccgggagaacggggagaagtggggccagccggccctaacggcttcgcaggcccagccggcgcggcagggcagccgggagctaaaggtgagagaggagcgaagggcccaaagggcgagaacggagttgtcgggccgaccggaccggttggggcagctggaccagcgggaccgaacggacccccgggtccggctggatctcggggagacggcggaccacccggcatgactggctttcctggagccgcaggtcgcaccggaccccccgggccgtccgggatctcaggaccgccaggaccacctggacctgccggaaaggaaggcctccgcgggccgcggggagatcagggcccagtcggacgcaccggagaagtgggagctgtgggacctccgggatttgctggagagaagggaccgtcaggtgaagccggcactgcgggcccaccaggcactccgggaccacagggactccttggagccccggggattcttggcctgcccggaagcaggggggagcgaggcctgccaggcgtggcgggagcagtcggggaaccgggtccgctgggaatcgcgggtccgccaggagcgcggggaccaccgggagccgtcggctcgccgggagtgaatggagcccctggcgaggccggacgggacggtaaccctggaaacgatggaccaccgggtcgcgacggacagccgggacataagggagagcgcggatacccgggcaacattggccctgtgggagcggcgggcgccccaggaccgcacggtccggtgggtcccgcagggaagcacggcaatcgcggagaaaccggaccaagcggtcctgtgggaccggccggcgcagtcgggcctaggggcccttcaggtccgcaaggaatccgcggagataaaggcgaaccgggggaaaaagggccgagaggattgccgggactgaagggacataacggattgcaagggctgccggggatcgcgggacaccacggcgaccagggtgcaccgggatcggtgggaccagccgggcccagggggccggccggaccgtcgggaccggcggggaaggacggccgcactgggcacccaggcaccgtgggccccgccggaatccgggggccgcaaggtcaccaggggcctgctggtccaccgggaccgccgggaccccctggacctccaggcgtttcggggggcggatatgacttcggatacgacggagacttctatcgcgccgatcagccgcgcagcgcaccgtcgctccgcccgaaggattacgaagtggacgctaccctgaagtcgctgaacaaccagatcgaaactctgctgacgcctgagggctcccggaagaatccggcccggacctgccgcgatctgcggctctcacatcctgaatggtcctcgggctactactggatcgatccgaaccaaggttgcacgatggacgccatcaaggtgtactgtgacttctcgactggagaaacttgtatccgtgcccagccagaaaacatcccagccaaaaactggtaccggtcatccaaggataaaaagcacgtgtggctcggcgagactatcaacgctggaagccaattcgagtacaatgtggagggcgtgacctccaaagagatggccactcagctcgcttttatgcggctgctggccaactacgcgtcgcagaacatcacctaccattgcaaaaactcgatcgcctacatggacgaggagactgggaatctcaagaaggcggtgatcctccaaggcagcaatgacgtggagctggtcgcggaaggaaactccagattcacttacactgtgctcgtggacggatgctcaaagaaaaccaatgagtggggaaaaactatcatcgaatacaagaccaacaaaccgagcagactgccgttcctcgatattgcgcctcttgacatcggcggggcggatcaggaatttttcgtggatattggaccggtgtgctttaaa

SEQ ID NO: 1347 - DNA, 4098 bp, Artificial Sequence
  derived and/or modified sequence
atgctgagcttcgtggatacccggaccttgctcttgctcgcagtgaccctctgcctggcaacgtgccagtccctccaggaagagactgtgcgcaaagggccggccggagacagaggaccacgcggggagaggggccctcccggaccacccggccgagacggtgaggacggcccaaccggcccgccaggacctccagggcctccgggccccccaggtttgggaggcaactttgctgcccaatacgacggaaagggagtggggctcggtcctggcccgatgggactgatggggcctcggggccctccgggggcagcaggagcaccgggaccgcagggattccagggtccagccggagaaccgggcgaaccaggacagactggaccagcaggagcccgaggcccggccggtcccccgggtaaagccggcgaagatggacatccgggaaagccgggccgcccaggggagcggggtgtggtggggccacaaggggcccgcggtttcccaggcactccggggctcccgggattcaaaggcatcaggggacacaacggactcgatggcttgaaggggcagccgggcgcaccgggagtgaagggggagccgggtgcccctggggaaaatgggaccccagggcagactggagcacgcggactgccgggggaaagaggtcgggtcggagccccgggaccggcaggcgccagagggagcgacggctcggtgggaccggtcgggccagctggaccaattggatcagcaggccctcctgggtttccgggcgctcccggaccgaaaggcgaaattggagctgtgggaaacgcaggcccagccgggccggcgggaccgcgcggggaagtgggactcccgggactttcaggaccagttggcccgcctgggaacccaggtgccaacggccttactggagctaagggagctgctggcctgccgggcgttgcgggtgcgccaggactgccgggacctcggggaatcccgggcccggtcggcgcagcgggagcaaccggggcgagaggcctcgtcggcgaaccgggcccagcagggtcaaagggcgagtccggaaataagggagaacctggatcagcgggcccacagggaccaccgggaccgagcggggaggaaggaaagcggggcccaaacggcgaggcgggatctgcgggtccacctggaccacccggtctgaggggcagcccaggatcgcgcggactgcccggagctgatggacgggctggagtgatgggccctccaggctcccgcggcgcgtcgggacctgcgggagtccggggtccaaacggagacgctggacgcccgggtgaaccaggactcatggggccgcgcggattgccgggttcgcctggaaatatcggccccgctgggaaggagggccccgtgggtttgccaggaatcgatggcaggccgggaccgatagggcctgcaggtgcgcgtggggaaccgggaaacataggtttcccgggaccgaagggccccaccggcgatccgggtaagaacggggacaaaggtcacgcgggtctggctggagcacggggagctcccgggccggacggaaataacggggcgcagggaccgcccggcccacaaggtgtgcagggaggcaagggagaacagggaccgccgggacccccagggttccaggggctgcccggaccgtcgggccctgcgggggaagtcgggaaaccaggtgaacggggtctgcacggcgagtttggactccctggcccggcggggccaaggggcgagcgcggtccccctggcgagtcaggcgctgcaggtccgactggaccgatcggatcgcggggacctagcggcccgcctggtcctgacggcaataaaggagaaccgggtgtcgttggtgccgtgggcaccgccggcccatctggaccttccggcctgccgggagagcgcggcgccgctggaatcccaggaggcaagggggagaagggagagcctggactccggggcgagatcggcaacccgggtagagacggagcccgcggagcccctggagccgtaggtgcacctggcccagcaggtgcaactggagatcgcggggaagccggcgccgcaggccctgcaggaccagcaggcccgaggggatctcccggagaacgaggcgaagtgggtcccgctgggcctaacggattcgccggacctgcaggggccgcgggccagccaggggccaagggagaacgtggagcgaaggggccgaaaggggaaaacggcgtggtcggaccaactggacctgtaggtgcagccggacccgcgggcccgaacggaccaccggggccggccggcagccgtggagacggagggcctcccggaatgactggctttccgggtgccgctggcaggaccggccccccgggtccgtcgggaatctccggaccgcctggccccccgggacctgcaggcaaagagggactgcgaggcccgcggggggaccaaggcccagtgggacgcacgggcgaggtgggagcagtggggccgcctggatttgcgggcgagaagggaccaagcggagaagcaggtaccgcgggtccaccaggcactccaggaccgcaaggactcctgggggctccgggaatcttgggcctgcccggatccagaggtgaacgtggattgccgggcgtcgccggagctgtgggcgaacctggaccactgggcatcgcgggtcccccaggagccagaggacctcctggggccgtggggagccctggagtgaacggagcgccaggcgaagctgggcgcgacggaaatccgggtaacgatggaccaccgggccgagacggacaaccggggcataagggggagagaggataccctgggaacattggacctgtgggagccgccggcgccccaggcccgcacggtccggtgggaccagccggtaagcacggaaaccgcggtgagactggcccgagcggtccagtgggcccggctggagccgtgggccccagggggccatccgggccgcagggaatccggggagataagggcgaaccgggagaaaagggccctcggggactgccaggcctgaagggtcacaacggactgcaaggccttcctggaatcgcgggccatcacggagatcaaggagccccagggtccgtgggccccgccggaccgcggggccctgctggacccagcggaccggcgggaaaggatggacgcaccgggcacccaggaaccgtgggtcctgctggcatcagaggtccgcagggtcatcagggcccggcaggacctccggggccgccgggcccaccggggcctcctggcgtgtcaggaggagggtacgacttcggatacgatggagacttctaccgcgctgatcagcccagatcggcgccatcgctgaggcctaaggactacgaggtggatgccactctcaagtcgttgaataatcagattgagactctcctcacgccggagggcagcagaaagaacccggcaagaacctgccgcgatctccggctgtcccatccggaatggtcgtccggatactactggatcgacccgaatcagggctgcactatggacgccatcaaagtctactgcgacttcagcactggagaaacttgcattagagcacagccggagaatatcccggcgaaaaactggtatagatcgagcaaagacaaaaaacacgtgtggctgggagaaaccatcaatgcgggatcgcagtttgaatacaacgtggagggtgtgactagcaaggagatggcgacgcagttggccttcatgcgcctgctggcgaattacgcctcgcagaacatcacttaccattgcaaaaactcaatcgcgtacatggacgaagaaaccggaaacctgaaaaaggcagtcatcctgcaggggtccaacgatgtcgagctggtggcagaaggcaactcgcgcttcacctacaccgtgttggtcgacgggtgtagcaagaaaaccaacgagtggggaaagactatcatcgagtacaagacgaacaagccatctcggctgcctttcctggacatcgcccccttggatatcgggggtgccgatcaggaattcttcgtcgacattggaccggtgtgcttcaag

SEQ ID NO: 1348 - DNA, 4098 bp, Artificial Sequence
  derived and/or modified sequence
atgctgtctttcgtggacactcggacccttctccttctggccgtcactctgtgtctggcaacctgccaaagtcttcaggaggagacggtgagaaaaggtcccgcaggtgatcgaggtcctagaggcgaacggggaccacctggtccccccggcagggacggggaggatggtccgaccggccccccaggcccaccgggtcctcccgggccccccggccttggagggaactttgctgcgcagtatgatggcaaaggtgtgggactcggacctggccccatggggttgatgggacccaggggacccccaggagcggctggcgctcctggaccccagggttttcaaggcccagccggcgaacctggtgagcccggacaaaccggacctgctggagcccggggaccggctggcccgccaggtaaggcgggcgaagacggacacccgggcaagccaggccggcccggagaacgcggggtcgtcggacctcaaggagcgcggggctttcctgggaccccagggctgccaggctttaaaggtatccggggccacaacggactcgacggattgaaaggccagcctggagctccgggtgtcaagggggagccaggcgctccaggcgaaaatgggacacccggccaaactggcgccaggggactgccgggggagagaggaagggtcggcgctccaggcccagcaggagctcggggctctgacgggtctgtcggtcccgtcggacccgccggacccatcggatcagccggtcctcccgggtttcccggcgcccccgggccaaagggcgaaatcggggccgtaggcaacgctggacccgcaggtccagccggcccccgaggagaggtcgggctgccggggctcagtggccccgtcggaccccccggaaacccaggagccaacggcctgacaggcgccaaaggagccgcaggcctgccaggagtggccggcgctcccggcctgccagggccgcgcggcattcccggccctgtcggtgctgctggagccactggtgcaagaggacttgtaggggaaccaggccctgccggctcaaaaggtgagagtggcaacaagggggaaccaggcagtgccggcccacagggacctcccggaccttcaggcgaagaaggcaaacgcggaccaaacggggaagcgggaagtgcgggacctcccggaccccccgggctgcggggatcccccggcagcagaggtctgccaggcgcggatggtagggcaggggtcatgggacctcctggatctcggggcgcctccggaccagccggagttcggggtcctaatggcgatgccggacggccaggagaacccggtctgatggggccccgggggttgcctgggagcccgggaaacatcgggcccgcgggaaaggaaggtcccgttgggctccctggcattgacggacgacccggtcctataggcccagccggcgctcgaggcgaaccagggaacatcggtttccccgggccaaagggacctacgggggatcctggaaagaacggtgataagggacacgcgggtctcgccggggctaggggagccccagggcctgacggaaacaacggggcccaaggtccgcctggccctcaaggcgtgcagggcgggaagggggaacaggggccccctggaccaccggggtttcaggggttgccaggtccatccggccctgccggagaagtggggaagcccggcgaaaggggcctgcacggggaattcgggctgcccggcccagccggtccacggggcgagcgcggccctccaggcgaatccggcgctgccgggccaacgggtccaatcggatctagaggaccctccggccccccagggcccgacggcaacaaaggcgagccaggggtggttggcgcagtgggtaccgctggcccctctgggccctcaggactccccggagaaaggggggctgccggcattcccggtggaaaaggcgagaaaggcgagcctgggttgcggggagagattggcaatcccggccgggacggcgcccgcggtgctccaggagctgttggcgctcctggacccgctggagctaccggggaccggggtgaggcaggggcagcgggacctgctgggccagccgggccacgagggtcaccgggcgagcgaggcgaagttggacccgctggccctaacgggtttgccgggcctgcgggagcagctggacagccgggcgccaaaggcgaacgcggcgcaaaaggcccaaaaggggagaatggcgtcgtgggccctacaggtccggtcggagctgccggtcccgccggccctaacgggccgcccggccccgccggtagtaggggcgacggcggcccaccagggatgacagggttccccggagccgccgggcgaacaggaccacctggcccaagcggcatttcaggtcctcctggtcccccaggccctgccggcaaggagggcctccgggggccaagaggggatcaaggcccggtggggcgcactggcgaggtgggtgctgttggacctccaggctttgccggtgagaaggggccttcaggggaggctggcactgccggaccaccagggaccccaggtccgcagggcttgctcggcgctccgggcatcctcggcctgccagggagtcgcggagagcgaggactgcccggggtcgctggtgctgtcggggagccaggacctttgggcatagcaggcccacctggggctaggggccccccaggcgcagtgggatcccctggggtaaatggagcgcctggcgaagccggaagagacggtaacccaggcaatgatggacctccgggaagagacggacagcccgggcataagggtgaaagaggatatcctggcaatattggccctgtcggagctgcgggagccccaggtccacacggtcctgtcggccctgcagggaagcatggaaacagaggcgagaccgggccatctgggcctgtggggcccgctggagccgtggggccacgagggccaagtggtcctcagggaatccgcggcgacaagggggagccaggagagaagggcccaagaggcctccctgggttgaaggggcacaacgggctgcagggattgccagggattgccggccatcatggtgatcagggcgcgccaggatctgtgggcccggcggggccaagaggtccggccggccccagtggaccagcaggaaaggacgggaggaccggccaccctggaaccgtcggcccggctggtattcgcggcccacaggggcatcaaggtcccgccggccctcctggaccccccggaccacccgggcctcccggagttagcgggggtggctacgattttggttacgatggagatttttatcgcgcagatcaaccaagatctgccccatcactgcggcctaaagattatgaggtggacgctacactcaaatctcttaataaccagattgagacacttctcacgcccgaaggaagtaggaagaaccccgctcgaacttgtagggatctcaggctgtcacaccctgaatggtctagcgggtactactggatagatcccaatcagggatgtaccatggacgctataaaggtctattgtgacttttcaacgggggagacttgtattcgggctcaaccagagaatatcccggcaaagaactggtacagatcaagcaaggacaagaagcatgtatggctgggggaaactataaacgctggcagtcagttcgagtacaacgtggagggcgtcacctctaaagagatggccacccagttggccttcatgcgactcttggccaactatgccagccagaacattacataccactgcaagaacagtattgcctatatggacgaggagaccggtaacctcaaaaaggccgtgatcctccaggggtctaacgatgtggagctggtggcagagggcaatagtcggtttacctacactgttctggtcgatgggtgcagcaagaagaccaacgagtggggtaagacaatcatcgagtacaaaaccaacaagccctctcgcttgccatttctggatatagcccctctcgacataggcggcgcagatcaggagtttttcgtcgacatcgggcctgtttgtttcaag

SEQ ID NO: 1349 - DNA, 4098 bp, Artificial Sequence
  derived and/or modified sequence
atgttgtcattcgtggacacccgcacacttcttctgctcgcggttacgctgtgccttgctacctgtcaatcattgcaggaggaaacagtgagaaagggacccgctggagacaggggccctaggggcgagagaggtccgcccggccccccaggacgcgacggtgaggatggaccgactggcccacctggtccccccggccctccaggaccacctggcctgggaggcaacttcgcggcacagtacgatggcaagggagtcggtctgggtccgggacctatgggcctgatgggacccagaggcccccctggagctgccggagctccaggaccccaaggctttcaaggtccagccggagagccaggcgagcctggccagaccggtccagcaggcgccaggggaccagccggtccgcctggtaaagccggtgaggatggccacccgggcaaacccggtaggcccggtgaaagaggagtagttggaccacagggtgcccgcggcttcccgggtacgcccggattgcctggattcaagggcatcagaggacacaatggactggacggactgaagggacagccgggcgcgccgggagtaaaaggcgagcctggcgcaccgggagaaaacggaaccccgggtcagaccggcgcaagaggcttgccaggtgagagaggccgcgtaggcgcccctggtcccgctggagcgcgcggtagcgacggatcagttggtcctgtcggcccggctggtcctataggatctgcgggaccccccggtttccccggcgcgccaggaccgaagggcgagatcggagcagttggcaatgcaggccctgcgggccccgctggacccaggggcgaggtgggcctgcctggactgagcggtccggttggacctcccggtaatcctggcgcaaatggactcacaggcgctaaaggagctgcgggcctccctggagtagccggcgcccctggactgcccggccccagaggtatacccggcccagttggagccgccggtgcgacaggagctagaggcttggttggcgaacctggacccgctggttccaagggagagagcggaaacaaaggtgaaccgggatcagcgggcccgcaaggaccccctggaccgtctggtgaagagggtaaacgcggtccaaatggagaggcaggctccgcgggtccacccggcccaccgggcctcaggggttctcctggaagtaggggtttgcctggtgcagatggaagggccggagtcatgggtcctcccggaagcagaggcgcctcaggacccgcgggtgttaggggcccaaatggtgacgcaggtagacctggcgagcccggactgatgggacccaggggattgccaggaagccccggcaacatcggtcccgctggcaaagaaggacctgtgggactcccgggcatcgacggccgccccggtccaataggccctgccggcgctagaggtgagcccggaaacataggcttcccaggtccgaagggaccaacaggagaccccggcaaaaacggcgacaagggtcatgcaggccttgctggagctcgcggcgcacctggcccagatggaaataatggcgctcagggtccccccggaccccagggtgttcaaggaggtaaaggagaacagggccccccgggcccaccaggtttccaaggccttcccggaccctcaggtcccgctggagaagtgggaaaaccaggtgagaggggacttcacggcgagttcggccttcctggaccagccggcccgaggggcgaaagaggcccgcccggtgagtccggcgcggcaggtcctactggaccaatcggctcaagaggcccatccggtccaccaggtccagacggcaataaaggtgagcccggtgtagttggcgctgtgggtacagcgggtccatctggccccagcggtctcccgggcgagagaggtgctgcaggaattccgggtggcaagggagagaaaggcgagcccggactcagaggcgagatcggaaaccccggccgcgatggagcaaggggtgctcccggcgcagttggcgccccaggtcctgctggcgcaaccggcgacaggggagaggcaggcgccgctggccccgcgggtcctgctggccctaggggttcccctggtgagcgcggtgaagtcggaccagcgggccccaacggtttcgcaggacctgccggcgctgcgggccagcctggcgcaaaaggcgaaagaggagccaagggacccaagggcgaaaatggagtggtgggcccaaccggtccggtgggcgcggcgggcccagcgggtcctaacggccctccaggccctgcaggatccagaggagacggcggaccccccggtatgactggattcccaggtgcagccggcaggacgggacctccaggcccgagcggtatcagtggtcctccaggccccccgggacccgctggtaaggagggcctgcgcggtcccaggggagaccaaggtcccgttggtcgcacaggcgaagttggcgctgttggccctcccggattcgcaggtgagaagggaccttctggagaggcaggtaccgcgggaccaccgggaacacctggacctcagggtctgctgggtgctcctggcatactgggactgcccggcagtagaggtgagcgcggcctcccgggagttgcgggtgcagtcggtgagccaggccccctcggcatagctggccctccaggtgcccgcggccctcctggtgcggtcggatctcctggagtcaatggcgctccaggagaggcgggaagagacggtaatccaggcaacgacggcccgccgggcagagatggacaaccaggtcataagggcgagagaggttatcccggcaatatcggcccggtgggcgccgccggagctccaggaccccacggtcccgtgggcccggctggaaagcatggtaataggggcgagacgggtccatccggccccgtgggaccagccggcgccgtgggtcccaggggaccgtccggtccccagggaatcaggggagataagggtgagcccggtgaaaagggaccgcgcggtctgccgggacttaagggtcacaatggcctgcagggacttcccggaatagccggccaccatggagaccaaggtgcaccaggaagtgtgggtcccgccggcccgagaggacctgcaggaccctccggacctgctggaaaggatggcagaaccggccatcccggaactgtgggtccggccggtattagaggtcctcaaggacaccaaggtcccgccggtccacccggacctcctggccctccaggtcctcccggcgtgtctggaggtggctacgacttcggatatgacggcgatttctatagggctgatcaacctaggagtgctccttcactgaggcctaaggactacgaggtcgacgccacactgaagtccctcaataaccagatcgagacgctgctgacccccgagggttccaggaaaaaccccgctaggacgtgtcgcgacctgcgcctgtcacatccagagtggtcttcaggctattactggatagaccccaaccagggatgcacaatggatgctatcaaggtatactgcgacttttctactggcgagacttgcatacgcgctcagcctgagaacatccccgccaagaactggtacagatcctctaaggataagaagcatgtatggctgggcgagacaattaatgctggttcccagtttgaatacaacgtggagggtgttactagcaaggaaatggcaacccagttggcttttatgaggttgttggccaattacgccagtcagaacataacttaccactgcaagaactctattgcttatatggacgaagagactggtaaccttaagaaagcggttattctgcagggaagtaacgatgttgagttggtggcggagggtaactctagattcacatatacggtccttgtggacggatgctctaaaaagacgaacgaatggggaaaaacaatcatcgaatataagaccaacaagccctccaggcttcctttcctcgacattgctcctttggatatcggaggtgctgatcaagaattctttgtagacatcggtccggtttgtttcaag

SEQ ID NO: 1350 - DNA, 4098 bp, Artificial Sequence
  derived and/or modified sequence
atgctgtcattcgtggatacccgtactctcctcctgttggccgtgaccttgtgcctcgccacctgccagtctcttcaggaagaaacggtcagaaaaggaccggccggtgatagaggcccacgcggggaaagaggtccgccgggccctccaggccgcgatggggaggatggtcctacgggccctcctgggcccccgggtcccccaggaccgcctggtctggggggcaacttcgcggcccagtacgatggcaagggcgtgggcctgggaccagggccaatgggactcatgggaccgagagggcccccaggcgccgctggtgccccgggcccgcaaggatttcagggtccggcgggagagccgggggaaccgggacagactggtcccgcaggtgctcggggtcccgcaggaccgccgggtaaggccggggaagatggacatccgggaaagccaggacgcccgggcgaacgtggggtggttggaccccaaggcgcacgcggattcccgggaacgccgggcctccctggcttcaagggaatccggggacataatggactggacggactcaaggggcaacctggcgcaccgggcgtgaagggggagcctggcgcacctggagaaaacggaactcctggacagaccggagcgcgagggctgccaggcgagagaggacgggtgggagcacctggcccggcgggagcgcggggaagcgatggcagcgtgggccctgtcggtcccgcgggtccgatcggctcggctggaccgccaggattccccggagctcccggcccgaaaggagagatcggcgccgtgggaaacgcaggaccggcggggccggcgggcccgagaggagaagtcggtttgcctgggttgagcggaccagtagggcctccaggaaacccgggagcaaacggcctgaccggtgccaagggggctgcgggactgcccggtgtggctggtgctccaggactcccaggtccacgcggaattcccggtccagtcggagctgcaggtgccaccggcgcgcgcggacttgtaggcgagccgggccctgctgggtcgaagggggagagcggaaataagggtgaacccggttcagcgggcccgcagggacctcctggaccttcaggggaagaaggcaagcgcggaccgaacggtgaagctggttccgcgggacccccaggcccacctggccttcggggttcgccgggctcccgcggactcccgggggccgacggtcgtgcaggggtgatgggccctccgggctcgcgcggagcgagcggacccgccggagtgcggggaccgaacggggatgccggtagacctggagagccaggactgatgggaccccggggccttccggggagccccgggaacattggaccagcaggaaaagaggggccggttggcttgccaggaattgacggtcggcctggaccaatcggaccagccggcgcccgcggagagccgggcaatattggcttcccagggcctaagggaccgactggagatccgggaaagaatggcgataagggacatgcgggactggccggagcacgcggtgctccagggcccgacggaaataacggagcccaggggccgcccggaccgcagggtgtccaggggggaaagggcgagcagggaccgccggggcccccggggttccaagggcttcccggaccgtctggccctgcgggagaggtcggaaagccgggagaaagggggctgcacggggagttcggcctccctggaccggcaggcccccgcggagagagaggacccccgggcgagtccggcgccgccggaccaactggaccgatcggctccagagggccgtccggaccacctggaccggacgggaacaagggcgagccaggggtggtcggagctgtcggaaccgctggaccctcgggaccaagcgggctcccgggagagcgaggggctgccgggattccgggaggcaagggggaaaagggtgaacctggccttaggggtgagatcggaaacccgggccgcgatggcgctcgcggcgcgccgggtgcggttggggcacccggtcctgctggagcaactggcgaccgcggcgaagcgggtgccgccggcccagcaggtccggcaggtccgcggggttcacctggagaacgcggcgaggtgggcccagccgggcctaatggttttgcaggtcccgccggtgcggcgggccagcctggggccaagggggagcgtggagccaaaggaccaaagggcgaaaatggagttgtgggaccaaccggaccggtgggagccgcagggccggcaggaccgaatggaccaccgggaccagcgggaagtaggggtgacggaggtccgcccggaatgactgggttccccggtgcggcaggcagaaccggaccgcctgggccgtcgggaatctcgggcccaccaggtccacctgggccagcgggaaaggaaggactgcggggacccagaggagatcaaggccctgtgggacggactggcgaagtgggagcggtcggccctcctggttttgccggcgaaaaaggcccatccggggaggcggggaccgctggcccgcccgggacccctggtccgcagggactcctgggcgccccaggtatcctggggctgcctggctcccgcggtgaaaggggtctgcctggtgtggctggagcagtcggagaacctggacctctggggatcgccggtccgccgggggcgaggggtccgccgggagccgtgggaagcccgggggtgaacggagcccctggcgaagccgggcgggacggtaatccaggaaatgacggtcctccagggcgagacggacaaccaggacacaagggagaaagaggatacccaggaaacattggcccggtcggagccgccggcgccccgggaccacatggtccagtcggccctgccggcaagcacggaaacagaggagaaactggaccgtcgggaccggttggtcctgctggcgctgtgggaccgcggggaccttccggtccacaaggaatccgcggagacaaaggcgagccaggagagaagggacccaggggattgccggggctcaaaggacataacggactccaaggactgccgggaatcgcaggccaccacggcgaccagggggcccccggcagcgtcggccccgctggaccgaggggcccggcaggtccctcgggaccggcgggaaaagatggaagaactggacacccgggaactgttggaccggccggcattcggggacctcaaggacaccaagggccggccgggccccctggcccaccaggcccaccagggccaccaggcgtgtccggagggggatacgacttcggatacgacggcgatttctaccgggcggaccagccacgctcagccccgtcgctgcgtccgaaggactacgaggtcgacgccacccttaagtccctgaacaaccaaatcgaaacgctcctgaccccagagggatccaggaagaacccggcaagaacctgtcgtgacctccgcctttcacacccggaatggtcgagcgggtactactggattgaccctaaccaaggatgcactatggacgcgatcaaagtgtactgcgatttctccactggagaaacttgtatccgcgcccagccggaaaacatcccggcgaaaaactggtaccggagctcgaaagacaaaaaacacgtctggctgggagaaactatcaacgccgggtcccagttcgaatacaatgtggaaggagtgacctcgaaggaaatggccacccagctcgctttcatgcgactcctggccaactacgcctctcagaacatcacctaccattgcaagaactcaatcgcctatatggacgaggaaaccggaaatctgaagaaggctgtgatactgcagggatcgaatgatgtagaactcgtggccgagggcaactcaaggttcacctatactgtgctggtcgacggttgctcaaagaaaactaatgagtggggtaagaccatcatcgaatacaagacgaataagccgagccgcctgcctttcctggatatcgctccgctggacatcggaggagcggaccaggagttttttgtggacataggcccggtgtgttttaag

SEQ ID NO: 1351 - DNA, 4098 bp, Artificial Sequence
  derived and/or modified sequence
atgctctcattcgtggatactcgcacccttctgctccttgcagtgactctttgtctcgcaacctgccagagcctgcaagaggaaactgtcaggaagggtccagccggtgacagaggcccacgaggagaacgagggcctcctggaccgcctggaagagacggggaagatggacctaccggacctccaggtccccccggcccccctggtccccctgggctcggcggtaactttgcagcgcaatacgacggtaagggagtcggtctgggacccggaccgatgggcctgatgggtccacggggaccacctggtgcagccggcgcacctggtccgcaaggtttccagggacctgcgggcgaacctggagaacctggacagaccggtcctgcaggggctcgaggaccagcagggccccctggcaaggcaggtgaggatggtcacccaggaaagcctggcagacccggagaacgaggagtggtgggtcctcaaggtgcacgcggttttcctggcacgcccgggcttcctggatttaagggtatcagagggcataatggcctcgacggcctgaaaggacaaccaggagcaccaggcgtcaagggagaacctggtgcacccggagagaacggaactccagggcagaccggggcacgcggcctgccgggggaacgtggaagagtgggtgcccccggtccggctggagcaaggggtagcgatggatcggtcggaccagtcggcccggcggggccaatagggtccgcaggcccgcctggcttcccaggcgcgcccggccctaagggcgagattggggctgtgggaaacgcaggaccggctggtccggcggggccgcgcggtgaagtcgggttgccaggactctcgggaccagttgggcctccggggaatcctggcgcgaacgggcttacgggtgcaaagggtgccgcaggcttgccaggagtggccggagcaccaggacttcccgggccccggggcattcctggccccgtgggggcggccggggccaccggtgcgcgcggtctggtgggtgagccaggacccgctgggtcgaaaggagagtccggaaacaagggggagccaggctccgcgggcccccagggccccccgggcccttcgggagaagaggggaagcggggacctaatggggaggcgggctcagctgggccacccggcccacccggcttgcggggctcacctggttcaaggggactgcctggggcggatgggagagctggtgtcatgggacccccagggagcagaggggcatcggggcccgctggagttagagggccaaatggagatgcaggtcgccctggtgaaccaggcctcatgggaccaagggggcttcccggatcgcctggcaacatagggcctgccggtaaggaagggcctgtgggccttcctggtattgacgggcgtccgggccccatcggtcccgcgggcgcacgaggcgaacccgggaatattggctttcctggcccaaagggacccaccggagatcctggaaaaaacggtgataagggtcatgctggtctggcaggagcgcgaggtgctccaggccccgatggaaacaacggggcacagggacctcctggacctcagggcgtgcaagggggaaagggagaacaagggccaccaggtccgcccggattccaaggcctgccagggccttctgggcctgcgggggaagtgggcaaacctggcgaacgtgggctccatggtgaattcggcctgcctggcccagccggaccacgcggagaaaggggacccccgggtgaatccggtgccgcgggtcctactggacctattggatcgcgggggccctcgggaccgccagggcctgatggaaacaagggtgaacctggagtggtgggagccgtcggtaccgcaggtcccagtggaccaagtggtctgccgggagaacgcggggcagcaggcatccccggaggtaaaggagagaagggggagcctggcttgagaggagagatcggaaaccctgggagagacggcgcacgcggcgcacccggtgctgtcggggcgccagggccagcgggagcaaccggagatcgaggcgaagcaggagccgcaggcccggcagggcctgctggcccgagaggatcgccaggtgagaggggggaggtgggacctgcagggcctaacggatttgctggaccggcaggagcagccggacaacccggcgctaagggagagcgcggagccaagggacccaagggagagaacggtgtcgtcgggcccactggaccagtgggtgcagcaggaccggcggggcctaatggtccacctggacctgcgggatccaggggtgacggcggccccccggggatgaccgggttcccaggggcagcagggcggacggggccaccagggccgagcggtattagcggacctcccggtcctccaggacctgccggtaaagaaggtttgcgtggcccccggggtgaccagggaccagtggggcggactggcgaagtgggggccgtgggaccacccggattcgcaggggagaaaggaccttccggggaagcgggtaccgcagggccgcccggtacccctggaccacaagggctcctgggcgcaccaggaattcttggcctccctggatcaagaggtgaaagaggacttccaggtgtggcaggcgcagtaggggaaccaggaccactcggaattgcagggccacctggagcacgtggtcctcctggggccgttggtagccccggggtgaacggagctcccggagaggccggacgggatggtaaccccggtaatgacggccctcctggacgtgatggtcaaccaggacataaaggggaaagaggttaccccggcaacatcggtcctgtgggagcagcaggtgcaccgggccctcacggccccgtgggcccagccggtaagcatgggaaccgcggtgaaactggtccttcaggtcctgtcggacctgcaggtgcagtcggtccaagaggtccaagcggtccacaaggaatcagaggcgataagggcgagcccggggaaaagggacctcgtggactgcctggacttaagggccataatggacttcagggactcccgggtattgccgggcaccacggtgatcaaggggcaccgggatcagtcgggccggccggacctagagggccagccggtccctcggggcccgccggtaaggacggacgcaccggacatcctggaaccgtgggccctgcaggaatacgggggccacaaggtcaccaggggccagcaggaccacctggcccgccgggaccgccggggcctccaggtgtgtccggtggaggatatgattttggctacgatggagacttttaccgggcagaccaacctaggagcgccccttcgctgaggccgaaggattacgaggtggatgcaactcttaagagcctcaataaccaaatcgaaactcttctgacccctgaaggttcaaggaaaaatcctgcccgcacctgccgtgatttgcggctgtcacacccagagtggtctagcggatactactggattgaccctaaccagggatgtaccatggatgctattaaggtgtactgtgatttttccactggagaaacttgtattcgggcacagccagagaatatccctgcaaagaattggtatcgctcctcaaaggacaagaaacatgtgtggttgggcgaaaccatcaacgcggggagccagtttgaatacaacgtagaaggggtgacttcgaaggaaatggcaacgcagcttgcatttatgaggctgcttgccaattacgcatcccagaacatcacttaccattgtaaaaactcgattgcgtacatggatgaagaaacggggaatctgaaaaaagccgtgatcctgcaagggtccaacgacgtggaactggtggcggaagggaacagccgtttcacgtacacggtccttgtcgatggctgctctaagaaaactaacgagtggggtaaaactatcattgaatacaagaccaataagccatcgagacttccatttcttgatatcgcgccactggacataggcggagcagaccaagaattctttgtggatattggtcctgtttgttttaag

SEQ ID NO: 1352 - DNA, 4098 bp, Artificial Sequence
  derived and/or modified sequence
atgctgtcattcgtggacaccagaactcttctgctgctcgctgtgaccttatgtctggccacttgccagagtcttcaggaagaaacagtaagaaaagggccggccggtgatcgcgggcccagaggcgagagaggacctccagggcctccagggcgggacggggaggacggtcctacgggaccacccggtcctccgggccccccaggtccaccaggcctgggggggaacttcgcggctcagtatgacgggaaaggagtgggactgggcccaggtcctatgggactcatgggcccccggggaccacctggagctgccggggctcctggcccacagggcttccaaggcccagctggcgaacccggagaaccagggcagaccggcccagccggtgcaaggggccctgctggtcccccaggcaaagcaggtgaggacgggcaccccggtaagcctggccgacctggggagagaggggttgtaggacctcaaggcgccagaggatttccaggtacacctggtctgccaggatttaagggaatacgaggccataacgggctggatggcctgaaaggccaacccggggctcccggggtgaaaggggagcccggggctcccggcgagaacggcacccccgggcagacaggagctcggggtctgcctggggagcggggacgagtcggagcacccggtcccgccggtgctagggggtctgatggttccgtggggcctgtgggccccgccggaccaataggctctgccgggccccctggtttccccggcgctccagggcccaagggagagatcggcgccgtcggcaacgccggtcccgctgggccggcgggtccaaggggtgaggtgggtctgcccgggctctcgggcccagtgggtccccctggcaaccccggcgccaacggacttacaggcgcgaaaggggccgcaggcctccccggagtggccggtgcacctggtctgcctgggcctaggggcattccaggacctgtgggagcagccggagcgactggtgctagagggttggtgggtgagccggggcccgctggcagtaagggagagagtggaaacaagggtgagccagggtccgccggaccgcagggtccacccgggcctagtggcgaggaagggaagagggggcctaatggggaagccgggtcagccgggcctcccgggcctccgggcctgagggggtcacctggctcccgcggacttcctggagccgacgggagagcgggggtcatggggccgccagggtcccgcggggcctccggtcctgcaggcgtcagaggccccaatggcgacgctggacgtcctggcgagcctggccttatgggcccacgaggacttcccggcagtcccggaaacatcggtcccgcgggaaaagagggtcctgtcggcctgccaggtattgatggaagacctgggccgatcggtcccgctggtgcacggggtgagcccggcaacatcggcttccccggccctaagggaccaacaggcgatcccggcaagaacggtgacaagggtcatgctggcctggctggggcccggggggcacctggcccagacgggaacaatggcgctcagggcccacccgggcctcaaggtgttcagggcggaaagggcgagcagggcccccccgggccccctgggttccaaggactaccagggcctagtggcccagccggcgaggtggggaaaccgggagaaaggggcttacatggtgaatttggtctccccgggcccgcggggccaaggggcgaaagaggccctcctggcgagagcggcgctgcagggcccaccggaccgattggctccagggggccctctggcccaccaggccccgacggaaataaaggcgaacccggggttgtgggagcagtgggtaccgctggaccttctggcccttctggcctgcccggtgagcggggcgctgctgggataccaggcggtaagggcgagaagggggagcctggactgcgtggagagattggaaatcccggtcgagacggtgctcgtggtgcacccggcgcggtcggcgcgcccggccctgctggtgcaactggggaccgaggcgaagctggcgccgcgggacccgctggccccgccggaccgagaggatcacctggcgagaggggagaggtcggacctgccggaccgaacgggtttgcaggaccagccggtgctgcgggccaacctggtgcaaagggggaacggggagcaaaaggccctaaaggagagaacggtgttgttggccccactggcccagtaggcgcagcaggcccggcgggacccaacggacccccagggccagccggctctcggggggatggagggccacccggaatgacggggtttccgggcgcagcggggagaactgggcctcctggtccctctgggattagtggccctcccggcccccccggacccgctggcaaggagggactacgaggaccacgtggagatcagggacccgttggacgcaccggcgaagtcggtgcggtcgggccccctgggtttgctggggagaaggggccctcaggggaggctggtacggcaggcccccccggaacgcctggcccgcagggcctcctgggagctcccggaatcctgggcctgcctggctccaggggagaaaggggccttccaggggtagccggagcagttggagagccaggaccactgggcatcgcaggacctcctggagctagagggcccccgggcgcagtgggaagccctggcgtgaatggcgcaccaggtgaggctgggagagatggtaatccgggtaacgacggtcccccaggtcgggatggacagcctggccataagggcgagcgtggctacccgggcaatattggacccgtgggagccgccggagcccctggtccccacggaccggtggggccagccgggaaacacggcaacagaggcgagaccggtcccagcgggcctgtcggtcccgctggagccgtgggtcccagaggacccagcgggcctcagggcataaggggtgacaagggggagcctggggagaaaggcccgaggggtttgccaggcctgaaaggacacaatggtctgcaaggcctcccaggaatagctggccatcatggtgaccagggagcccctggatctgttggacccgccggccctcggggaccagcagggccctcaggccctgccggtaaggacggtcgtactggccatccaggtaccgtggggcccgcaggcatccgaggcccacagggacaccagggaccggccggccctccgggcccccctggacctcctggcccccctggggtgtcaggtggcggatatgacttcggttatgacggggacttttaccgggctgaccagcctcgttccgctccctccctgcggcccaaggactacgaggtggatgcgactcttaaaagcttgaacaaccagatcgagactctgttgacccctgagggctccaggaaaaatccagccaggacatgcagagacttaaggctttctcatccggaatggagctcaggctactactggattgaccccaaccaggggtgcactatggatgccataaaagtgtactgcgattttagtaccggcgaaacctgcatcagggcccaaccagaaaacattcccgccaagaactggtatagaagtagtaaggataagaagcacgtgtggctcggcgaaaccattaacgcagggtcccagttcgagtacaacgtcgagggtgtgacaagcaaggaaatggctacacagctggcattcatgagattgttagccaattacgcctcacagaatataacatatcactgcaagaacagcatagcatacatggatgaagaaacaggcaaccttaaaaaggcagtgatcttacagggctccaacgacgtggagcttgtagctgaaggtaacagtcggtttacgtacacggtgcttgtcgacgggtgttcgaagaagacaaatgaatggggcaaaacgatcatagagtataaaaccaacaaacccagcagactgccatttctggacatagcccccttggacataggtggggcagaccaagagttcttcgtcgatattggacccgtgtgctttaag

SEQ ID NO: 1353 - DNA, 4098 bp, Artificial Sequence
  derived and/or modified sequence
atgcttagcttcgtggatactagaactctgttgctgctcgccgtgaccctctgtctcgcgacctgccaaagcctccaagaagaaaccgtgcggaaaggcccggcgggagatcggggccccaggggcgaacgcggaccgcctgggccaccggggagggatggcgaggacgggcccactggaccgcctggtccgccaggccccccgggcccccctgggctcggagggaattttgcagcgcagtacgacggaaagggggtgggactcgggccaggaccaatgggtctgatgggccctcgggggcctccgggggctgccggcgcccctggaccgcaggggttccagggtccagctggagagccaggagaaccaggtcagacgggcccggccggggcgcgcgggccagccggtcctcccggaaaggccggagaagatggtcacccgggaaaacccggccggcctggtgagaggggggttgtgggcccgcagggggcccgaggatttccgggcaccccaggtctgccaggattcaagggcattcgcgggcacaacggtctggacggccttaaggggcagccaggtgcaccgggagtgaaaggagaaccgggagcacctggcgaaaacgggaccccgggacagacgggcgccagaggacttccaggggagcggggacgggtgggagcaccggggcctgctggcgcccgcggttccgacggaagcgtgggaccggtaggacctgcaggcccgatcggaagcgcaggacccccgggatttcccggcgccccgggcccgaaaggtgagatcggagcggttggcaacgccggacccgcgggaccagccggccctcgcggcgaggtcggcctgccaggactgtcagggcctgtcggacctccggggaaccccggtgccaacggactgactggagcaaagggtgctgcggggcttccgggagtggctggggctcctggtctgcccggaccgcgtggaatacctggaccggttggagccgctggtgcaacgggtgcgcgaggcctcgtgggcgaacccggaccggcagggtcgaaaggagagtccggcaacaagggagagccagggtccgcgggaccacaaggtcccccggggccgtcaggagaagagggaaaaagaggaccaaacggcgaagcaggatccgccgggccgcccggtccgccgggtctgagaggttcaccgggttcgagaggactgccaggcgcagacgggcgggctggagtcatgggaccacctggtagccggggagcgtcgggtccagccggagtcagaggaccgaacggtgacgcggggaggcctggcgaacctgggcttatgggaccgagagggctgccgggctcaccgggcaacattggaccggctggaaaagaaggaccggtgggcctgcccggcatcgatggccggccaggaccgattggcccagcaggagcccggggggaaccgggcaatattggattcccgggaccgaagggacctaccggcgatccggggaagaacggggataaaggacatgccgggctggctggcgcgcgaggagcgccaggaccagacggaaataacggtgcccaaggtccgcctggaccccaaggcgtgcagggaggcaaaggcgagcagggaccgccaggtcctccagggttccaggggctgcctggtccgagcgggccagcgggtgaggtaggtaagccaggggaacgcggactccatggagagttcggactcccgggcccggcagggccacggggtgagcgcggtccacctggcgaatcaggcgccgctggaccgactggaccaatcggatcgcggggtccgtccggtccccccggtcctgacggaaacaaaggggaaccgggagtggttggggccgttggaaccgctggcccgtctggaccgagcggcttgccgggtgagagaggtgccgcgggaatcccaggaggaaagggagaaaaaggagagcccggactgcgcggtgagattgggaatcccggacgcgatggagcccgtggagctccaggggcggtgggagctcccgggccggcaggggccactggcgaccggggcgaggccggcgcggccggacctgcaggaccggcggggcctcggggcagccccggcgaacgcggtgaggtcggacccgccggccctaatggcttcgcaggaccggccggggctgctggccaaccaggggcgaagggagaacgcggagccaagggccccaagggagagaacggcgtcgttgggcctaccggacctgtgggcgctgctggccccgcagggccaaatggacccccaggcccagcggggtcgcgaggagacggcggtcctccggggatgaccggattcccaggtgccgccgggcgcaccggcccgccaggaccttcgggaatctcgggaccgccggggcctcctggccctgcagggaaggaaggcctccgcggtccgagaggagatcagggcccagtcggccgcactggtgaagtgggagcagtgggtcctcctggattcgccggcgagaaaggtccttcaggagaagctggtactgctgggcccccgggaaccccaggaccccaaggtcttttgggcgctcctggtatcctcgggctgcctggctcgagaggggaaaggggactgccgggagtggccggtgctgtgggcgagccgggaccactcggcatcgcgggcccgccgggagcaagaggaccccccggcgctgtgggatccccaggcgtgaatggagcgccaggcgaggcgggacgcgacgggaacccaggtaacgacggacccccgggtcgggacggtcagcctggacacaagggcgaacggggttacccaggaaatatcggaccggtgggagcagctggggcgccgggtccccacgggccagtggggccggccggaaaacacggcaacagaggcgaaaccggcccgtcggggccagtcggccctgcaggcgccgtcggaccgcggggacctagtggtccgcaaggcatccgcggggataagggtgaaccaggggaaaaggggcctcgtggacttccggggttgaaaggccacaatggtctgcaggggctccccggcatcgctggacatcatggggaccagggagccccaggatccgtcggcccagcgggaccaaggggaccggcaggacctagcggtcccgcaggaaaggatggaagaacgggacacccgggtaccgtcggaccagcaggtatccgcggcccacagggccaccaaggacctgcggggccgccggggccgcccgggcctcccggaccgccaggagtgtcaggcggtgggtacgacttcggatacgacggagacttctaccgcgccgatcagccgcggtccgccccaagcctccgcccaaaggactacgaagtcgacgccaccctgaagtcactgaacaaccagatcgagactctgctgactcctgaagggtcacgcaagaatccagcccggacttgccgcgacttgcgcctgtcccatccagaatggtcctcgggatactactggattgacccgaatcagggatgcaccatggatgcgatcaaggtgtattgtgatttctcgactggagaaacgtgcatccgtgcccaacccgagaacattccagctaagaactggtacagaagctctaaggacaagaagcacgtctggctgggagaaactatcaacgcaggatcacagttcgagtataatgtggaaggagtgaccagcaaggaaatggccactcagctcgcgttcatgaggctcctggcaaactacgcctcgcagaacatcacctaccattgcaagaactcgatcgcctacatggacgaggagactggtaatctgaaaaaggcggtcatcctgcaaggctcgaatgacgtcgagctggtggcagaaggaaactctcgcttcacctacaccgtacttgtggacggctgttccaagaaaactaatgaatggggcaagaccatcatcgagtacaagactaataagccgtcccgattgccgtttctggacatcgcaccactggatatcggaggagcagatcaagagtttttcgtggatatcgggccggtgtgctttaag

SEQ ID NO: 1354 - DNA, 4098 bp, Artificial Sequence
  derived and/or modified sequence
atgttgtcatttgtggacacaagaactctgctgctgctggcggtgaccctttgcctggcaacttgccaaagcctgcaggaagagaccgtgcgcaaagggccagctggggataggggccctagaggtgaaaggggccccccaggccctccgggaagagatggcgaggacggacctactggaccacctggaccaccaggacctcctggacccccagggctggggggcaatttcgccgctcagtatgatggaaagggggtgggcctggggccaggtcccatgggactgatggggccccgaggccctccgggagccgcaggcgcaccagggccccagggcttccaggggccagcaggggaacctggagagcctggacagactgggcccgccggtgctcgaggtcctgccggtccccctggtaaagccggagaagacgggcacccgggaaaacccggccggccgggcgaacgcggtgtggtcggccctcagggagctcgaggattccctggcactcctgggctgccagggttcaagggaattaggggccacaacggcttggacggcttgaagggacaaccgggggctccaggggtgaagggagaaccaggtgctcccggtgagaatgggacgcccggccagacgggcgcccggggactgcctggagagcgcgggagggtaggtgcccctggtccagcaggcgctcgaggctctgacggatccgtcggacccgtgggccccgccggaccaattggatccgctgggccccccggcttcccgggagctccaggacctaagggagagattggagctgttggaaacgcaggccctgcgggacccgcaggccccagaggcgaggttggactgccaggcctgtccggacccgtagggccacctggaaatcctggcgccaacggcctcacaggagctaaaggagccgctgggcttccgggggtcgcgggtgcacccgggctccccgggcccagaggcatcccgggtcccgtgggagccgctggcgctacaggggcgcgggggcttgtcggcgagccgggtcctgccggatccaagggtgaaagtggcaacaagggcgagccaggcagtgcgggtccacaagggcctccgggaccatctggggaagaggggaagagaggacccaacggggaggctggcagcgctggaccaccagggccgcctggcctgcgaggaagccccggttctcgcgggttgccaggcgctgacggcagagccggggtcatggggcctccaggatccagaggcgccagtggacctgcaggagtaagagggccaaatggcgacgcaggacggccaggcgaaccgggactgatggggccaagggggttgcctggtagtccagggaatattggaccagcagggaaggaaggccctgtgggtctcccgggaattgatggacggcccggacccattggtcccgctggggcccgaggagagcctggcaatataggattccctggccccaaaggacccaccggagatcccggcaaaaatggcgacaaagggcatgctggactcgccggtgcacgcggcgcaccgggcccagacggcaacaacggcgcccagggccccccaggcccacagggggtccagggcggaaaaggcgagcagggcccccccggccctcctgggtttcagggattgccgggccccagtggccctgccggcgaagtgggcaagcctggtgaacgggggctccacggtgagtttgggttgccagggcccgcagggccaaggggagaacgggggccacctggtgaatccggagcagctgggcccaccggccccattggcagtcgggggccatccggtccccctggaccggatggtaataagggcgagcccggggtagtaggagcagttggcacagctggcccatcaggcccttccgggttgcctggcgaaaggggggccgccggcatccctggtggcaagggggagaaaggggagccagggctgaggggcgagataggcaacccaggtcgggatggtgcccggggtgcaccaggggcggtcggggctccaggacctgcaggggccactggggatagaggggaagccggcgctgcgggcccagccggtcccgccgggcctcgggggagcccaggggagagaggcgaagttgggcccgcagggcccaatggatttgcaggaccggccggagccgccggacagccgggggcaaaaggagaacgaggtgctaaaggccctaagggagagaacggtgtcgtgggcccaaccgggccagtgggcgccgctggaccggccgggcctaatggcccgcccggccctgcgggatcccgaggtgacggtgggccccctggcatgactggatttcctggcgcagccggccgcacggggcccccgggaccttctggtattagcgggcctcctggtccccccggcccggcaggcaaagagggactccggggcccgaggggtgatcaggggcctgttggtaggactggcgaagtaggcgcggtgggaccacccggattcgctggtgagaaggggcccagtggagaggcggggaccgcggggccccctggaacgccaggaccacagggactgcttggcgcccctggcatactgggtttgccaggaagccgcggtgagaggggtctgccaggggtggcgggcgccgtgggagaacctggccccttgggaatcgcaggcccccccggagcccggggtccaccaggggctgtgggctcccccggcgtgaacggcgcgccaggggaggccggtagggacgggaatccaggcaacgatgggccgcccgggagagatggccagcccgggcacaaaggcgagaggggctaccccggtaacatcggacctgtgggcgctgccggcgctccaggacctcacgggcctgtgggacccgccggaaaacacggcaacaggggggaaacaggccctagtggacctgtgggcccggccggcgcagttggccctaggggcccctcaggaccccagggtataagaggagataagggcgagcctggagaaaaagggccccgcgggcttccaggtcttaaggggcataatggcctccagggcctgccaggtattgctgggcaccacggagaccagggcgcccccggtagtgttgggcccgccggacctagggggccagccgggccttcagggcctgccggtaaagacgggcggacagggcaccccggcacagtggggccggccggcatccggggaccgcagggtcaccagggtcctgccggtccccccgggcctccgggacccccaggacctccgggcgtgtccgggggcggttatgactttggctacgacggagatttttaccgggccgatcagcccagaagcgctccttctcttcgacctaaagactacgaggtggacgccacactcaagagcctgaataatcaaatagaaactctgttgactccagagggatctaggaagaacccagcccgcacttgccgcgacctgcggctgagtcacccagaatggagtagtggatactattggatcgatcccaatcaggggtgcacaatggatgctatcaaggtctattgtgattttagtaccggtgagacgtgtattcgggcccaaccggagaacattccagccaaaaattggtaccgctcctccaaggacaagaaacacgtgtggttgggggaaaccatcaacgccggatcccagtttgagtacaacgtcgaaggagtaactagcaaggagatggctacacagcttgcattcatgaggctgttggcgaattatgcaagccagaatataacctatcactgcaaaaactccattgcatacatggacgaagaaaccgggaaccttaaaaaagccgtgatcttgcaaggaagtaacgacgtcgagctggtcgccgagggcaacagccgctttacctacacagtcttggttgatgggtgctctaaaaagacaaatgaatggggaaagacgatcatagagtacaagaccaataagccgagtaggctgccatttctcgatatcgcacctctggatatcggaggggccgaccaagagtttttcgtggatattggtccagtatgcttcaaa

SEQ ID NO: 1355 - DNA, 4098 bp, Artificial Sequence
  derived and/or modified sequence
atgctctcttttgttgacacccgcactctcctcctcttggccgtaaccctatgcctggcaacctgccagagtctgcaggaggagactgtgcggaaaggcccggccggtgaccggggcccgcgcggtgagcgggggccacccgggccacccggacgcgatggcgaggatggccccacagggcccccgggtccacctgggccacctggtccgcccgggctgggtggaaattttgctgcccaatacgacggcaagggagtcgggttaggccccggccccatggggcttatggggcctcgcggtcccccgggggccgccggagcaccagggcctcagggtttccagggccccgccggggaaccgggtgaaccggggcagacgggccccgccggcgcccgaggccctgctgggcctcctggtaaggcgggtgaggacgggcaccctggtaagcccggacggcccggggaaagaggggtggttggtccccagggggccaggggcttcccgggtacgcccggtctgcccggcttcaagggcattcggggacacaatggtctggacggactgaaaggccagcctggcgcccccggggtaaaaggagaacctggggcgccaggggagaatggcacccccggtcagacgggagcgcggggcctgccaggcgaaagaggaagggtcggcgctccaggaccagctggtgcccggggctccgatggatcggtgggacctgtgggaccggctggtccgattggtagtgccgggccccctgggtttccaggcgcaccgggacctaagggcgaaataggcgccgtgggaaacgccggccccgctgggcctgctggacctagaggtgaggtgggactgcctggcctatccggccccgtcgggcctcccggtaatcccggggcgaatggcttaaccggagctaaaggtgccgccggcttgcccggcgtcgccggcgcacccggcttacctggccctagaggaatcccaggtcctgtgggggcggcgggcgccactggagctcgggggctggttggagagccagggccggctggctccaaaggggagagcggcaacaagggcgagcccggaagcgccgggcctcagggaccgcccgggccctctggcgaggaaggaaagcgcggacctaacggggaggccggcagcgccggccccccgggaccccccgggctgagaggcagcccaggatctcgcggactgccaggggccgatggaagggcgggcgtgatgggacctcctggcagcaggggcgcaagcggcccagccggcgttcgggggcctaatggggacgcaggaagacctggtgaacctggtctgatgggcccgagagggctcccgggctcgccagggaatatcgggcccgccgggaaggagggtcctgtggggctgccgggtatcgatggtcggccaggtcccattggcccagccggcgccagaggagagcccggaaatatcggcttccccggcccgaaggggcccacgggtgatccaggaaaaaatggcgataagggccacgccggactggccggagcgcggggcgcccctggcccagatggcaataacggggcgcagggtcccccaggtcctcagggcgtgcaaggcggcaagggggagcaaggcccccctggtcctccaggcttccagggcttgcctggcccaagcggtcccgcgggagaagtcgggaaacccggggagcgcggtttgcacggtgagtttggactgccaggacccgccggtccccggggagagcgcggcccaccgggggagtccggcgctgctggcccgacaggcccaataggtagcaggggacccagcggcccgcccggccctgacggcaacaagggggagcctggagttgttggagcggtcggtacggcaggccctagtggtccaagtgggctcccgggagagcgtggagctgcaggcattcctggagggaaaggcgaaaaaggtgagcctggattgcgcggcgaaattgggaatccaggtcgggacggtgcccgtggggccccaggagctgtcggtgcgcccggacccgcaggggctacaggtgatcggggggaagcaggcgcggcagggccagccgggcctgccggccccagaggaagtccgggcgagcgtggggaggtgggaccggctggtccgaacgggtttgccggccctgccggtgctgccggccagccgggcgccaaaggcgagcgaggcgccaaggggcctaaaggcgaaaatggcgtcgtgggcccaaccgggccggtcggggcggctggacctgccgggcctaacggacccccaggccccgcagggtctcggggcgacggaggacctccaggcatgacgggtttcccgggcgccgcgggcaggaccgggccacccggcccttctggcatttctggcccccccgggccacccggacccgctggcaaggaaggcctaaggggccctaggggggatcagggtcccgttggtcgaactggcgaagtgggggctgtcggaccaccaggctttgccggagaaaagggcccctccggagaggcgggaactgccggcccgcccgggactcctgggccccagggtcttctgggtgcaccagggatcctggggttacctgggtcccgcggcgagagaggattaccaggggtggccggcgcagtgggtgagccgggtccgcttggtattgcgggcccacctggcgctcgcggaccaccaggggctgtgggaagccctggggttaatggcgcccccggtgaagccgggcgcgacggtaatcccggtaacgacgggccccccggccgtgacggccagccagggcacaagggtgagagagggtaccccggcaacatcgggcccgtaggcgcagcgggagcccctggcccacatggaccagttggacccgccggcaagcacggaaatcggggggaaaccgggccttcaggcccggtggggccagcaggggcagttgggccgagaggaccgagcggacctcagggtatacggggggacaagggagaacctggtgaaaaggggccccgaggacttcccggcctgaaagggcataatggactccagggccttccaggaattgctggccatcatggagatcagggggcccccggcagtgtgggtcccgccggaccccgggggccagctgggccctctggccctgcgggcaaggacgggaggaccggccatccaggtaccgttggacctgcaggtattagagggccacagggtcatcaaggacccgccggaccccccgggccaccagggcccccggggccacctggcgtcagcggaggaggttacgacttcggttatgatggcgacttctatcgggccgaccagcctcggagcgcccccagcctgcgtcccaaggattacgaggtggatgcaactctcaagtcgctcaataatcagatcgaaaccctcttgacaccagagggctcccgtaagaatcccgccaggacgtgccgtgatctgaggctgagccaccctgaatggagtagtggctactactggatcgatcctaatcagggatgcaccatggatgccatcaaggtttactgtgatttctccacaggtgaaacatgcatccgggcacagccagagaacattccggccaagaattggtaccggagctctaaggacaagaaacacgtgtggctcggagaaacgatcaatgcaggttcacagtttgagtacaacgtagagggagttacttcaaaagagatggccactcaactggccttcatgagactgctagcaaattacgcctcacagaacattacgtatcactgcaagaacagcatcgcatacatggatgaggaaacgggtaatttgaagaaagccgtcatcctccaggggtctaacgatgtggagctggtggctgagggcaacagtcgattcacttacactgtcctggtcgatggttgctcgaagaagactaatgagtggggcaagactataatcgagtacaagacaaataagccaagtcgacttcccttccttgatatagcacctctggacataggcggagctgaccaggagtttttcgtggacatcgggcctgtctgcttcaaa

SEQ ID NO: 1356 - DNA, 4098 bp, Artificial Sequence
  derived and/or modified sequence
atgctttccttcgtggatactagaactctcctccttcttgccgttaccctctgcctggccacttgtcagtctttgcaagaggaaaccgtgaggaaggggcccgcaggggatcgtgggcctagaggggagcgcggtccccccggcccacccgggagagacggcgaagatgggccgaccggcccccctggaccacccgggcccccaggccctcccggtctgggtggtaactttgcagcacagtacgacggaaagggggtgggtcttggacctggacctatgggcctgatggggccaaggggacctcctggtgccgccggggcgcctggccctcagggatttcagggccccgccggtgaaccaggtgagcctggacaaaccggaccagctggagccagaggtcctgcggggccacccgggaaagcgggagaggacgggcatcccggtaaacctggtcgtccgggagaacgcggagtggtgggcccccagggtgcacgcggtttcccaggaaccccagggctccctggttttaagggtattcgtggtcacaacggtcttgacggacttaaaggacaacctggagcaccgggagtgaaaggggaacccggggccccaggcgagaatggtactcctggacaaactggcgcgagaggactccctggcgagcgtggcagagtgggtgcacctgggccagcaggcgcacgcggttcggatggatcggtcggaccagtcggaccggctggtcctataggatcggcaggtccacctggattccccggggcacccgggcctaaaggggaaataggtgcagtaggtaacgcaggcccagcgggccctgccggccctagaggcgaagtcggactgccaggattgtctgggcccgtgggacccccgggaaaccctggtgctaacggccttactggtgcaaagggcgcggctgggctgcctggcgtggcaggcgcccccggtctgcctggtcctaggggcattccaggtcctgtgggtgcagctggcgcaactggtgcacgcggccttgtgggagagcctggaccggcaggatccaaaggagaaagcggcaataaaggcgaacctggctcagcagggcctcaaggacctcccgggcctagcggggaagagggtaagagagggccaaacggtgaggcaggctcagcgggaccacctggaccaccgggactgaggggtagccctggaagcaggggtttgcctggtgccgacggtagggctggggttatgggtcccccgggttcaagaggggcatcgggtcctgccggagtccggggacctaacggagatgcaggcagacctggagaaccagggcttatgggccctcgcgggttgcctgggagcccaggtaacattggaccagccggcaaagagggtcctgtgggactcccgggaattgatggcaggccaggccctatcggtccggccggagctcgcggcgaaccgggcaacataggatttccaggaccaaaaggacccactggtgatcctggtaagaacggggacaaggggcatgcaggacttgccggcgcccgaggcgcacctggccctgatggtaataacggggcccaaggccctcctggtccacaaggagtacagggaggtaagggcgagcagggccctccaggaccaccggggttccaaggccttccaggtccatcaggtcccgctggagaagtcgggaagcctggagagcgcgggctgcacggtgagtttggactgcctggacccgcaggcccgcgcggtgaacgaggtcctccaggagaatcgggggcggctgggcctaccggtccaattggttcccgtgggccctccggaccccccggaccagacggcaacaagggagagccaggtgtggtgggagcagtgggtaccgcaggtccatccggacccagcggattgccaggagagcgcggtgcagctggaatcccgggagggaagggcgaaaaaggagagcctgggcttagaggagaaatcggcaatcccggaagagatggcgcacggggggcgcccggcgcggtgggcgctccagggcctgcgggggcaaccggcgacagaggagaagcaggtgccgcaggtcctgctggtcccgccggtccaaggggctcgccaggtgaacgcggtgaagtggggccagcagggcccaatggatttgccggtccggcaggtgcggcaggtcaaccgggggccaagggcgaacggggggcaaaggggcccaagggtgaaaacggggtggtcggacctaccggcccagtcggagccgcgggtcctgcaggtccaaacggccctccggggcccgccggttcgcgtggagacggcgggccgccaggtatgaccggatttccaggtgccgcgggcagaaccggacctcctggaccatcaggaatcagcgggccacctggtccaccaggaccagctggtaaggaaggtctgcgggggccacgaggggaccaaggtcctgtcgggcggactggcgaagttggtgcagtcgggcctccaggttttgcaggagaaaaaggcccatccggtgaggctggaaccgctggtccgcctggcaccccaggaccacaggggcttctcggcgcacctggaatcctggggctgcccggatccagaggtgaaaggggacttccaggcgttgctggcgctgttggagagcctggccctctcggaatcgcaggtccgcccggagctcggggtccgcctggtgcagtgggaagcccaggcgtgaatggtgcaccgggcgaagcagggcgggatggaaatccaggaaacgatgggcctccagggagagacggtcaacctggccacaagggtgaaagaggataccccggtaacatcggtcctgtaggggcggccggcgcgccaggcccgcacggacccgtgggtccagctggaaaacacggaaaccgaggagaaactggcccttcgggtccagtcggacccgcaggagcggtgggtccccgcggtccatcgggaccgcaaggaatccggggtgacaagggggaaccaggagaaaagggcccccggggcctgccggggctcaaggggcataatggtctgcaaggactgccgggaatcgccggtcatcatggcgatcagggagcacctggttccgtggggcctgcagggccgagaggcccggcagggccttctggcccagcaggaaaagacggacggaccggtcatccaggaacggttggacccgccggaattagggggccacagggacatcaagggccggcgggacctcccggaccccctggaccgcctggtccccctggagtgagcggaggagggtacgattttggttacgatggcgatttctatcgagcagatcaacctaggagtgcaccttcattgcgtccaaaggactatgaggtcgacgcaactttgaagtcactcaacaatcaaattgaaaccctgcttactcccgagggatctcgcaagaacccagcccgaacttgtcgtgatctgagactttcccacccggaatggtcgagcggatactactggatagatcctaatcagggttgcacgatggatgcaattaaggtctactgcgatttctccaccggcgaaacgtgcattcgcgcacagcctgaaaacattccagcaaagaattggtaccggtccagcaaggataagaaacacgtctggctgggcgaaaccataaacgcaggctcccagtttgagtacaatgtggaaggtgtgacctcaaaggaaatggccacccagcttgcatttatgagacttcttgcgaattacgcatcccaaaacattacttaccattgcaagaactcgattgcatacatggatgaggaaactggtaaccttaagaaggccgtcatcctccagggttcgaatgacgtggagctcgtggccgagggtaactcgcggttcacctacacggtgctcgtggacggatgttctaaaaagactaatgaatggggaaagacgatcattgaatacaagacgaacaagccatcccgactgccttttcttgatatcgcgcctctcgatattggaggggccgatcaagaattctttgtcgatattggacctgtgtgtttcaaa

SEQ ID NO: 1357 - DNA, 4098 bp, Artificial Sequence
  derived and/or modified sequence
atgctgtctttcgtggatacccgaacgctgttgctactagccgtgaccctgtgtctcgccacgtgtcaatctttgcaggaggagaccgtgcgcaaagggccagccggagaccggggcccacgcggcgagagggggcctcctggacctccgggccgcgacggagaagatggacctacaggccctccgggcccacctgggccacctggaccacctggccttggaggcaatttcgccgcacagtacgacggcaagggcgttgggctgggtccaggccctatgggtttgatgggccctcgggggccgcctggtgcagcaggagctccgggccctcagggctttcagggcccagcaggcgagccaggtgagccggggcagacaggtccagccggggctcgaggcccagctggcccccctggcaaggcgggggaggatggacaccccggtaagccgggccgaccaggcgagcggggcgtggtggggcctcagggagctcgtggctttcctgggacacccgggcttccagggtttaagggcattagggggcataatgggctcgacgggttgaaaggacagccaggagcacccggcgtgaagggtgagccaggagcgcccggggaaaacggcacacccggtcaaactggagcacgcgggctgccaggtgagcggggccgcgtgggggcccctggccctgcaggtgctcgaggaagcgatgggtccgttgggcccgtcggtccagctgggccaattggtagtgcgggcccccctggatttcctggggcgcctggacctaaaggagagatcggggccgtgggtaacgcaggtcctgccggccccgccggacctcggggagaggtgggtttgcccgggttaagtgggcctgtgggcccacctgggaatccgggggctaatgggctgactggcgcaaagggcgcggcaggcctcccgggcgtggctggagctccaggcctacctggcccaagaggtatcccaggaccagtcggcgctgctggagcaacaggtgccaggggattggtgggcgaaccgggtccggcagggagtaagggggagtccggcaacaaaggcgagcctggtagcgccggacctcaggggccacctggcccctcaggagaggagggcaagcgaggtccaaatggagaggccggtagcgcaggccccccaggccctccagggcttcggggatcaccaggttcaagaggtctgccgggagcggacgggagagcgggagtgatgggtcctccagggagcaggggcgccagcggccctgcaggcgtgagggggcctaacggggatgcgggccgcccgggtgaacctggactgatggggcctagaggcctccccggatcacccggtaacattgggcccgctggaaaagagggtcccgtaggacttcccggcatagatggcagacccggcccaattgggccggccggagccaggggggagcctgggaatatcggtttccctggaccaaaaggccctaccggcgatccaggaaagaacggggataaaggtcacgccggcctcgccggtgcgcgtggcgctcccggtcctgatggcaataacggtgctcagggtccccctggacctcagggagtccagggcggaaagggcgagcagggcccccctgggccccctggttttcagggcctgccaggaccaagcggacccgccggggaggtgggcaaacccggggaaagagggcttcacggggagttcgggctgccaggacccgccggcccaagaggggagagaggcccgcccggcgaaagcggtgcagccggaccaactggacccatcggcagcagagggccatcaggtccaccgggccctgacgggaataaaggagaaccaggcgtggtgggagctgtcggcactgcgggaccctcaggacccagtggcttgcccggtgaacggggagccgcgggaattcccgggggaaagggtgaaaagggcgaacctggtctgcgtggggaaatcggcaatccagggcgcgatggcgcccgcggagccccaggcgcagtaggtgcccctggaccagcaggggctaccggagacaggggtgaggccggtgcagccggccccgccggtcccgcggggccccgaggcagcccaggagagcgaggggaagtgggaccggccggccccaatggatttgctggacccgctggcgctgcaggacagccaggcgccaagggagaaaggggcgccaaggggcctaagggcgaaaacggagtcgtgggtccaaccgggccagtaggagccgccggacctgccggccccaatgggccgccaggacccgccggatctagaggtgatggaggtccccctggcatgactgggtttccaggcgctgcgggtcgtacaggacctcccggccccagcggcatctcagggccaccggggcccccggggcctgctggaaaggagggcttgcgaggtcctagaggagaccaaggtcccgtgggtaggaccggggaggtcggcgccgtgggccccccgggctttgctggagaaaaggggcccagcggcgaagccggaacagcgggtccccctggaactcccggaccgcaggggctcctcggcgccccaggtattctcgggttgccggggtcgcggggtgagagggggcttccgggcgttgcgggagccgtcggcgaacccggaccactcggcatcgctggcccccccggagctcggggcccacccggggccgtcggatcacccggagtcaacggcgcccccggcgaggccggaagggacgggaatccaggtaatgatgggccaccaggccgggacggccagcccgggcataaaggcgagcgaggctatccagggaatatcgggcctgtgggggccgctggcgcccctggcccccacggccccgtgggccctgccggtaaacacgggaatagaggcgaaaccggaccgtcaggcccagtgggccccgctggtgcagtcggaccacgagggccttccggaccccaagggattagaggggacaagggggaaccaggagagaaggggccgcgcggactgcccggattaaaggggcataatggcctgcagggcctgcctggcattgccggacatcacggggatcagggagcgccggggagcgtcggaccagcaggccctcgggggcccgccggacccagcgggccagctggcaaggatggccgcaccggacacccaggaaccgtgggcccagctggcatacgaggcccacagggtcatcagggtcctgctggcccgccaggcccacctggtccccccggccccccgggagtgagcggagggggatatgattttgggtacgatggcgacttttatcgggccgaccagccacgctctgctcccagcctccgcccaaaggattacgaggtggatgccaccctgaaatcccttaataatcagattgaaaccctgctgactcctgagggctcccggaagaatcccgctcgaacctgccgggacctccggctgtctcatccggaatggagttcaggctattactggatcgatccgaatcaggggtgtacaatggatgctattaaggtatattgtgacttttcaacaggcgaaacttgtatcagagctcagcccgagaatataccagccaagaactggtacagatcttcaaaggataagaaacacgtttggctaggggagaccatcaacgcaggatctcaattcgaatataatgttgagggtgtcacctcaaaggagatggctactcagctggcctttatgaggctgctggcaaactatgcttctcaaaatattacgtatcattgcaagaactcaattgcttacatggatgaggaaacaggtaacctcaagaaagccgtcatactacaggggagtaacgatgtcgagttggtcgctgagggtaattcccggttcacttatacggtcctggtggacgggtgttctaagaaaacaaacgaatgggggaagacaattatcgagtacaagacaaataagccatccaggctcccgtttctggatatagcgcccctcgacatcggcggtgcagatcaggagttcttcgtggatattggacctgtctgcttcaaa

SEQ ID NO: 1358 - DNA, 4098 bp, Artificial Sequence
  derived and/or modified sequence
atgctaagcttcgtcgatacaaggacgctcctcctgctggccgtaacactctgcttggctacatgccagtcactgcaagaggagacagttcgaaaagggcctgctggcgatcgggggcccaggggggaaagaggccctccgggcccaccaggccgggacggtgaagacggtccaaccggccccccgggtccgcctggcccacctggtccgccagggctgggcggtaacttcgccgcacagtatgatggaaaaggtgtcgggcttgggcccggccccatggggctgatgggtcctaggggcccgccgggagctgccggcgcccccggaccacagggcttccaggggcccgctggggagcccggcgagccaggccaaactgggccagctggggcgagaggacctgccggcccgcctggcaaggccggagaggacgggcaccccggaaaaccaggccggccaggagaacgtggggtcgtgggtccgcagggtgcacggggattccccggaaccccaggacttcccggtttcaaaggaatccgtgggcacaatggtctcgatggcctaaaggggcaacctggcgctcccggcgtgaaaggagagcctggggctcctggggaaaacggaactccggggcagacgggcgctcggggcttgcccggcgaacgcggcagggtcggcgcccccggacccgcaggagccaggggctccgacgggagtgtcgggccagtcgggcccgccggacccattggaagcgctggccccccaggcttcccaggcgcacctggacctaagggcgagattggcgctgtgggaaacgccggacctgctggacctgcaggaccccgcggcgaggtgggcctgccaggactgtcggggcccgtgggcccccctggcaatccaggagcaaatggtctaaccggggccaagggagcagctggattgcccggagtggcaggtgcccccggacttcccggtccgcggggaataccagggcccgtgggcgccgctggtgccactggggctcgaggtctcgtaggtgagcccgggccggccggaagcaaaggagaatccggaaataagggtgaacctggatctgcaggccctcagggccctcctggtccatcaggggaggaagggaaacggggcccgaatggagaagcaggcagcgcgggaccccccggaccccccggattgcggggcagccctggctcacgaggattgccaggtgctgacggcagagcgggagtaatgggacccccaggtagccgcggtgcatccggccctgccggagtcaggggccctaacggagatgccggccgccctggcgagcctggactgatgggcccccggggtttgcccgggagcccaggaaacatcggaccggccgggaaagaagggcccgttggactgccgggaatagacggtcgcccaggcccaattgggcccgctggagcccggggagaacccggcaacattgggttcccgggacccaaggggcctaccggtgatcctggcaagaatggagacaaggggcatgcgggactggcaggcgctaggggagcgcctggccctgatgggaataatggtgcgcaaggaccaccaggaccccagggggtgcagggagggaagggcgaacagggacctcccggcccaccaggctttcagggcctgcccgggccgagtggacctgcgggagaagtgggcaagcctggtgagcgggggctgcacggagaattcggactccccgggcccgctggccctagaggcgagagggggccccccggggaaagcggtgcggctggccctaccggcccaatcgggtcacgcgggccaagtggcccgccaggccctgacgggaataagggagagcccggggtggtgggggcagtgggaacagccggaccatcaggcccgtcaggcctgccgggcgagcgaggagcagccggaataccagggggcaaaggagaaaaaggtgaacccggcttgagaggagaaatcggcaatccagggagagacggcgcgcgaggcgcacccggcgctgtcggagcccctggacctgcgggagccaccggtgaccggggagaagccggtgctgcgggccctgcaggtccagctggcccccgtggcagccctggagagaggggcgaggtcgggcccgccggacctaacgggtttgcaggacctgccggcgctgcaggtcagcccggagctaaaggggaaaggggtgccaagggtcccaagggtgagaacggcgtcgttggtcccacaggccctgttggtgctgccgggccggcgggccctaatggtcctcccgggcccgctggaagccgaggggacggaggaccaccagggatgacgggcttcccaggcgccgccggacgtactggcccccccggcccctcgggcatttctggaccacctggccccccggggcccgctggaaaggaagggcttcgcggaccgcgtggggatcagggaccggtgggtaggacgggggaagtcggcgcagtgggtcccccgggcttcgccggtgagaaggggccaagcggcgaagccggaactgcggggcccccaggaacgccaggccctcaggggctgttaggtgcgcccgggatcctcgggctcccaggttcgaggggcgagcgcggcttacctggcgtcgcaggggctgtgggagagccgggacctctaggcatagccggcccccctggcgcccggggtcccccgggtgcagtcgggtccccaggcgtcaatggggcaccaggcgaggctgggagagatggcaacccagggaatgacggcccacccggacgggatgggcaacccggtcacaaaggagagagaggctatcccggaaatatcggacccgtgggagcagcaggcgcccctggcccgcacggtcctgtaggccctgccggcaaacatggcaaccgtggggaaacaggcccaagtggcccggttggcccagcgggagccgttggcccccgcggaccaagcgggccgcagggaattcgcggggataagggggagcccggagaaaagggacctcgcggcctgcccggtctgaaaggccacaacggccttcaggggctgcctggcatcgcaggacaccatggggaccaaggggcacctggaagcgtcgggccagccggcccccgaggacccgcagggccttctggtccagctggaaaggatggcagaactgggcacccagggaccgtggggcctgcgggaatcagaggaccacagggtcatcagggacctgcaggcccccctggaccaccagggccgcctggcccccctggagttagcggtggcggctacgacttcggctatgatggggacttctacagagcagaccagcctaggtctgcaccatcattacgaccaaaggattatgaggtggatgccaccctgaaatcactgaataatcagattgagacgctgttgaccccggaaggatcccgcaaaaaccccgctcgtacttgccgggatcttcggttgtcacaccccgaatggagctcaggatattactggatcgaccctaatcagggctgtactatggacgcaataaaagtctactgcgactttagcactggggaaacctgcatcagagcccagcccgaaaacattccagccaaaaactggtaccgttcttccaaggataagaaacacgtgtggttgggggagaccataaacgccgggagtcagtttgaatataacgtagagggggtgacgtccaaggaaatggccacccagctcgcgtttatgagacttctggccaattatgcttctcagaacatcacttatcactgcaaaaatagcattgcatacatggatgaggagacaggaaacctgaaaaaagctgtgatactgcaagggtccaatgacgtggaactggtcgccgaaggtaactccagatttacatacacagttctagtggacggctgtagtaagaaaacgaatgagtgggggaaaacaataatcgagtacaagacaaataagccttcccggctcccatttttagatattgctccactggacattggcggagctgaccaggaatttttcgtggatatagggccggtgtgtttcaaa

SEQ ID NO: 1359 - DNA, 4098 bp, Artificial Sequence
  derived and/or modified sequence
atgctttcatttgtggatacccgtacgctcctgttacttgccgtgacattgtgcctcgctacctgccagtccttgcaagaggagactgtccggaagggccctgcgggagatagaggcccacggggggaacgcgggccaccgggtccgcctgggagggatggtgaagatggcccaaccggacccccagggcctcccggccccccaggcccacctggactgggcgggaacttcgcagcccagtacgatggtaagggcgttggcttgggaccaggcccgatgggtttaatggggcctcgaggtccccccggagctgctggggccccaggtcctcaggggttccaggggcccgcgggtgagcctggcgagcccggacagacggggcctgccggcgctcggggacctgctggtccccccggaaaagcaggtgaggacgggcatcccgggaagccgggacggccgggagagcggggtgtcgtgggcccacagggcgccagaggcttcccagggacccctggactcccggggttcaagggaatacggggccacaatgggctggacggcctgaagggccaacctggcgcgccaggagtaaagggggaacctggcgccccaggggagaacggaaccccaggccaaaccggcgcccgggggttgccaggagaacggggccgggtcggtgctcccgggccagccggggctagagggtctgatggcagtgtgggtcccgtgggaccagcgggtcctatcggtagcgcaggcccgcccggtttccctggggccccagggcccaaaggtgagataggcgctgtgggcaacgcaggtcccgccggccccgccggacctcggggggaagtgggcctgcccggcctctctggccccgtggggcctcccggcaaccctggagccaacggattgaccggagctaagggggccgccggcttgcccggagtagctggagcccccggccttccaggccccaggggtatacctggccctgtgggggctgcgggcgccacaggcgcccgaggcctggtgggcgagcctggaccggctgggagcaaaggtgaaagtggcaataagggagagcccggtagtgctggcccccagggccctcctggccccagcggtgaagaaggtaagcgcggcccaaacggcgaagccgggagcgccggcccacctggaccccccggactgcggggctcaccagggagccggggactccctggagcggatgggcgtgccggggtaatgggcccccctgggagtcgaggtgcgagtggacccgccggcgtccgggggcctaacggtgacgccgggcgaccaggggagccgggcctgatgggtccgcggggcctgccgggtagccctggcaacataggcccagcagggaaagaaggaccggttggattgcctgggattgatggccggcccggccccatcgggcccgcgggggctaggggagaaccgggaaacatcggctttccaggcccaaaagggccaactggagatcctggcaagaacggagataagggccatgcaggcctggccggcgctcgaggagccccgggaccagacggaaataatggggctcagggtccgcctgggccccagggagttcagggtggcaagggcgaacaggggccacccggacctcctggattccagggtctgcccggcccatccgggcctgcaggagaggtaggaaaaccaggtgagagaggactgcatggcgagttcggccttcccgggcccgcagggcctagaggcgagcgtggtccccctggcgaatcaggggcggccggtcccaccggtccaataggatctagaggcccgtctggccctccgggtccagatgggaataaaggagaaccaggagttgtcggagcagttgggaccgcaggccctagcggccctagcggcttgcccggggaacgtggggctgccggcattcctgggggtaaaggagagaagggtgaacccggattgcggggcgagatcggcaatcccggccgcgacggggcacggggcgccccgggggcagtcggagcccctggtcctgccggcgcgaccggggacagaggagaagcaggagccgccggtcccgccggtccagccgggccaagagggtcccctggcgaaaggggtgaagtggggccggccgggcctaacggattcgcgggaccagccggcgcagctggtcagcccggggctaaaggggagagaggagctaagggacctaaaggcgagaacggggtggtcggtccaaccggcccagtgggtgccgcaggaccagccgggcctaacggcccccccgggcctgccggaagcagaggtgacggcggccctcccggaatgacgggtttccctggggccgctggacgcacaggaccaccgggaccttctgggattagcggccctcccggccccccaggtcctgcagggaaggaaggacttcggggtccccggggagaccagggtcctgtcggcagaacaggagaagttggggccgtaggccccccagggttcgcaggtgaaaaagggccgagtggcgaggccggaaccgcagggccaccaggcacacctgggccacagggcctcttgggagccccaggcatcctgggtctgcccggatctagaggagagcgaggcctgcccggcgtggcgggagccgtcggtgagcccggcccactcggcattgctggaccacccggggccagggggcctcccggggccgtggggtctcccggtgtcaacggcgcccctggggaagcaggaagagacggcaaccctggaaatgatggccctcctggccgagacggacagcctggccacaagggggaaagaggctatcccggtaatatcggacccgtgggcgccgccggcgcccctggacctcatgggcccgtcgggcccgccgggaagcatggaaaccgcggagagaccggcccctccggaccagtgggcccagccggtgctgtcggccccagaggtccgagcggaccccagggaatacggggagacaagggagagcccggggaaaaggggcctcgtggcctcccaggattaaaaggccacaacggccttcaaggacttcctggcatcgccggacaccacggggaccagggagctcctggttcagttggcccagccggtccaagaggccccgctggaccaagcggacccgccgggaaggatgggaggaccggtcatcccggcaccgtggggccagcaggaatccgcgggccacagggccatcaaggccccgccggaccccctgggccgccaggtcctcccggccctcctggtgtttctggcggaggctatgattttggctatgacggggatttctaccgggccgaccaaccccgttccgcaccatccctccgtcctaaagattacgaggtcgatgcgacgctgaagagcctcaacaatcaaatcgagacgctgctcacacccgagggatcccgaaaaaatcccgctagaacttgccgtgatctgcgcctgagccaccccgaatggtcatccggttattattggatagaccctaaccagggttgcacaatggatgcgattaaggtatactgtgatttcagtaccggtgaaacctgtataagagcgcagccagaaaatatcccagccaaaaattggtaccggtcaagtaaagataagaaacatgtgtggctgggggagactattaatgcagggtcacagtttgaatataatgtggaaggagtgacgtcgaaggagatggctacccagcttgcattcatgcgtctgttggccaattatgcatcgcaaaacataacctaccactgcaaaaattccatcgcctacatggacgaggagacagggaatctgaaaaaggccgttatcctccaagggtcaaatgatgtggaattggtcgctgagggaaactcaagattcacttacactgtgcttgttgacggttgcagcaaaaagacaaatgagtggggcaagaccatcatcgagtacaaaactaataagccctcccgcctaccttttcttgacatcgcaccactagatatcggcggcgcggaccaagaattcttcgtggatatcggacccgtgtgcttcaaa

SEQ ID NO: 1360 - DNA, 4098 bp, Artificial Sequence
  derived and/or modified sequence
atgctgtcctttgtggacaccaggactctgttgctcctcgccgtcactctgtgcctcgccacctgtcaatcgctccaagaagagactgtgcgcaaggggcctgctggagatcgcggcccgcgcggggagcgcggccccccgggcccaccaggtcgcgatggcgaggacggaccaactggaccgccgggtccaccgggcccgccgggccctcctggactggggggtaatttcgcagctcaatacgatggaaaaggcgttggactcggacctggtccaatgggactgatgggaccgcggggaccacccggtgccgcaggagctccgggaccgcagggatttcagggacctgctggcgagccgggtgaaccaggccagacgggtccggccggtgcaagggggccggcgggtcctcccggaaaagcaggtgaggatggacatccgggcaagcccgggcgccccggagaacgcggagtggtgggacctcagggtgccaggggattcccgggaactccggggctgccaggcttcaagggtattcgaggacacaacggcctcgacggactgaagggacaacccggggccccgggcgtcaagggtgagccgggtgcgccgggagagaacggcaccccgggccaaaccggagctcgcggactgcccggggaacgcggccgggtcggagctccgggaccggccggagcacggggaagcgatggctcagtcggtccggtgggaccagccggaccaatcggatcggcagggccaccgggcttccccggggccccaggtccaaagggtgagattggtgcggtggggaacgccggccccgccggcccggcaggaccacggggagaggttggcctgcccggactctccggaccagtgggacctcccggtaacccgggagccaatgggctcactggggccaaaggggccgcaggcctcccgggggtggcaggcgcccctggcctgccgggacctagaggaatcccgggcccagtgggggcggccggagcgaccggagccagagggctggtcggcgaaccaggacctgccggatcgaagggcgaatcgggaaataagggagagccgggcagcgcgggaccgcaggggccaccgggacccagcggagaagagggaaagcgcggccccaatggcgaggccgggtcggcgggaccaccgggcccgcccggactgcgggggagcccgggatcacggggccttccgggagccgatggcagagccggagtgatgggacctccgggaagccggggcgcttcaggaccggcgggagttcgcgggcctaacggagacgcaggacgcccaggggaacccggcctcatggggccgcgtggactgcctggttccccgggcaatatcggacccgccggaaaggaggggccggtcgggctgcctggcatcgacggaaggccaggcccaattggaccagcaggtgcccggggagagcctggtaatatcggattccctggacctaagggacctaccggggacccgggaaaaaacggagataaagggcacgcaggactggcaggtgcgcggggagccccgggacccgacggcaacaacggggcgcaggggccgccggggccacagggagtccaaggaggaaagggtgaacagggaccgccggggcctccgggattccagggattgccaggcccgtccggcccggccggggaagtgggaaagccgggtgagcggggcctccacggggaattcggacttcctggcccagccggcccccggggagagaggggaccaccgggggagtcgggagctgccggacctaccggtcctattggttccaggggcccgtctggaccgcctggacctgacggaaacaagggtgaaccgggcgtcgtgggagccgtgggaactgctggaccatcggggccgtccggactgcccggcgaacgcggtgccgccggaatcccgggaggcaagggggaaaaaggagaaccggggctgaggggcgagatcggaaatccgggtagagatggagcccggggggccccgggagccgtgggagctccgggaccggcgggagcaactggcgaccgtggggaagccggggcggcaggcccagcaggaccggccggaccgcgcggatctcccggagaacggggcgaggtggggccggctggtcctaacggcttcgctggcccggccggtgcggctgggcagccaggggctaagggcgaacgcggcgcaaaaggaccgaaaggcgaaaacggagtcgtcggtccgaccggaccggtcggagccgccggcccggcgggacccaacggaccgccaggaccggcgggatcgcgcggcgacggcggcccaccgggcatgaccgggtttccgggcgcggcgggccggactggccccccggggccgtcaggaatttcgggccctccgggaccaccgggacccgccggtaaggagggccttcgcggaccgcggggggatcaggggcctgttggtcgcaccggagaagtgggcgccgttggaccgcctggttttgctggagagaaggggccgtcgggagaagcgggaactgcagggcctcctggtacccccggaccgcagggactcttgggagctccgggcattctcggtctgcctggttcacgcggagaacgcggactccccggagtggcgggtgcggtcggagagccgggacctctgggaattgccgggccaccaggtgccagaggaccgccgggggccgtggggtcgccgggagtgaacggggcgccaggagaagccggacgggacggaaatccaggcaatgacgggcccccgggacgcgacggccagcccggacacaagggcgagagaggctacccgggcaatatcggtccggtcggagcagcaggtgcgccgggcccacatggaccggtgggcccagcgggaaagcacgggaatcgtggagagacggggccgtccggccccgtgggacctgccggcgcggtgggaccacggggaccgtccggtccccaaggtatccgcggtgacaagggggagccaggggagaagggacccagaggactgcctggtctgaaaggacacaatggtctgcaaggtctgccaggaatcgcaggacatcatggagatcagggagctccgggctcggtgggtcctgccggaccccgcggaccggccggtccatcaggaccagcaggaaaagacggacggacgggtcatccaggcaccgtgggccctgctggaattaggggaccgcagggacatcaggggccggcgggtccgcctggcccgccaggtccgccgggaccgccgggagtgtcggggggaggatacgatttcggttacgatggcgatttctaccgggcggatcaacctcggagcgcgccgagcctgcggccaaaggactacgaggtcgatgccactcttaaatcgttgaacaatcaaatcgaaaccctgttgaccccggaaggcagccgaaagaaccctgcacgcacttgccgcgacctgcggctctcccacccggaatggtcatcgggctactactggattgaccctaaccaggggtgcacgatggacgctatcaaagtgtattgtgacttcagcactggcgaaacctgtatccgcgcacaaccagagaacatcccagctaagaactggtaccggagcagcaaggacaaaaagcatgtgtggctgggagagactatcaacgcgggttcccagttcgaatacaatgtggagggagtgacctcaaaggagatggcgactcagctggcgttcatgcgtctgctcgccaactacgcgtcgcagaacataacctaccactgtaaaaacagcatcgcgtatatggacgaggaaactggaaacctcaagaaggctgtcatcttgcaaggatccaatgatgtggaattggtcgccgagggcaattcgagattcacctacaccgttctggtggacggatgctccaagaaaaccaacgaatggggcaaaaccatcattgaatacaaaactaacaaaccttcacgcctgccctttctggatatcgccccactcgatataggaggagctgaccaagagttcttcgtggatatcggacctgtgtgctttaag

SEQ ID NO: 1361 - DNA, 4098 bp, Artificial Sequence
  derived and/or modified sequence
atgttgtcgtttgttgatacccgcactcttcttcttctcgcggtcactctgtgtctggccacttgccaatcgctgcaggaggaaactgtccgcaagggcccggcaggggaccgtggtccgagaggggaacgtggccctcccggccctcctggtcgtgacggtgaagatggtccaaccggaccacccggcccgcccgggccaccaggcccgcccggtcttggagggaatttcgcagcgcaatacgatgggaagggtgtcgggctcgggccgggtccgatggggctcatgggcccaagaggccctcctggggccgcgggggcacccggtccacaggggtttcaggggcccgccggcgagccaggcgagcctggccaaaccgggcctgcgggcgccagagggccggccggtcctccaggtaaggccggagaggacggtcatcccggcaagccaggccgtcccggagagcggggcgtggtgggtccacagggagcaaggggatttccaggaaccccaggacttcccggttttaagggaattagaggtcacaacggactggacgggcttaagggtcaacccggagcacccggagtcaaaggggaacctggggcgcctggagagaacggcaccccggggcagaccggcgcgagggggctccctggagagaggggacgcgtgggagctcccgggcctgccggcgcacgagggagcgatggatccgtgggaccagtcggacccgcgggcccgatcggttccgctggtccaccaggcttccccggcgctcctggccctaaaggggaaatcggagccgtgggaaacgccggtcctgcggggcccgctgggcctcggggtgaagtcggactccccggtctttcgggaccggtggggccacccggtaatcctggtgcaaatggacttactggagcaaaaggagctgctgggcttcctggagtggctggagcaccgggactccctggaccgcgcggcataccaggtccagtgggggccgcaggagccaccggggcaagagggctggtcggtgagccaggccccgctggttccaagggagaatcgggaaacaaaggtgaaccgggatcggcaggaccccaaggtccaccgggaccttcgggtgaagaaggaaaacgcggacctaacggtgaggcaggttccgctggaccgcctggtcccccaggcctcaggggatctccgggctctaggggacttccaggagcggatggtcgcgcaggcgtgatgggaccgccagggtcgagaggagcatccgggcctgcaggagtgcgaggcccaaacggagatgcaggacgccctggcgagccaggactgatggggccacgggggcttccaggatcacctggcaatataggaccagctgggaaagaaggacccgtggggctcccaggtatagacggacggcccggtcctataggcccagctggcgccagaggcgaacctggaaacataggttttcccggacccaaagggccaaccggtgatccgggaaaaaacggtgacaagggacatgcaggtcttgcaggagcccgaggtgcaccgggtcctgatgggaacaacggggcgcagggcccacctggaccacaaggggtccaaggtggcaaaggagaacaaggacctccggggccgccaggcttccagggattgcctggcccttccggccctgcgggcgaagtgggcaagcctggagaacgtggcctgcacggagaatttggacttcctggtccggcgggcccgagaggagagagaggcccgccgggagagtcgggagctgcgggcccaactgggccgatcggttcacggggtcctagcggccctccaggtcctgacggtaacaagggggagcctggcgtcgtcggagccgtcggcaccgcgggtccatcaggaccttcgggactccccggcgagaggggggcagcaggaatccctggcgggaaaggggaaaagggggaacctggactgagaggggaaattggtaacccgggacgagatggtgccaggggcgcgccaggagccgtcggtgcccctggtccggcaggcgcaactggtgacaggggagaagccggggcagccggaccggcaggtccggcagggcctcgggggtcgccaggagaacggggcgaggttggccctgctggtccaaatggtttcgcaggccctgctggagctgcagggcagcctggcgcgaagggagaaaggggggcaaaaggacccaagggagagaacggagtcgtgggccctaccgggccagtgggagccgccgggccggctggaccaaatggtccccccggccctgccggctcgagaggagacggcggacccccaggtatgactggcttccctggagcagccggcagaaccgggcctccaggaccctccggaatcagcggccccccaggaccaccaggtcctgcaggtaaggagggccttagaggtccccgcggagatcagggtccagttggcagaactggagaagtgggagcagtcggtccccctggttttgccggagagaaagggccatcaggagaggcaggcactgctggtcctcccggtacccccgggcctcagggtttgctgggagcgcctgggattctgggccttcctggtagcaggggtgaaagggggcttcccggagtcgcaggcgcagtgggagagcctggtcctctgggtattgccggaccacctggtgctcggggtcccccaggtgcagtgggatcgcctggggtgaacggggcccctggtgaagcagggagagatggaaatccaggtaacgatggacctccaggcagagatggacaacctggtcacaagggagagcggggttatcctgggaatattggacccgtgggtgccgccggggcacctggccctcatggacctgtgggcccagccgggaagcacggaaaccggggagagacgggcccctcaggaccggttggaccggctggtgcggtgggtcctcgtgggccatctgggccacagggaatccgaggggataaaggagaaccaggggagaagggccctcggggactcccgggattgaagggacataatgggctgcaaggtctgcctggcattgcagggcatcatggggatcagggtgcacctggttcggtggggccagcaggccctcgaggtcccgcaggaccatccggcccagccggcaaagacggccgcaccggacatccgggtaccgtgggacccgcgggaattaggggtccccaaggtcaccaaggtccagccgggccgcctgggcctccgggaccccccgggccccccggcgtgagcggaggtggttacgatttcggatacgatggagacttttaccgggcagatcaacctagatccgcgccatcactcagacccaaggactacgaagtggacgcgactctgaagtccttgaacaaccaaatcgagacgcttctcacccccgaaggttcccggaagaatccagcgcgaacttgcagagatctgcgcctttcacatcctgaatggagttccggatactactggattgaccctaatcagggctgcaccatggatgcaattaaggtttactgtgatttttcaaccggcgaaacctgtatccgcgcgcagccagaaaacatccctgcaaagaactggtaccgatcatccaaggataagaagcacgtgtggctgggagaaaccattaatgcaggcagccagttcgaatacaacgtcgaaggtgtgacgtcgaaggaaatggccactcagctggcattcatgcgtctcctggcaaactacgcgtcgcagaacatcacctaccattgtaagaactcgattgcatacatggacgaagaaaccggaaatctgaagaaggcagtgatactgcaaggaagcaacgacgtggaactcgtggcagaaggtaactcgcgttttacctacaccgtgttggtggacggctgttcgaagaaaactaatgagtggggcaaaactatcatagaatacaagaccaacaagccatcgcgcctgccattcctggatattgcccctcttgatatcgggggagcagaccaagagttttttgtggatatcggtcctgtgtgttttaag

SEQ ID NO: 1362 - DNA, 4098 bp, Artificial Sequence
  derived and/or modified sequence
atgctgagcttcgtggacactcgaacgcttcttctccttgcggtgaccctctgcctggctacttgtcagtcacttcaggaggaaaccgtgaggaagggacccgcaggggatcgcggaccccgcggggagcgcggaccacccggacctcctggtcgggatggagaggatggtccgacgggaccccctggacctcccgggccaccgggccctcctggacttggcggtaactttgccgcacaatacgatgggaagggtgtgggactcggtccgggacctatgggcctcatgggtccccgcggtcctcctggtgctgcaggggcaccaggtccacaggggtttcaggggcccgccggtgagcccggtgaaccaggtcagaccggccctgcaggcgcaaggggacctgctggtccacccgggaaggcaggtgaagatgggcaccctggaaagccaggtcgcccaggagagcgcggtgtggtcggcccacaaggagcaagaggatttccgggtacccctggcctgcctggatttaagggaatccgaggccataatgggctcgatgggcttaaaggccaacccggggcccccggtgtcaaaggcgagcctggagcaccaggagagaatggtactcccggacagacgggcgcccgcggcctcccaggtgagagaggacgtgttggagctcctggacctgccggagccagaggttctgatggatcagtgggtcctgttggccctgcggggcctatcgggtcggcaggccctcctggtttccctggagcacctggtcctaagggggaaatcggtgctgtgggtaacgcaggtccggccgggcccgctggcccccgtggagaagtggggctgcccgggctcagcgggccggttggtccgccggggaatccaggagcgaacgggttgaccggtgcaaaaggggcagccggccttccaggcgtggcaggggcgccgggtctgcctgggccaagaggcattcctgggcctgtcggtgccgccggagcaactggcgcccgtgggctcgtgggggaaccaggaccagcaggatcaaagggcgagtccggaaacaaaggagagcctggttccgcaggccctcaaggtcccccagggccttccggggaggaaggcaagagaggacccaatggtgaggcaggctcggccggcccgccgggccctccgggacttcggggaagcccaggctcgaggggtctgcccggtgccgacggacgagccggagtgatgggaccacccgggtcacgcggcgcgtcaggaccagccggagtgaggggaccgaatggtgacgcaggacgccctggtgaaccaggactgatgggacctagaggtttgccgggctcccccggaaacatcggtccagccgggaaggaaggacctgtgggactgccgggaatagacggacggcccggacccattggtcctgcgggggcgagaggagaaccgggtaatatcggtttccctggtccaaagggtccaaccggtgatccaggaaaaaacggtgataagggacacgccggacttgcaggtgccaggggcgctcccgggcccgatggaaataacggggcacaaggaccacccggtccacaaggtgtccaggggggaaagggagaacagggcccaccaggaccaccaggattccaaggactgcctggtccgtcaggtccggcaggtgaagtgggaaaacctggggaacgcgggcttcatggagagtttggcctgccaggaccggccgggccgaggggggaacgaggtccaccgggagaatccggagcagcaggacctactgggcccattggatcccggggaccctcaggacccccaggccctgatgggaataaaggggaaccaggtgtcgtgggtgcagtcgggactgcaggaccttcgggcccttctggactcccaggcgagcggggcgcagccggtatccccggtggtaaaggcgaaaaaggagaacctgggctgcgaggcgaaattggcaaccctggacgcgacggagccaggggggcacctggggccgtgggcgcacccggccccgcaggcgcaaccggcgacagaggagaagcaggagcagccggaccggctggcccggcaggtccccgtggctcgcctggagaacgcggcgaagttggtcctgcaggccctaacggattcgccggtcccgctggggccgcaggacaacctggtgcaaagggcgagcgtggagcaaaaggcccaaaaggcgaaaacggcgtcgtgggtcctactggtcctgtcggagcagcgggtccggcggggcctaacggaccacctggtccagccggttcgcgtggagatggaggcccgccaggcatgactgggttcccaggtgcagcaggtcgtaccggacctccaggacctagcggcattagcggaccccctggtcctcctggccctgctggcaaagaaggactgcggggtccacgcggggatcagggtccggttggtagaacgggagaagtaggggcagtgggtccccccggttttgcaggggagaaggggccctcgggagaggcagggaccgccgggcctccgggaaccccaggaccccaaggcctcctcggcgcaccaggaatactgggattgcccggatcccgtggagagcggggcctcccaggggtcgccggagcagtgggcgaacctggcccactcggaattgcaggacctcccggcgccagagggccgcctggagcagtcggcagcccaggtgtgaacggagcgccgggagaagccggacgggatggaaatcctggaaatgatgggccccccggccgggatggtcaaccaggacataagggagaacgcggatacccgggaaatatcggtcccgtgggagcagctggagcgcccgggccccatgggccagtggggcctgctggtaagcacgggaatcgcggcgaaaccggacccagcgggccagtcggtcccgccggggcagtcggacccagaggtccttccggcccacagggtattaggggagacaaaggtgaacccggggaaaaaggaccacgcggactgccggggctgaaaggtcataacggccttcaaggacttccaggcatagcgggacatcacggagatcaaggcgcacctggatccgtggggcccgcgggtccaagagggccagcggggccttcaggcccagcaggtaaggacggaaggactggacatcccggtactgtcggacctgctggcattagaggacctcaaggtcatcaaggaccagcggggccgccaggcccacctggaccaccaggccccccaggagtctcgggaggcggctacgattttggttacgacggagacttttacagggccgatcagccacgatccgcaccttcgcttagacccaaggactacgaggtcgacgcaaccttgaaatcattgaacaatcagattgagactctcctgactccagaaggttcgagaaagaacccggcacggacctgtagggacctccgtctgtcacacccagaatggtcaagcggttattactggattgacccaaaccagggctgtaccatggacgcaatcaaggtctactgcgatttttccactggggaaacctgtattcgggcacaaccggagaatattccagcaaagaactggtaccgctcttccaaggataagaagcatgtgtggctgggggagactataaacgctggttcgcagtttgagtacaacgtggaaggagtgacttctaaggagatggccactcaacttgccttcatgaggcttctcgcaaactatgcgtctcagaacatcacctaccactgcaagaatagcatagcatacatggacgaagagactggtaatcttaagaaggcagtgatactgcagggatccaacgatgttgaacttgtggcagaaggtaattccagatttacctacaccgtgctggttgatggatgctccaaaaagacgaacgagtgggggaaaaccatcattgagtacaaaaccaataaaccatcgcgtctgccattccttgatatcgcaccactcgatataggaggagctgatcaggagttttttgtcgacatcggaccagtctgttttaag

SEQ ID NO: 1363 - DNA, 4098 bp, Artificial Sequence
  derived and/or modified sequence
atgctctctttcgtggacacccggaccctccttctgctggccgtaaccctttgcctcgcaacttgtcaatcactgcaggaggaaaccgtgaggaagggtcccgcaggagacaggggacctaggggagaaagaggaccacctgggccgccagggagggacggtgaagatggaccgaccggacctcctgggccgcctggcccacctggcccgcctggacttggagggaattttgctgctcaatacgatggtaaaggcgtggggctgggacctggaccgatgggattgatgggtccacgcggtcctccaggagctgccggagcaccaggccctcagggatttcagggacccgctggcgagcctggagaaccaggtcagactggtccagctggggcgagaggtcctgctggaccccccggaaaggccggggaagatggccatccggggaagccagggcgaccaggagaacgaggcgtcgtgggacctcagggcgcaagaggatttcccgggactcctggccttccgggctttaagggcattagaggccataatggactcgacggactcaaagggcagccgggagcaccaggtgtcaagggcgaacctggagcaccaggggagaacggaacccctggccaaaccggtgcgcgtggacttccaggcgagcgcggcagagtgggggcaccagggcctgctggcgccagaggctcggacggtagcgtcgggccagtcggtccggccggcccaatcggttcggcaggaccgccaggctttccgggagcacctggacccaaaggtgagattggggctgttggtaacgccggcccagccggacccgccggaccacggggagaagtggggctccccggtctgtcaggaccagtgggcccgcccggtaatcctggtgcgaatggccttaccggagcaaagggagccgcaggtttgcccggggtggccggcgctcccggccttcccggccctcggggaatccccggccctgtcggtgcagcaggtgcaaccggcgcgcgaggtcttgttggtgagccaggaccggctggctcaaagggcgaatctgggaacaagggagaacccggtagcgcaggtccacagggaccacccggaccttccggtgaagagggcaagcggggtccaaacggagaggcagggtcggcagggccacctggacctccagggttgcgtggatcacctggcagcagaggactgccgggggcagatggacgtgccggagtaatgggccctccagggtcccggggagcttcggggcctgcaggggtccgcgggcctaacggtgacgccggcagacccggcgaacctggtctgatgggaccgaggggactgcccggatcccccgggaacattggtcccgctggaaaagaaggacctgtgggactcccagggattgatggacggcccggtcctattgggccagccggagcacgcggtgaacctgggaacataggtttccctggacctaaaggcccaaccggtgatcccgggaagaatggcgataagggacacgcaggcctggcgggagcacgcggcgctcctggtccagatggcaataatggcgcacaaggcccaccagggccgcaaggtgtgcagggaggaaagggggaacaagggccgcctggacctcctggttttcaggggcttcctggaccctctggcccagcaggtgaagtcggtaagcctggggagcgcggtctgcatggagaatttggactgccaggtccggccggtccacgaggtgagaggggtccacctggggaatcaggtgcagcaggccctactggcccaattggtagccgcgggccttcgggtccaccaggaccagatggtaacaagggggaacccggggtggtcggagccgtgggtactgcaggtccgtcaggaccgagcggtttgccaggagaacgtggggccgcaggcatccctggtggcaagggcgagaagggcgagcccggactgcgaggtgaaataggcaatccaggacgcgacggggccagaggtgcacctggcgccgttggtgcgcctggaccagctggagcaaccggggatagaggagaagcaggcgcggcggggcccgcaggaccagccggtccaagaggatcccccggtgaacggggcgaagtgggtcccgccggaccgaacgggtttgcaggacccgccggtgcggccggacagcccggggcaaagggggagagaggtgcaaaaggccccaagggcgaaaacggggtggttggccctacgggtcctgtcggcgcggccggtcctgcaggcccaaatggaccccctggacccgcgggttcccggggcgatggaggaccaccaggaatgaccggattccctggagctgcagggcgaactggtcccccaggtccatcggggatatcgggcccacctggtcccccggggcctgccgggaaagagggactccgaggaccacgtggagatcaaggacccgtgggaagaactggggaagtgggggctgtaggacctccaggctttgcaggggaaaagggaccttcgggagaagcaggtacggccgggccaccagggacccccgggccacaaggtctgctcggggcacccggtatacttggccttccaggttcccgaggcgaaaggggactgcctggggtggcaggtgccgtgggtgaaccgggtccccttggaattgcgggaccgccaggagcgaggggaccgcctggagccgtgggctcccctggagtgaacggtgcaccgggagaggctgggcgtgatgggaatcccgggaacgatggtccccccggtagagacggccaacctggacataaaggagagagagggtaccctggaaatatcggtccggtgggggcagcgggtgcgccgggacctcatggacccgtggggcctgctggtaaacacggtaatagaggagagactggaccaagcggacctgtgggccctgccggtgctgtgggcccgagaggccctagtggtccccaggggatccggggtgataaaggggagcctggcgaaaaggggccgcgcggactcccaggacttaaaggacacaatggtctgcaaggtctgcctggtatagcgggtcatcacggagatcagggcgcaccgggatcggtgggtccggcaggtcctcgcggtccggcaggcccttcaggtcctgccggtaaggacggtcggacgggacatccagggactgttggaccggcgggaatccgtggcccccaagggcatcagggacctgcaggaccccctggcccaccaggcccgccaggacctcccggcgtctcgggagggggatacgattttggctacgatggcgacttctatcgggcagatcaacctagatccgccccttcgctcaggcccaaggattacgaagtggacgcaactctgaaaagcctcaacaatcaaattgaaactcttctcactcccgagggatcacggaagaacccggcaagaacgtgcagagacttgagactttcacatcccgagtggagctcgggatactactggattgatccaaatcaaggatgtaccatggatgcaatcaaagtgtactgtgacttctccactggagaaacctgtattagggcacaaccagaaaacatccctgcaaaaaactggtaccggtcctccaaagataagaagcacgtgtggctgggagagactattaacgctggctcacaattcgaatacaacgtcgaaggcgtgaccagcaaggagatggccacccaactggcatttatgagactgcttgcaaactacgcgtcccagaacatcacttatcactgtaagaactcgattgcatacatggatgaagaaacgggtaaccttaagaaggcagtgattctgcagggatccaacgacgtggagcttgtggcagaaggaaacagccgctttacctacacggtcctcgtggatggctgctcgaaaaagactaacgagtggggaaagaccatcattgaatacaagaccaacaagccaagccgcctgccattcttggatatcgcacctctggacattggaggcgcggaccaagagttttttgtagacatcgggccagtgtgtttcaag

SEQ ID NO: 1364 - DNA, 4098 bp, Artificial Sequence
  derived and/or modified sequence
atgttatcatttgtagacacaagaacgctgctgctcttggcggttactctttgtctggctacatgtcaaagcttgcaggaggagactgtgcgaaagggaccagcaggagacaggggaccgcgcggtgagcgcgggcctccaggccctcccggaagggatggagaggatggccccactgggccgcctggccctccagggccccccggccctcctggcctaggcgggaatttcgcggcgcaatatgatggcaagggggttggactcggcccagggcctatggggctgatggggccccgagggcctccgggcgccgccggggcacctggtccacagggcttccagggtcctgcaggcgagccaggggagcccggccaaacagggccagcaggggccagagggcctgcaggtccccctggcaaagccggggaggatggacaccccggtaagcctggacggcccggagagcgtggagtcgtgggcccgcaaggtgcgcggggcttccccggtacccccggtctgcccgggttcaagggcatacgggggcataacgggctggacggactgaaaggacagcctggtgcccccggagttaaaggagagccgggagcacccggggagaatggaacacccggccagacgggagctcgtgggctgcccggagagagaggcagagtgggcgcaccgggtcctgcgggagctcgagggtccgacggatctgtgggacctgtgggccctgccggtcccataggatccgcgggcccccctgggttccccggcgctccaggtcccaaaggcgaaatcggagccgtgggcaacgctggacctgccggtccagccggtcccagaggggaggtgggactgcccggccttagtggacccgtaggacccccgggcaatcctggtgctaacggtctcactggagcgaagggggctgctggcttacccggcgttgccggcgcccctgggctgcctggccctagggggattccaggtccagtgggggcggccggtgctaccggagcccgcggcctggttggggagccggggccagctggttctaagggagagtccggaaataagggggagcctgggtcagctggtccgcaaggcccacctggtccctccggggaggagggaaaacggggccctaatggcgaggcaggcagcgccgggccccctgggccccccggcctgcggggcagccccggatccagaggtctgcctggggccgacggaagggctggtgtcatgggaccaccgggcagccggggagcatctggaccagctggcgtccggggcccaaacggtgatgccggcaggcctggcgaacctggcttaatggggcctcgtggactccccggctcgccgggcaacatcggtccagccggcaaagaggggccagtagggctccccggcatcgatgggaggcctggtccaatcggtccagcgggcgctaggggagagcctggcaacattggcttccctggaccaaaaggcccaaccggggaccccggtaagaacggggacaaaggacatgcgggccttgcaggcgcaaggggtgctccggggccagacggcaacaacggagcccagggtccaccaggtcctcagggtgtgcaaggcggtaagggagagcagggaccccccggccccccaggatttcaggggctcccaggacctagtggccccgctggcgaggtaggtaagcctggcgagcgaggcctgcacggagagtttggactacctgggccagcgggaccgcgaggcgagagaggacctccaggggaatcaggagcagctggcccaactgggccaattggttcacgcggaccatctggtccaccaggacccgacggaaacaagggagaacccggcgtggtaggagctgttggaaccgctggtccatctggcccctccggcctaccaggagaacgcggcgcagcaggcatccccggagggaaaggcgagaagggagagcccggcctacgaggggaaatagggaacccagggagagacggcgcccggggagctcccggagcggtgggggcacctggacctgcgggggctaccggtgaccgcggcgaagctggggcggcggggcctgctggacccgctggtcctagggggagtcctggagagaggggcgaagttgggccagccggtcctaatgggtttgccggccccgctggcgcagcaggccaaccaggggcaaaaggcgaacggggggcgaagggacccaaaggcgagaatggtgtggtcggcccaactggccctgtcggcgccgccggaccagcggggccgaacggccctcctggccccgcaggaagccgcggtgacggaggaccaccaggtatgacagggtttccaggcgcagctggcaggacgggtccccccggtccaagtgggatctccggaccgcccgggcccccaggtcccgccgggaaggaggggttacgtgggccaagaggggaccaaggcccagtgggaaggaccggcgaagtgggcgctgtgggacctcccggcttcgcaggagagaaggggccatcaggtgaggcaggaaccgccggccctccagggacaccaggaccgcagggtctcctaggcgctccaggcatcctggggctgccaggcagccgtggcgagcgggggctccctggagtcgcgggagcagtgggagagcctggccctctgggtatagccggccctcccggagcacggggaccgcccggcgcagtaggctccccaggagtgaacggagcacccggcgaggccggacgggacggaaatcccggcaatgatgggcctcccgggcgggacggtcagcccggccacaagggggagagaggatacccggggaacatcgggcccgtcggcgccgccggcgctcccggtccacatggccctgttggcccagctggcaagcacggcaaccgaggcgaaacagggccttcgggccccgtgggaccagccggcgctgtgggccctagaggtccttccgggccacagggaatccgaggagataagggagaacctggtgaaaaaggaccaaggggactgcccggccttaaaggacataacggactccagggactaccaggaatagctggacatcatggggatcaaggcgctcccggcagtgttggcccagccgggccgcgcggaccagctggcccttccggcccagccgggaaagatggccggaccggccaccccggcaccgtgggtcctgccggcattcggggcccccagggacatcagggccccgccggcccaccaggcccgccaggcccccccgggcctccaggggttagtgggggtggatatgactttgggtacgatggcgacttctacagggccgaccaaccccggtcagccccctctctccggccaaaagattacgaagtggatgcaacactgaagtctctgaacaaccagattgaaacgcttctcacgcccgaaggatctcgaaaaaatccggcgcgcacctgccgcgatctgagactctctcacccggaatggtcatcgggatactactggattgacccaaatcagggttgtaccatggacgccatcaaggtgtattgcgacttttccactggggaaacatgcattagggcccaacccgaaaacatccctgccaagaattggtataggtcatctaaggacaagaaacatgtctggctaggtgaaaccattaacgcgggaagtcagtttgaatataacgtggagggggtgacaagtaaggagatggcaacccagctggcctttatgcgactgctggcgaactatgccagccagaatattacatatcactgcaaaaatagcattgcttatatggacgaagaaacaggaaatctgaagaaagccgtgattctgcaaggctccaacgatgtcgagctagtcgccgaggggaactctagattcacctacactgtgttggtcgatggatgctctaagaaaactaacgagtggggaaaaacaattatcgaatataagactaataaaccttcccggctccccttcctggatatcgccccgctggatatcggtggggcggatcaagagttcttcgtggatattggccctgtgtgcttcaag

SEQ ID NO: 1365 - DNA, 4098 bp, Artificial Sequence
  derived and/or modified sequence
atgctgtcgttcgtggacactcgcactctcctcctgctcgccgtcaccctgtgtctcgcaacctgccagtccctgcaggaagagactgtacgaaaaggacctgctggagatcgcggaccacgcggagaacggggaccgccaggtccgcctggtcgggacggcgaagatggaccaacggggccaccaggtccaccgggccctccaggccctccggggctcggaggcaattttgccgcccagtatgacggcaagggagtgggactcggaccgggcccgatgggtcttatggggcccagagggcctccaggtgcggcaggggctcccggtcctcaaggattccagggccctgcaggggagccgggcgagccggggcaaaccggaccggccggggcccgtggacccgccggccctcctggcaaggccggagaggacggtcacccgggaaagccgggtcggccaggagagaggggcgtggtgggaccgcagggagcgcggggtttccccggaaccccagggttgccggggtttaaggggatccggggacataacggcctcgatggactcaaggggcaacctggggcgcctggagtcaagggagaacccggcgcgcccggagaaaatgggacccctggtcagactggagcacggggactcccgggggaaaggggacgcgtgggtgcaccaggtcctgcaggcgcccgcggcagcgacggctccgtcggccctgtggggccggcgggacccatcggatcggccggacctccgggttttccgggagcgcctgggccgaaaggcgaaatcggagccgtgggaaacgccggccccgcgggacctgccggtccccgaggcgaagtgggactcccaggtctttcgggacctgttggccctccgggaaatccgggcgctaacggcctgaccggcgccaaaggtgcggcggggctgccaggagttgcaggagcccccggactgccaggccctagggggattcccggacccgtgggtgccgccggagcaaccggcgctaggggcttggtcggagaacctgggccagccgggtccaagggagagtcgggaaacaagggggaaccgggctcagctggcccacagggacctcccggcccatcgggagaagagggaaagcgcggccctaacggcgaggccggctcggcaggtcctccaggtccccctggactccgcggatcccccggatcccggggacttccaggtgccgacggacgagcgggggtcatgggccccccggggtcaaggggagcgtccgggccggccggcgtgcgcggacctaacggcgacgcaggaaggccaggagagcctggactcatgggaccgcgcgggctccctggatcgccaggaaacatcggcccagctggaaaggaaggaccagtgggcctgcctggaatagatggacgccccggcccaatcgggccagcaggagccagaggggagccagggaacatcggatttcctggacctaagggcccgactggcgatccgggcaaaaacggagataagggacatgccggactggccggggcaagaggagctccaggaccagacggcaataatggcgcccagggacctccagggccccagggagtgcagggcggaaagggagagcaaggaccaccgggaccacctggtttccagggactgccaggaccaagcggaccagccggggaggtcggcaaaccgggcgagagaggtttgcacggcgagttcgggctgccgggacctgcagggccgcgcggagagcgcggccctcccggcgaatcaggtgcagctggacctacgggaccgatcggaagcagaggtccgtccggcccccctggacctgacggcaataaaggtgagcccggagtggtgggcgcggtcggaactgcaggaccctctggaccgtccggccttccgggggaacggggcgccgccggaatccctgggggaaagggagaaaaaggagagccgggactgcgcggcgagatcggaaacccagggcgggatggcgcacggggagcaccgggagcagtcggtgccccgggtccggcaggtgcaaccggtgaccgaggcgaggctggtgcggccggccctgccggtccagctggtccaagaggctcacctggcgagcgaggtgaagttggccccgccggaccaaacgggtttgctggacccgcgggagctgccggacaacctggagcaaagggcgaacgcggtgcaaagggacccaagggagagaacggagtggttgggcccaccgggcctgtgggagccgctgggccggcgggcccaaatggtcccccggggcctgcgggtagccgcggcgatggaggaccgcctgggatgactggcttcccgggagcggcgggtcggactgggccgccgggcccgagcggaatctccggtcctccgggcccaccaggaccagcgggaaaggaagggctgagaggaccgcgtggcgaccaaggccccgtggggcgtaccggggaagtcggagcggtgggcccgcctggtttcgctggagagaagggaccttccggtgaggctgggactgcgggaccaccaggcactcctggtcctcagggactgttgggtgccccaggaatcttgggtttgccggggagcaggggagaacgcggactccctggagtggcaggggcggtgggagagccggggcctctgggaatcgcgggaccccctggagcgcgcggtccgcccggagccgtcgggtcgccgggagtcaatggcgctcccggcgaagcaggcagagacggaaacccgggaaatgacggaccgccaggacgggatggacagcctggccataagggtgagcggggctacccgggcaacattggaccggtgggggctgctggagccccggggccgcatggcccggtaggaccggcgggaaagcacggaaaccgcggagagactggaccgagtggaccggtcggtcccgcgggcgccgtcggaccccgtgggccctcgggacctcaagggattcgaggagacaagggcgaaccaggtgagaagggaccacggggcctgccgggcctgaagggacacaacgggcttcagggattgcctggaatcgcgggccaccacggtgatcagggagctccgggatcggtggggccagcaggtccacgcggaccggcgggtccttccggacctgcaggaaaggatgggaggactggacacccgggaaccgtggggccagcgggaattcggggcccgcaaggacaccagggcccagccggacctcctggacccccgggacccccgggtccccccggtgtttccggagggggctacgacttcggatatgatggcgacttctaccgcgccgaccaaccgcgcagcgccccttcgcttcggcctaaggactacgaagtcgacgcaactctgaagtcgctgaacaatcagatcgaaactctgctgaccccggaaggctcgcgcaaaaatccggccaggacttgccgggatctcagactgtcgcatccagaatggtcatcgggctactactggattgatccgaaccagggatgcacgatggacgcaattaaggtgtactgtgacttctctaccggggaaacgtgtatccgcgcacagccggaaaacatcccggccaagaattggtaccggtcatcaaaagacaaaaaacatgtctggctgggagaaaccatcaacgccggatcacaattcgaatacaacgtggaaggggtgacttcaaaggagatggcgacccaactggctttcatgaggctcctcgccaattacgcaagtcagaatatcacctaccactgcaagaacagcatcgcatacatggacgaagaaacgggaaatctgaagaaagcggtgattctgcagggatctaacgatgtggaactggtggcggagggaaactcacgcttcacctacacggtgcttgtcgacgggtgctccaaaaagaccaacgaatggggtaagactatcatcgaatacaaaacgaataaaccctcccgcctccccttcctggacatcgcgcctctggatatcggaggagccgatcaagagtttttcgtggacatcggaccggtgtgcttcaaa

SEQ ID NO: 1366 - DNA, 4098 bp, Artificial Sequence
  derived and/or modified sequence
atgctctcgtttgtggacactcgcaccctgctgctgctggccgtgactctctgtctcgcgacctgccaatcactgcaggaagaaaccgtgcgcaagggccctgctggagacagaggaccccgcggtgagcggggaccgcctggcccaccgggacgcgatggcgaagatgggccaactggaccacctggtccaccaggacctccgggtccgcctggtctgggcggcaacttcgcggcccagtacgatggaaaaggagtgggactgggcccgggtccaatggggttgatggggcccagaggcccgccgggtgcagcgggagctccgggacctcagggattccaaggcccggcaggggagccaggcgaacctgggcagactggtcctgcaggagctcgtggccctgccggaccaccaggtaaagccggagaagatggtcacccgggtaagcctggaaggcccggtgagaggggggtggtcgggccgcagggtgcacggggattcccgggaactcccggattgccaggattcaaagggattagaggccataacggactcgatggcctgaaggggcagccgggagctcctggcgtgaagggtgaaccaggagcccctggcgaaaacggaacgccggggcagactggggcgcgcggactgccaggagagcgcgggcgggtcggggccccgggccccgcgggagcacgggggagcgatggtagcgtcggtcctgtgggcccggctggaccaatcggatcagccggtcctcctggatttcctggagcgccagggccgaagggagagatcggagcagtgggaaacgcaggaccagcgggcccagcgggcccccgtggagaagtgggtctgccggggctgtcgggacctgttggtcccccagggaacccgggagccaacggactgactggagcgaagggggctgctggcctgcccggagtggccggtgcccccggcctgccaggaccccggggaatcccggggccagtgggagctgccggcgccaccggagcccgcggactggttggggagccaggaccggccggatccaagggggagtccggaaacaagggtgaaccgggttcagctggaccgcaaggaccgccaggaccttcgggagaagaaggcaagagaggacccaacggtgaggcaggttccgctggcccgcctgggccgccaggtctgcgcggctcgcccggatcccggggacttccaggcgctgatggacgagccggagtgatggggccacctggaagcaggggagcgtccggcccagccggcgtgagaggtccgaatggagatgccggacgaccgggggaaccgggcctcatgggaccgagaggactcccagggtccccgggtaacatcggccctgcaggtaaggaaggacccgtgggcttgccgggcatcgacgggaggcccggcccaatcggtccagcaggggcacggggggagccggggaacatcggattcccgggccctaaaggacctactggggacccgggaaagaatggggacaaaggacacgctggattggccggagcgcgtggggccccgggaccggatggaaataacggtgcccaggggccgcccgggccgcaaggcgtccaaggaggcaaaggggagcaaggcccgcccggcccacctggcttccaaggcctgccggggccgtctggcccggccggcgaagtgggcaagcccggcgaacgcgggcttcacggagaattcggtctgccaggtcctgcaggcccccggggagagcgggggcctccaggcgagagcggcgcggccgggcctactggacccatcggttcgcgcggtccaagcggaccgccgggacccgatggaaacaaaggcgaaccaggagtggtgggcgcggtgggaaccgctggaccgtcgggaccgagcgggcttccgggtgagcgcggtgccgcgggaatccctggaggtaagggtgaaaagggagagccgggactgcgcggagaaatcggtaaccctggtcgggacggggccaggggcgcaccgggcgcagtgggagccccaggaccggctggagccactggcgaccgcggcgaggcgggagcagccggcccagcaggtccagccggacctcgcgggtcaccaggagaaaggggtgaagtagggcccgcaggacccaatgggttcgctggccccgcaggtgcagccggtcaaccgggggccaagggcgagaggggagccaaggggccaaaaggagaaaatggcgtggtagggccaactggtccagtcggagccgctggacctgcgggaccgaacggcccgcctggtccagctgggtcgcgcggggatggcgggccgccgggcatgaccgggtttccgggagccgctggtcggactggccctccaggaccgtctggaatctccggaccacccggtccgcctggccctgcggggaaagaggggctgagagggccacgtggcgaccagggacctgtcggtcgaaccggggaggtcggagccgtggggcctcctggtttcgcaggagaaaaggggccctccggagaggcaggaaccgcgggtccaccaggcaccccgggaccgcagggattgctcggagccccgggcattttggggcttccgggatcgagaggagaaagagggctgcctggcgttgctggagcagtcggggagccgggaccgcttggcatcgctggaccaccaggcgcgcgcggcccaccgggtgcagttggatcgccaggagtgaatggtgccccgggcgaagcgggacgggacggaaacccgggaaatgacggacctccggggcgggacggtcagccgggacacaagggagaacggggctacccaggcaatattggacccgtgggagcggccggagcccccggcccgcatgggccggtcggccccgccggcaagcacggaaaccgcggggaaacgggaccatcgggtccggtaggtccagcaggagctgtggggccgcgaggtccctcaggtccgcagggtatccgaggcgacaaaggtgagccgggggagaaaggcccgcgcggtttgcctggcctcaaaggtcataacggactgcagggcctcccgggaatcgcgggacaccatggggaccagggagcacctggatcagtgggaccagcaggccctcgcgggcccgcaggcccttccggtccggcgggaaaggatggacgcaccggccaccctgggaccgtgggtccagctggaatcaggggcccacagggacatcaggggcccgcgggtccgccgggtccacctggaccaccgggccctccgggggtttccggaggggggtacgactttggttacgacggagacttctaccgcgccgaccaaccgaggtcggcgccgagcctgaggccgaaggattacgaggtcgacgccaccctgaaatcccttaacaatcagatcgaaaccctgctgacccctgagggatcgagaaagaacccggcgcggacctgccgggacctgcggctcagtcatccagaatggtcaagcggctactactggatcgatccgaatcaaggatgtactatggacgccatcaaagtctactgcgacttcagcaccggagaaacctgcatcagagcccagccagagaatatacccgcgaagaactggtaccgctcgtcgaaggataagaagcacgtgtggctcggagagacgatcaatgccgggtcacaattcgaatacaatgtcgagggcgtgacttcaaaagaaatggcgacgcaactcgcttttatgagacttctggccaactacgcgtcccagaacatcacctatcactgcaagaattctatcgcctacatggatgaggaaaccgggaacctgaagaaggctgtgattctccagggaagcaacgacgtcgagctcgtggctgagggaaacagccggttcacttatacggtcctcgtggacggatgctccaaaaagactaatgaatggggtaagactatcatcgaatacaagaccaacaagccatccagactcccgttcctggatattgccccgctggacattggcggcgcggaccaggagtttttcgtcgacatcggtcctgtgtgtttcaag

SEQ ID NO: 1367 - DNA, 4098 bp, Artificial Sequence
  derived and/or modified sequence
atgttgtcatttgtcgacacacggactctgctgctgctggcagtaacactgtgtctagccacttgccagtctcttcaggaggaaaccgtgcggaagggccccgctggggacagggggccacgaggagagcgaggcccaccgggtcctcctggaagggacggcgaggatggacctaccgggccccctggcccacccgggcctcctggcccaccgggcctgggcggcaatttcgccgctcagtatgatggcaaaggggttggcttgggacccgggcctatggggcttatgggaccgaggggaccccccggggctgctggcgctcctgggccgcaagggtttcagggacctgccggcgaacctggagaacccgggcaaacaggtccagcaggcgctagagggcccgctggtcccccggggaaagccggtgaagacggccatcccggtaagcccggaagacccggcgagcgaggtgttgtcggaccccagggcgcaaggggcttcccaggaactcccgggctgccggggtttaaagggatccgaggacataatgggctggatggactgaaagggcagccaggcgctcctggagtcaaaggtgagcccggagcacccggtgaaaacggcactcccggccagaccggggcaagagggttgccgggtgagcgtggacgagtcggcgcaccagggcccgcaggagctagaggctctgacggaagtgtggggccagttggcccggccgggccaataggcagcgctggacctcctggcttccctggagccccgggacctaagggggagattggcgccgtgggaaacgctggccccgcaggacccgccggcccccggggagaggtaggcctcccaggcctttccggcccagtcggccccccaggaaatccaggggccaatggcctgacaggcgcaaaaggtgccgccgggctgcccggcgtggcaggggctcccggactccctggacctagaggcatccccgggcctgtcggtgccgctggggccactggcgcccgggggctggtgggcgagcctggcccagccggcagcaagggggagtcaggcaacaagggagagcccggaagcgccgggccacagggtcctcccggaccctccggggaagaagggaagagaggtcccaatggcgaggcaggaagcgcaggtcctccagggccacccggtctgcgagggtcaccaggaagccggggcctgcctggtgctgatgggagagccggggttatggggccacctggttctcgtggtgcaagtggaccagcgggcgtgcgcggccccaatggcgatgctgggcggccaggtgagcccggtctgatgggcccgagagggctcccgggatcgccaggtaacatcgggcctgctggaaaagaaggtccggtcgggctgcccggaatcgacggaagacctgggccgattggtcctgccggagctcgaggtgagcctggcaatatcgggttcccggggccgaaggggccaactggggaccctggaaagaacggtgacaaggggcacgcggggcttgctggagctcgtggggccccaggccctgacggaaacaacggagcccaaggtccaccggggccccagggagtgcaaggcggcaaaggtgagcagggccctcccggcccacctggattccaaggcctaccaggcccatccggcccagctggcgaggtgggtaaacccggtgagcggggtctgcacggcgagtttggtcttcccgggccggctggaccccggggcgagcgaggaccgcccggtgagagcggggcagccgggcctaccggacctattggctctagagggccaagtgggccaccagggcctgacggcaacaagggagaaccaggggttgtcggcgctgtgggcacggccggtcctagtggcccaagcggactgcccggtgagcgcggcgccgctggcatccccggcggaaaaggggagaagggagaacccggtctgcggggagaaataggcaacccgggtcgtgatggcgccaggggagcgccaggtgccgtgggagcccccggaccagcgggagctacaggagaccggggtgaagctggcgccgcaggaccagccggtcctgccggaccgcggggtagtcctggagaaagaggcgaagtgggtccagccggccctaacgggtttgctgggcccgccggggcagctggacagccaggcgcaaaaggagagaggggcgccaagggccccaagggcgaaaatggcgtggtcggaccgactggaccggttggtgcagcggggcccgcaggacccaatggacccccaggccctgccggctctcggggcgacggcgggcctcccggaatgactgggtttccgggcgcagccggtcggacaggcccaccgggtccgagcggtatatcgggacctcctggccctcccggcccggctgggaaggaaggccttcgcggcccgcgaggcgatcaggggcctgtcgggcgtactggcgaagtcggagcagtggggccacccgggttcgccggggagaagggtccatctggtgaagccgggacagcaggcccgccagggacccccggcccccagggcctgttgggagcaccagggatacttggcctgcccggctcccgcggtgaacgaggactgcccggtgttgctggagccgtgggtgagccgggccctctgggaatcgccgggcctccgggagcgcgcggccctcccggagctgtggggtcccccggtgtcaacggcgccccaggagaagcgggccgcgacggaaatccgggaaatgacggcccaccgggacgtgatggacagcctggacataaaggcgaaagggggtatcctgggaatatcggacccgtaggggctgctggggcacccgggccgcacgggccagtgggacctgccggaaagcacggtaatcgcggggaaaccggcccaagcggaccagtggggcctgccggtgcagtgggaccgaggggaccatctgggcctcagggaattcgaggagataagggcgagccaggagagaagggtcctcgcggcctgcccgggctgaagggacataacgggttacaaggacttcctgggatcgcaggacaccatggggatcagggtgcaccagggtccgtcggccccgcaggtccacggggtccagccgggccctccggacctgccggcaaggatggacgaacaggacaccctgggacggtgggaccagccggaattagagggcctcagggccaccaggggcccgccggtccaccgggccctcccggccccccaggaccccccggcgtcagcggaggcgggtatgattttggttacgacggcgatttctatagggccgatcagcctcgtagcgccccgagcctgcgcccaaaggattacgaggtggatgccacactaaaaagcctaaacaaccagatcgaaaccctgttaactccagaagggtctcgaaagaatccggctaggacctgccgcgacctgcgcctgtctcacccagaatggagctccggttactattggattgatcctaaccagggatgcaccatggatgcgataaaagtctactgtgatttctccaccggagagacttgtattcgtgcccagccagagaacattcctgcaaagaactggtacaggagctctaaggacaaaaagcacgtctggctgggcgagaccattaatgccggatcacaatttgagtataacgtagagggcgtcaccagcaaagagatggcaactcaactggcgtttatgaggcttctggccaactacgcctctcagaatatcacatatcattgcaaaaattctatagcttatatggacgaggaaactggaaacctgaaaaaggcggtgattctccaggggtctaatgacgtggaattagttgcagagggaaactcgaggtttacctataccgtactcgttgatggctgttctaaaaagaccaacgagtggggaaagacaataatcgaatacaaaaccaacaaaccatcaaggctgccattcctcgacattgcccctctcgacattggaggtgctgatcaggagttttttgtggatatcggacctgtgtgttttaaa

SEQ ID NO: 1368 - DNA, 4098 bp, Artificial Sequence
  derived and/or modified sequence
atgcttagtttcgtggacactcgtaccctgctcctcctggctgttacgctatgtcttgctacctgtcagtctttgcaggaagagactgttaggaagggacctgctggggaccggggaccgagaggtgagagaggccctcccggccctccaggccgcgacggcgaggacggtcccactggccctcccggcccacccggccctccggggcctcccgggctgggcggtaactttgcagcacaatacgatggtaagggtgtcggtcttgggcctggccccatggggctcatgggcccccgcggccccccaggtgcagctggtgcccccggaccgcaaggttttcagggacccgcgggtgagcccggcgagcccggccagaccggccccgcaggagctcggggccctgctggacctcccggtaaggctggtgaggacggccatcccgggaagccaggcagacccggtgagaggggcgtcgtcggaccgcagggagcccgcggcttccctgggacacccggtctgcccggcttcaaaggcatccgcggtcacaacggtttggatggcctcaagggccaaccgggcgcccctggggtcaagggtgaacccggcgctccgggtgagaacggtacacctggccagaccggcgcccgtggcctcccaggtgagcggggacgcgtcggggctcccggacctgcaggtgcccgcggctcggatggttccgtcggcccagtggggccggccggcccaatcggctccgcaggacctccaggatttcccggtgctcctggtcccaagggtgagatcggtgctgtcggcaatgccggtcccgctggccccgctggtccgcgtggtgaggtgggtctcccgggattgtcgggacctgtcggtcctcccggtaaccctggtgccaacggcctcaccggggctaagggcgccgctggtttgcccggcgtcgccggtgcccctggtctccccggcccccggggaatcccgggcccggtcggtgctgctggcgctactggagcgcgcggtttggtcggtgagcccggcccggctggctcgaagggggagtccggtaacaagggcgaacctggctctgctggaccccaaggcccaccaggtcctagtggcgaggaaggtaagcggggaccgaacggtgaggccggtagcgcgggtcctccaggaccccctggtcttcgtggttccccgggttctcgaggcctcccgggggctgatggccgtgcaggcgtcatggggcctcctggcagtagaggggcctccggacccgccggtgtccgtggtcccaatggcgatgccggccgcccaggcgagccggggctgatgggaccccgcggtctgccgggtagcccaggcaacatcggacctgctggaaaagagggccccgtcggtctacccggtatcgacggacgtcccggtcccatcggcccagccggagccagaggtgagcccggaaacatcggcttccctggccccaagggtcctactggtgacccgggaaagaacggtgataagggtcacgctggcctcgccggtgcccgtggcgctcctggccccgatggcaacaatggtgcccagggtccccctggtccccaaggtgtgcagggtggcaagggtgaacagggtccccccgggccgcctggattccagggactccctggcccgtccggccccgccggggaggtcggtaagcccggcgagcgcggtctccacggcgagttcgggctgcccggacccgcaggccctcgtggtgagcgtgggccccctggcgagagcggagccgccggcccgaccggccctatcggctcccgcggtccttctggccctccgggaccagatggtaacaagggagaacccggagttgtgggagccgtgggcacggcgggtcctagtggaccctcgggattgcctggtgagcgtggagccgctggcatcccgggcggtaagggagagaagggcgaacctggcctccgtggcgaaattggcaaccctggacgcgacggtgctcgtggagcgccgggtgctgtgggagctcctgggcccgcgggagccacaggggatcgtggagaagccggagctgcgggccccgctggtcctgccggtccgcggggaagcccgggtgagcgtggtgaggttggccccgcgggcccgaatgggttcgctggccccgccggcgctgctgggcagcccggcgctaagggggagcggggtgccaagggtcccaagggcgaaaacggggtcgtcggccctaccggccccgtcggtgcagcgggcccggctggtccgaacggtcctcccggaccagctgggtcacgcggtgatggtggaccccccggcatgaccggctttcctggcgctgcagggcgtaccggacccccgggccctagcggaatctccggacctcccggacctcccggccccgccgggaaggagggtttgcgcggtccccgtggggaccaaggtccagtggggcgtaccggtgaggtcggcgccgttggtccccccggattcgcaggggagaagggcccctcgggtgaggccggcaccgcgggacctccgggaactccaggcccccaaggtctgttgggagccccgggaatcctggggcttcccggttcccggggcgagcgtggcttgcccggagtcgcgggtgcggttggcgagccaggcccgctgggcatcgccggcccgcccggcgcacgcgggccgccgggagctgtgggctcccctggagtgaatggggctcctggagaggctggccgcgatggcaaccctggtaatgacggacccccgggccgtgatggacagccgggccacaagggtgagcgtggctacccaggcaacatcggtcccgttggtgcagctggtgctcccggtccacacggtccagtgggaccagcgggcaagcacggcaatcggggtgagactggcccgtccggcccggtgggtcctgccggcgctgtcggtccccgtggaccttctggtccccaaggtatcagaggtgataagggagaaccgggcgagaagggccctcgcggcctcccaggcctaaagggtcacaacggcctccagggactccctggtatcgccgggcatcacggtgaccagggtgcacctggatcggttgggccggcagggccccgcggacccgctggcccttctggtcccgcgggcaaggatggccgcactggccatcccggcactgtgggcccggcgggtattcgtgggcctcagggccaccagggccccgccggccctccgggcccccccggcccccccggcccacccggtgttagcggtggcggctacgacttcggctacgacggcgatttctacagagccgaccagccccgtagtgctccctccctgcgtcccaaggattacgaggtcgacgccacgcttaagagtcttaacaaccagatcgagactctgctcacccccgaaggttcccgtaagaaccctgcccggacctgtagagatttgcggctttctcaccccgagtggtcctcgggttactactggatcgatcctaaccagggatgcaccatggatgctatcaaggtgtattgcgacttctctaccggagagacgtgcatccgcgcgcagcccgaaaacatccccgctaagaactggtaccgttcgagtaaggacaagaagcacgtgtggctcggcgaaacgattaacgctgggagccagtttgaatataacgttgagggcgtcacatccaaggaaatggccacgcagcttgcatttatgcgcctccttgccaactacgcctcgcagaacatcacgtatcactgcaagaattccatcgcctacatggacgaagagaccggcaacctcaagaaagcggtgatactccagggatccaacgatgtggagctcgttgccgagggcaatagtcggttcacatacacggtccttgttgacgggtgtagtaagaagaccaacgaatggggcaagacaatcatcgagtacaaaacaaacaagccctctcggctgccattcctggacatcgctcccctggacatcggcggtgccgaccaggagttcttcgttgatatcggccccgtctgtttcaag

SEQ ID NO: 1369 - DNA, 4098 bp, Artificial Sequence
  derived and/or modified sequence
atgctctctttcgtcgatacccggaccctcctgcttctggcagtgaccctttgccttgcaacctgccagtcacttcaagaggaaactgtcaggaaaggtcccgcaggcgaccgaggcccacgcggtgaacgcggtccaccaggccccccgggtagagatggcgaagatggtccaaccggaccaccgggccccccgggaccgcctggacctccaggattgggaggtaactttgccgcacaatacgatggcaaaggagtcggactcgggcccggacctatgggtcttatggggccacgtggaccgcctggtgcagcaggagccccgggcccacagggatttcaaggtcctgctggagaaccaggagaacctggccaaactggtcctgcaggggcacgcgggcctgcgggtccgccaggtaaggctggggaagatggtcatcccgggaagcctggtcgtccaggagagagaggggtcgttggtccacaaggagcccgcggattcccaggaactccaggactgcctggttttaagggcattagaggtcataacggtcttgatggcctgaagggtcagcctggagcacccggagtgaagggcgaaccaggagcaccaggggaaaacggcactcccggtcaaaccggcgcccgaggattgcccggagagagaggtagggtgggagccccaggtcctgcaggagcgcggggctcagacgggtcagtcggacccgtgggaccggccggaccgataggaagcgcgggtcctccaggtttccctggagctcccggacctaagggagaaattggtgctgtgggaaacgctggacctgcaggccctgccggtcctagaggcgaagtgggactccctggtctttcgggtcctgtggggcctcccggtaaccctggtgcaaacggactgactggcgcaaagggggcagccggtctgccgggggtcgccggagcgccgggccttccaggaccccgggggatcccaggcccagtgggcgcagcaggggcaacgggtgccagaggcttggtgggcgaacccggcccggctggatcgaagggcgagtcggggaataagggcgagccaggatcggcgggtcctcaagggcctcctggcccatcgggtgaggaaggaaagcgtggcccaaatggtgaagccggcagcgccggtccccctggtccgcctggcctgcggggcagccctgggtcgcgcggattgcctggtgcggatggacgcgcaggtgtgatgggtccacctgggagccggggtgccagcgggccggcaggagtgcggggacctaacggagacgcagggcgaccaggcgaacctggcctcatggggccccgtggacttccgggatcgcctgggaatattggaccggccgggaaggaagggcccgtgggactcccaggaattgacggtagacccggcccgataggccctgcaggagctaggggtgagcccgggaatatcgggttcccgggaccgaaaggtccaactggtgatccgggcaagaacggagacaaggggcatgcaggacttgcaggagcaagaggggcaccgggacccgatggaaacaatggggcacagggaccaccaggcccacaaggtgtgcagggcggcaagggcgagcagggaccccccggaccacccgggttccagggccttcccgggccttcggggcccgcgggagaagtaggaaagcctggggaacgaggcctgcacggtgagttcggattgcccggtccagcaggtccacgcggtgagcgaggacctcccggtgaatccggtgccgcagggccgacgggacctattggttcaagaggcccatcaggccctcctggcccggacgggaacaaaggagaaccgggggtggtgggcgcggtgggaactgcaggtccaagcggaccttctggactgcctggagaaagaggagccgcgggcattccaggcggaaaaggcgaaaagggagagcccgggctgagaggagagatcggaaatcctgggagggacggggcacgtggggcacctggcgccgtgggagcaccaggcccggcgggagctactggagacagaggtgaagccggtgcggcaggtcccgctggcccggcgggccctcgggggtcgcctggtgaacgtggggaggtcggccctgccggacctaatggattcgcaggaccagctggtgctgccgggcagccaggagcaaaaggtgagagaggggccaagggtcccaaaggagaaaacggagtcgtgggaccgaccggtccagtgggtgccgccggaccagcgggccccaacggacccccaggcccagctggttcacgaggtgatggcggcccacccggtatgactggttttccgggtgcggcaggaagaacgggcccccctggacctagcggaatctccggacctcctggtccccccggtcctgctggcaaggaagggctcagaggtcctcggggagatcaggggcctgtgggccgcaccggagaagtgggtgcagttgggccaccaggatttgcaggagagaagggtcctagcggtgaagcaggtactgcgggtccaccgggcacccctggtccccaagggctcctgggagcaccgggtattctggggctgcccggatcccggggtgaaagaggcctgcctggtgttgcaggtgcagtcggggagcccgggccgcttggaattgcaggcccaccaggtgctagagggccacctggggctgtcggatcccctggagttaacggggcaccaggagaagcggggagggatggtaatcctgggaatgacggtcctccgggacgtgacggtcagccaggacataaaggagagcgtggataccctgggaacatcggcccggtcggggcagctggtgcacctggtccccatggtcctgtagggccggcagggaagcacggcaaccgtggcgaaaccggacctagcggtccggtgggtccagcgggcgcagtcggacctagaggaccgtcagggccccaaggcatcaggggagataaaggtgaaccgggagaaaagggaccacgggggctccctggtttgaaggggcataatggcctgcaggggctcccaggtatagcaggccaccacggggatcaaggagcgccaggctcagttggacccgctgggccgcggggtccagcaggcccatctggacccgcaggaaaggatggaagaactggtcaccctggaactgtcggcccggccggtatcaggggaccccagggacaccaaggtcccgccggaccccctgggcctcccgggccaccaggcccgccaggagtgtccggaggtggttacgatttcggctacgatggtgacttttaccgagccgatcaaccacgcagcgcaccgagcctccgcccaaaagattacgaggtggacgcaaccctgaagtcccttaacaatcaaattgaaacgcttcttactccagaaggatccaggaagaacccagctcgtacctgtagggacctccgactttcccatccagaatggagctcgggttactactggatcgacccaaatcagggctgtaccatggatgcgattaaagtgtactgtgatttttcgaccggggaaacctgtatcagagcacaacctgagaacattcctgctaagaactggtaccgtagtagcaaggacaaaaagcatgtctggctgggtgaaactatcaacgcaggctcgcagtttgaatacaacgtggagggggtgacttccaaagaaatggcaacccaacttgcatttatgcggctgctggcaaactacgcgtcacagaacattacctatcattgcaagaattccattgcttacatggatgaggaaaccgggaaccttaagaaggcagtgatacttcagggttcgaacgatgtggagctggtcgccgaagggaattcgaggtttacttacaccgtgctcgtcgatggttgttcaaagaaaaccaatgagtggggaaagaccattatcgagtataagacgaataagccttccagactgccttttcttgatattgcacctctggacatcggcggagcggatcaagagttttttgtggacattggtcccgtgtgtttcaaa

SEQ ID NO: 1370 - DNA, 4098 bp, Artificial Sequence
  derived and/or modified sequence
atgctctcatttgtggatactcggacccttctgctgctggctgtgaccctgtgtctggccacctgtcaaagcctccaagaagaaaccgtgagaaagggtcctgcgggtgatagaggtcctcggggagaacgtggacctccgggtccgccaggacgagacggtgaggatggacccaccggtcctcccgggccccctggtcctcccggtcccccgggtctgggaggaaacttcgcagcccaatacgacggtaaaggagtgggacttggtcccggccctatgggactcatgggtccacggggaccgcccggggcagcgggggcacctggccctcagggctttcaaggacctgccggcgagccaggggaacctgggcaaactggcccggctggagctaggggtcccgccggccctcctggaaaggcaggagaagatggacacccggggaagcctggccgacccggggaacgcggagtggtgggaccacaaggtgcacgcggctttcccggtacgcccggcctcccagggtttaaaggtatcagaggtcacaatgggctggatggtcttaagggacagcctggagccccaggtgtcaagggcgagcccggcgccccaggtgaaaatgggactccgggccaaaccggcgcccggggactgcctggcgaaaggggcagggtgggtgcacctggcccagctggagctcgcggatctgacggatcggtgggacccgttggcccagcggggccaattggttcggcaggtcccccaggctttcccggagccccagggccaaagggtgaaattggagcagtgggaaacgcgggcccggcaggacctgcgggaccgcgaggagaagtgggacttccaggcctttccgggccagtcggaccgccgggaaatccgggagctaatgggctcactggtgcaaagggtgcagcaggtctgccaggcgtggcaggggcaccgggccttcctggcccacgcgggatccccggacctgtgggtgccgcaggtgccacgggtgcacgcggtcttgttggcgaacctggcccggcaggttcaaaaggcgaatcagggaataaaggggaaccaggttccgcgggtccacaaggtcctcctggtccatccggtgaagaaggaaagcgcggccctaacggagaagcaggatccgcaggtccgccgggacctccaggcttgaggggctcccccgggtcgagagggcttccaggggcagatgggcgggcaggcgtgatgggaccccccggatcaaggggtgcctcggggccggctggggtgcgtggacctaatggtgacgccggacgaccaggagagccaggtcttatgggacccagaggcctgccaggatccccaggtaatatcggaccggcggggaaggagggacccgtcggtttgccaggtatcgatgggaggcctggcccgatcggacccgcgggtgcgaggggcgaaccagggaacatcgggttcccaggccctaagggacctacgggagatccaggaaagaacggggataaagggcatgcaggactcgccggcgcaagaggtgcaccaggtcctgatggcaataacggagcacaagggccgccagggccacaaggagtgcagggcggcaagggggaacagggtccacccggtccacctgggtttcaagggctccctggtccatcaggtccagcaggtgaagtcgggaagccaggtgaacgtggcttgcatggtgaatttggactgccgggaccagccggaccacgtggagagagagggccacctggagaatctggagccgcaggccccactggacccattggctcccgtgggccgtcgggaccgcctggtccggatgggaacaaaggagaacctggtgtcgtcggtgcagtgggaaccgcgggaccatccggaccctcaggacttcccggagaaaggggtgccgccggtatacccgggggtaagggcgagaagggtgagcccggtctgagaggggaaataggcaacccgggccgtgacggggccagaggcgctcctggagccgtgggcgcccccggacctgctggtgccactggagacagaggtgaggccggagcggctggtccggccggccctgccggacctcgggggtcccccggagagaggggtgaagtgggacccgcgggaccaaacggattcgctgggcctgctggggcagcaggacagcctggtgcaaaaggagagagaggtgccaaaggtccaaaaggcgaaaatggcgttgtggggcctaccggaccagtgggcgcagcgggtcctgccggtccgaacggcccaccgggtccagcgggttcgagaggagatggcgggcctccaggtatgacgggattccctggagcagcgggacgaaccggtcctccgggccctagcggcatttctgggccaccggggcctcctggacctgcaggcaaagaaggactcagagggccccggggagatcagggtcctgtgggtcgtactggagaggtcggggcagtgggaccacccggttttgcaggagagaaaggtccttcgggggaggcagggactgcggggccaccgggtactccaggaccgcagggacttctcggagcaccagggatcctgggattgcctggatcgagaggagaaagaggtctgcctggcgtagccggagcagtcggagaaccgggaccgttggggatcgccgggcctcccggtgcgagaggaccgccaggcgcagtcggctccccaggagtgaacggagctccgggggaagccgggcgcgatggaaaccctggaaacgacggccctccaggtagagatggacaaccaggacacaagggggagcgggggtatcctggtaacattgggcctgtcggagccgcgggtgcgcccgggcctcatggtcctgtgggaccagcgggaaagcatggtaaccggggagaaaccggcccaagcggcccggtggggcccgccggtgcggtaggaccaaggggaccctccggacctcagggaattaggggagataagggcgaaccgggtgagaaaggcccccgcggtctgcccggcctcaagggacataacggccttcaggggcttccaggtattgcaggccaccatggcgatcaaggggcccccgggtccgtcggacctgcagggcctcgcggaccggctggcccttcgggaccggctggtaaggacggacggacgggacatcctggtactgtcggacctgcggggattcgaggaccgcaaggacaccagggacctgctgggcccccaggaccacctggacctcctggtcctccaggagtgtcgggtggtggatacgatttcggttacgatggcgacttttacagagcagatcagcctagaagcgcccctagcttgcgcccaaaggattacgaagtggacgctacccttaagtccctcaataaccagattgaaactctcctgactcctgagggaagccggaagaaccccgcacggacttgtcgcgacctgagactgtcacatcctgaatggtcaagcggttactactggattgatcccaaccagggctgtaccatggatgcgattaaggtgtactgcgacttcagcactggggaaacttgcatcagagcccaacctgagaacatcccggcaaagaattggtacaggagctcgaaggataagaaacacgtctggctgggagagacgattaatgcgggaagccaattcgaatacaatgtcgaaggtgtgacttcgaaagaaatggcgacccagcttgcatttatgcgcctgcttgctaactacgcgtcccaaaacataacctaccattgcaagaactcgattgcctacatggatgaggagacgggtaacctgaagaaggcagttatactccagggctcaaacgacgtggagcttgtggcagaagggaatagccggtttacctacactgtgcttgtcgacggttgttcgaagaaaaccaatgagtggggaaagaccatcatcgagtataagaccaacaaaccttcgcgtctgccttttctggatattgcacctcttgacattggcggtgcggaccaagagttctttgtggacattggtcctgtttgttttaag

SEQ ID NO: 1371 - DNA, 4098 bp, Artificial Sequence
  derived and/or modified sequence
atgctttcattcgttgatactaggactcttttgctgttggctgtcactttgtgtctggctacttgccaaagcctgcaagaagagactgttaggaaaggtccagctggggaccgcgggcctcgtggcgagcgtggaccaccaggtccgccgggccgtgatggtgaagatggtcctacaggtcctcctgggcctcctggaccaccaggtccacccggattaggcggtaatttcgcagcacaatatgatggtaagggtgtgggtctaggacccggtccaatgggactaatgggtcccagggggcctccaggagctgccggggctcctggtccacaggggtttcaggggcctgctggagagcccggggagccaggacagacaggtcctgctggcgccaggggaccagcaggaccgccaggaaaggcaggagaagacggccaccctgggaagcctggaagacctggtgaaagaggagttgttggccctcagggggctcgtggttttccaggaaccccaggtctgccaggtttcaaagggattagaggtcataatggtctcgacggtttaaaaggtcagcccggtgcgcctggagtaaaaggtgagcctggggcgcctggagagaatggaactcctggacagactggcgctcgtggtcttccgggagaaagagggagggtcggagcgccaggccctgcaggggcccgcggcagtgacggtagtgtggggccggtcggaccggcaggccctattggttcagcaggaccccctgggttccctggagcaccagggccgaagggggagattggggccgtggggaacgccgggccagcggggcccgcaggtcctaggggagaagttggtttaccaggtttgagtggccctgtgggtcctccgggaaatccaggtgccaatggacttaccggtgctaagggagccgctgggcttcctggggtagcaggcgctccaggtctacccggaccaaggggaattcctggtccggtgggagcagctggtgctacaggtgcaaggggtttggtgggtgaacctggacctgccggatccaaaggagagtccggaaacaagggggaacccggatcagctggacctcagggacctcctgggccatcaggtgaagagggtaagcgaggtcctaacggtgaggcaggttcggcaggaccacctggtccccccggacttcgcggctctcccggttctcgtggattaccaggcgcagatggtagggccggcgttatgggaccaccaggctccagaggagcctctggtccagcaggtgtacgaggtccaaacggtgatgccgggaggcccggtgagccaggtctaatggggccacgaggactaccaggtagtccggggaacataggaccagctggtaaggaggggcccgttgggctgccgggcatcgatggaaggccaggcccaattggacctgcaggtgctaggggtgaacctggcaatatcggctttccaggtccaaagggccccacgggagatcctggtaaaaatggagataagggtcacgccggacttgcaggggcaaggggcgctccaggtcctgatggaaataatggagcgcaggggcctccaggaccacaaggtgtgcagggtggtaaaggagaacagggacctcctggtccgcccgggtttcaaggtttacccggaccttccggccctgccggtgaagtgggcaagccaggcgaaagaggtcttcacggggagttcggtcttcccggaccagcagggccccgtggagaacgtggccctcccggcgaatcaggcgctgctggacccaccggtcctattggaagtcgtggaccgtccggacccccaggacctgatggaaataaaggcgagccaggggttgttggggcagttggtaccgccggtccttctggaccctctggtcttcctggagagcgaggtgcggctggaatccctggaggaaaaggagagaaaggagagcctggtcttaggggagagattggaaacccaggtagagatggtgctagaggcgctccaggggcggtgggtgccccaggtcctgcaggggcaactggtgacaggggcgaagctggagccgctgggcctgctggtcccgcaggcccacgaggtagcccaggtgaaaggggtgaagtaggaccagctgggcctaatggtttcgctggtcccgctggggctgctgggcaacccggagctaagggggaaagaggtgcaaagggacctaagggtgaaaacggtgtcgttggacctacggggcctgttggtgcagcaggaccagccggtcctaacgggccacctggacctgctggtagcaggggagacggcggcccacctggtatgacaggttttccgggtgctgcgggaaggaccggtccccctggtccaagcggaatctccggcccacctggtcctcccggcccagctgggaaggagggcctgcgggggccacgcggtgatcagggtcctgtgggccgaacaggtgaagttggagccgttgggccacctggtttcgccggagagaaggggcccagtggagaggcaggcacagccgggccgcctggtacacctggaccacagggactgctcggcgccccaggaattttggggttgccgggttctcgtggggagagaggtctcccaggagttgctggagctgttggagaaccaggacctttagggatcgctggcccaccaggtgctcgaggtccaccaggggcagttggttcccctggagtaaacggagctcctggtgaggccggaagagatggcaaccctggaaatgacggtcctccaggacgagacgggcaaccggggcataagggggaaagaggatacccaggtaatatcggacccgttggcgcagccggagctcctggacctcatggtccagtcggtcccgcgggaaagcacggaaacagaggggagactggcccttcaggacctgtaggcccagctggtgctgttggaccaagaggaccatcaggtcctcaggggattcggggtgataaaggggagcccggagagaaaggaccaaggggcttgcccggactgaagggacacaatgggcttcaaggcctcccgggcattgctggacatcatggtgatcaaggtgcgcctgggtctgttgggccggctggtcccaggggtcctgccggccctagcggtccagcaggtaaggacggccggacaggtcatcctggtaccgttggtccggcaggaatcaggggaccacagggacatcagggtccagccgggccacctggacccccagggccacctggtccacctggggtaagcggtggaggatatgattttggttacgatggagacttttacagggcagaccaacctaggtccgccccaagtttgagacctaaagactacgaggtggacgcaactcttaagtctctcaacaatcagattgagacacttttaacccccgaaggttctaggaagaatcccgctaggacgtgcagagatcttagactgagtcaccccgaatggtcgagtggatattattggattgatccaaaccaaggttgcaccatggacgctattaaggtttattgcgacttttctaccggtgaaacttgtattcgggcccagcctgagaatatccctgctaagaattggtataggtctagtaaggataaaaagcatgtgtggctcggagaaaccatcaacgctggttcacagttcgagtacaatgttgaaggtgttacttcaaaggagatggctacccagttggcttttatgaggcttctcgctaattatgcatcccaaaatatcacctaccattgtaaaaactccattgcttatatggatgaggaaactggcaacttaaagaaggctgttatcctgcagggttcaaacgacgttgagctcgttgcagaagggaacagtcgcttcacatacacagttctagtggacggatgttcaaagaagactaatgaatggggaaaaacaattatcgagtacaaaaccaataaaccttcccgtcttcctttcttggatattgcccctctcgacatcgggggtgcagatcaggagttctttgttgatataggccctgtatgtttcaaa

SEQ ID NO: 1372 - DNA, 4098 bp, Artificial Sequence
  derived and/or modified sequence
atgctttccttcgtcgacactaggaccctcctgcttttggccgttactctttgtctcgccacctgccaatcgctgcaggaagaaactgtgagaaaaggtccagcaggtgataggggaccacgcggggaacgaggtccccctggtccccctggccgtgatggagaggacggtcccactggaccaccggggccacccggacctcccggtccaccagggctgggagggaacttcgctgcacaatacgatggaaagggagtcggactcggaccagggcctatgggactcatgggacccagaggccctcccggagccgcaggtgcacccgggcctcagggtttccagggccccgcaggtgaacctggggagcccggtcagaccggaccggcaggggcaagaggcccagcgggccccccgggtaaggcaggagaggacgggcatccaggaaaacccggccgacccggtgaacggggtgtcgtcggaccacaaggtgcaagaggattcccgggaaccccaggacttccgggttttaagggaattcgcggccataacggactggacggcttgaagggccaacctggagcgccaggagtgaagggagaaccaggcgcaccaggtgaaaacgggaccccaggtcagacgggagcaagaggccttccaggagagcgagggcgcgtgggcgcgcccggacccgcaggcgcaagaggttccgatgggtcagtgggtcctgtgggcccggcagggcccatcggatctgcaggaccacctggatttccgggggcaccaggccctaagggagagatcggagcagtgggcaacgcaggccctgcgggccccgcgggacctcggggtgaggtgggtctgcctggactttccggaccagttgggcccccaggaaaccctggagcgaacggactcacgggcgcgaagggtgccgcaggattgccaggagtcgcaggagcacctggacttccgggaccgcgcggtatacccggtcctgtcggagctgccggcgcgaccggtgccagaggcctggttggggaacccggcccggccgggtcgaagggggaatcgggcaataagggagagccgggttcggcagggccacaaggtccacctggtccttcgggagaagaaggaaagagggggccaaacggcgaggcaggttccgcggggcccccaggcccccctggtctgagggggtcaccaggctccagaggattgcctggggcagatggcagagcgggtgtaatggggccgcctggtagccgtggcgcgtcaggacccgctggggtgcggggacctaatggtgatgccgggcgtccaggagagcctgggttgatgggtcctcgcgggctccctgggtcgcccggtaacattggccctgctggtaaagaaggacctgtgggactgcccggcattgatggtcggcctggacctataggaccggctggggcacgtggagagccgggcaatattggatttcctggtcccaagggacctaccggtgatccaggtaaaaacggagacaaggggcatgcaggtctggccggtgcacggggagcacctggcccggatggaaacaatggagcacagggccctccgggaccccaaggagtccaaggtgggaagggagagcaaggccctccaggaccgccaggcttccagggcttgccaggacccagcggccccgcaggcgaagtgggaaagccaggggaacggggactgcacggagagtttggcctgccgggacccgccgggcctcgcggtgaaaggggcccccctggagaatcaggagcggcaggacctaccggccctattggctcgcgtggaccgagcggcccacctggcccagacggtaacaaaggagaacctggagtggtcggcgcagtcggaactgctggcccatcaggcccctccggcctccctggtgagcggggtgcagccggaattccaggtggaaaaggggagaagggggaaccaggtttgcgaggagagatcggtaaccctggacgcgatggagcgcgtggggctcccggtgcagtcggcgcaccggggccggcaggtgcaacgggcgaccgcggggaagctggtgctgcaggacccgccggtccagccgggccccgggggagcccaggggaacgaggagaagtgggccccgctggtcctaacggttttgccgggccagccggcgcagcaggccagcctggcgcaaagggagaaaggggagcaaaaggtccgaagggcgaaaatggagtcgtcgggccaaccggtcctgtaggagcagccggacccgcgggaccaaatggtccaccaggtcccgctggttcgagaggagatggtggtccgccaggaatgacgggctttcctggtgccgcaggtaggaccggacccccaggtccttccggcatttcgggtcctcccggaccgccagggccggcgggtaaggaaggacttcggggccctcgcggtgaccaaggtccggtcggcagaactggcgaggtgggggctgtgggacctcctggcttcgcaggagaaaagggcccttcaggagaagcaggcactgcaggcccaccaggaaccccgggacctcagggccttctgggtgcaccaggaattcttggtctgccagggtcgcggggcgaaaggggtttgccaggagtggcaggcgccgtgggtgaacctggacctcttggaatagcaggtcctcctggtgctcggggccctccaggcgccgtcgggagccctggagtgaatggtgctcccggggaggcaggtcgggatggtaatcctggtaacgatggtccacccggtagagacggtcaacctggccataaaggagaaagaggataccccggcaacattggtcctgtgggagccgcgggtgcgccgggaccacacgggccggtcgggcccgctggtaagcacggaaacagaggggagactgggccttcaggtccggtaggcccggcaggcgcagtgggcccccgaggaccaagcggcccgcaggggatccgcggggataagggagaacccggagaaaaaggacctcgaggactgccaggcctgaagggacataacgggttgcagggcctccccggaatcgcgggtcatcacggcgaccagggcgcccctggtagcgtaggtccggcaggccctcgaggacctgctggtccttcaggtcctgcgggtaaagatgggagaactggacatcctgggaccgttgggcccgctggaatccgaggtcctcaaggacatcagggaccggccggaccacctggtccccccggtcctccagggcctcctggagtgagcggcggaggttatgatttcggctatgatggtgacttttaccgagcagaccaacctaggtccgctccgagcttgcgcccgaaggactacgaggtggacgcaaccctgaaaagcctgaataaccaaattgaaaccctccttactccagaggggtccagaaagaaccccgcacggacttgcagagatctcagactctcccacccagaatggtcctccgggtactactggattgatccaaatcaagggtgtactatggatgccattaaggtgtactgtgacttttctacgggtgaaacctgtatacgcgcccaaccagagaacatccccgcaaagaactggtaccgcagcagtaaggacaaaaagcacgtctggcttggagaaaccattaatgcaggttcgcaatttgaatacaacgtcgaaggagtcacttcaaaggaaatggccactcaactcgcgttcatgcgccttcttgccaattacgcaagccagaatatcacttaccattgcaagaactcaatagcctacatggatgaagaaaccggaaacctgaaaaaggccgtcatcctgcagggttcgaatgatgtcgaacttgttgcagaaggtaactcgagatttacttacaccgtgctggtggatggctgttccaagaaaaccaacgagtggggaaagactatcattgaatacaagaccaataagccttccagactgccatttctggatatcgccccacttgatatcggaggtgcggatcaagagttttttgtggacattggaccagtgtgtttcaaa

SEQ ID NO: 1373 - DNA, 4098 bp, Artificial Sequence
  derived and/or modified sequence
atgctgtcattcgtcgacaccagaaccctgttgctgctggccgtgactttgtgcctcgctacttgccaatccctacaggaggaaacagtacgcaagggcccagcaggtgacagagggcccagaggtgagcgtgggcctcccgggccgcctgggcgtgacggtgaggacggacccacagggccacctggaccccctggaccacctggcccgccaggtcttggcggaaacttcgcagcgcagtatgacggcaagggggtcggactggggccgggtccgatggggctcatgggccccagagggccacccggcgccgccggagcccctggaccccaggggttccagggccctgctggcgagccgggagaaccagggcagaccggaccggctggagctagaggcccagccggaccgcctggaaaggccggggaagatggacacccaggtaagccgggcaggcctggcgaaagaggggtcgtcggtccacagggggcccgtggattcccaggtacaccaggacttcctggatttaagggaattcgaggtcacaatgggcttgacggactgaaaggacagcccggcgctcctggcgtgaagggagagccgggggctccaggagaaaatggaacccctggacagactggggcaagaggcctgccaggagagcggggcagggttggcgctcctggtcctgccggagcccgaggaagtgatggatcagtggggccagttggacctgcaggtcccatcggatccgcaggacctcccggtttccccggggcacctggccccaaaggtgagataggggccgtgggcaatgcaggaccggcaggcccagccggcccaaggggtgaggtaggtctacctgggttgagtgggcctgtgggcccacctggcaatccaggcgccaacggcttaacgggcgctaagggggctgccggtctcccaggcgtcgcaggggcgcccggactgccagggccccggggaatccccgggccagtaggcgctgccggcgcaacaggggcacgcggactggttggtgaaccgggtcctgccggatccaagggtgaatccgggaacaagggggagcccggatccgcaggccctcagggccctccaggaccatctggggaggagggaaagagaggacctaatggagaggcagggagcgcagggcccccagggcctccaggcttgcggggctcaccaggatcaagaggtttgcctggcgctgacggacgagcaggtgtgatgggacccccagggtcccggggcgccagtgggcctgccggagtccgcggacctaatggtgacgccgggcgtccaggggaaccgggcctcatgggaccgcggggtctgcctggctctccaggaaatatcggacctgccggcaaagagggaccagtcggattacccggcatcgacggaaggcccggcccgatcggccccgcaggtgcccggggcgaacccggaaatataggcttccctggccctaagggcccgacaggcgatcctggcaaaaatggtgacaaagggcacgccggtctagcaggggcgcgaggagcccctggtccagacgggaacaatggagcccagggaccaccgggacctcagggagtgcagggaggaaaaggggagcaggggccacccgggccacccgggttccagggcctgcctggaccatctggccccgccggcgaggttggtaaacccggcgaacgagggcttcatggcgaattcggacttcccgggccggccggcccacgtggagagagaggacccccaggcgagtccggcgcggctgggcctaccggtccaatcgggtcaaggggacccagtggaccacccggaccagacggtaacaaaggtgaaccgggcgtggtcggcgccgttggcactgcaggtcctagcggcccaagtgggcttcctggagaaaggggtgctgcgggaatacctggcgggaaaggcgagaaaggcgagccagggctcagaggggaaatcggtaacccaggccgcgatggggctcgaggtgctcccggtgccgtcggagccccagggcctgccggcgccaccggagataggggtgaagctggtgcggcgggtcccgcaggtccggctggaccccgcggtagcccaggagagagaggcgaggtcggaccagcgggcccaaatggcttcgctgggccagcgggagctgccggccagccgggcgcaaagggtgagaggggggccaaaggaccaaagggcgagaacggtgtggttggacccaccgggcccgtcggtgccgccggcccagcgggtcctaatggcccccctggacctgccggctccagaggtgatggcgggccccccggcatgaccggattcccaggggcagcaggacgcactggaccccctggtccctccggtatctctggaccccccgggccgccaggaccagcgggcaaggagggcctccgggggccacgaggtgaccagggacctgtcggtaggaccggagaagtcggtgccgtgggtcctcccggattcgccggcgaaaagggcccttcgggagaagcaggcacggccggccccccaggaacaccaggtccacagggcctgctgggggcacccggaattttagggctgccaggcagccggggagaacgtgggctccctggcgttgctggcgctgttggcgagcctggaccactgggaatagctgggccaccaggtgccaggggacctcctggagccgtaggttctcccggagtgaatggagcccctggtgaggccggccgcgatgggaacccggggaacgacggcccccctggccgcgatgggcagcccgggcataagggcgagcgcggctacccgggtaatatcggtcctgtgggtgcagcaggagctccaggaccacacgggccagtcgggccggcagggaaacacggaaatcgcggagagactgggcccagcggcccagtcgggcctgccggggccgtggggccacggggacctagcggaccccagggcatcagaggcgacaagggggagcctggagaaaagggccctcgcggcttacccgggttgaaaggtcacaatgggctgcagggactgcccggcattgctggtcaccatggtgaccagggcgcacctggttcagtcgggccggcaggcccccgcggccccgcgggtccatccggaccagcaggcaaagatggacggacgggccaccccggtaccgtcggcccagccggtatccggggcccccagggccaccagggccccgccggtccacccggaccaccaggacccccaggcccgcccggagtgtctggcgggggatacgactttggctacgacggagacttttatcgcgcagatcaaccaaggagcgcccctagtctgagaccaaaggactacgaagtggatgcaactttgaaatccttgaacaaccagatcgagacactgctaacgcccgaggggagtcgcaagaaccccgcccggacttgccgagacctgcgtttgagccatccagagtggtcatctggatactactggattgatcccaatcagggttgcaccatggacgcaatcaaagtgtactgtgatttcagtactggcgagacatgtatacgcgcgcaaccagaaaacattccggctaagaattggtatagaagtagtaaggataaaaagcacgtgtggcttggggagaccataaatgctgggtcccaattcgagtacaacgtggagggagtgacaagcaaggagatggccacccagctggcttttatgcgcctgctggccaactacgcaagccagaacatcacgtatcactgcaagaattcaatcgcttatatggacgaagagacaggaaatctgaagaaagccgtcattctccagggctcaaacgacgtagagctagtcgctgagggcaactcaagatttacctatactgttctcgttgacggctgctccaagaaaacaaatgaatgggggaagactattatagaatacaagacgaataaacctagcagactccccttcttggatatcgcaccactagatattggcggtgccgatcaagaattcttcgtcgacatcgggccagtgtgtttcaaa

SEQ ID NO: 1374 - DNA, 4098 bp, Artificial Sequence
  derived and/or modified sequence
atgctatctttcgtggatacgagaactctgctgctgcttgcggtaacgctgtgtctggcgacgtgccagtcactgcaggaagagactgtcaggaaaggcccagccggtgaccggggcccccgtggcgagcgtggccccccaggaccccctgggagggacggcgaagatggacccactgggccccccggacccccaggacctcccggcccccctggactggggggaaatttcgcagcccaatacgacggcaaaggggtggggctgggccccgggccaatggggctgatggggcccagaggtcctcccggcgccgcaggtgcacctgggcctcagggcttccaggggccggcaggcgagccaggtgaaccaggccagaccgggcctgcgggagcccggggccccgccggaccacctgggaaggctggggaagatgggcacccagggaagcctgggagaccaggtgagcgcggcgtggtgggccctcaaggcgcccgagggttccccggcactccaggcctgccaggctttaagggcattagagggcacaatgggctggatggtcttaagggtcagcccggggcacccggggttaagggagagcccggggcccccggggagaacggaacaccaggccagaccggggccagaggactgcccggcgagcgcggacgggtaggagccccggggcccgcaggcgcacgaggctcggatggctctgttggacctgttgggcccgccgggcccatcgggtccgctgggcctccaggattcccaggggcacctggacccaagggagagataggcgccgtcggcaacgcaggtccagcaggtcccgcaggccctcgaggggaagtgggattgccaggactttccggccctgtgggaccccccggaaatccaggcgccaacggcctgaccggcgcgaagggcgccgctggcctaccaggggtagctggtgctccaggactgccgggcccaaggggaatccccgggcccgtgggtgctgccggcgcaacaggcgcacggggacttgtgggagaaccgggtcccgcaggaagcaaaggcgagtctggcaacaagggagagccaggctctgccggcccacaggggcctcctggaccttcgggcgaggaggggaaacgcggacccaatggcgaagccgggagtgcgggcccccctggacccccagggttacggggtagcccgggttctagagggctgcccggcgccgatgggagggctggcgtcatgggtccaccaggctcaagaggcgccagcgggcctgccggcgtcagggggcctaatggcgacgcgggccgccccggggaacctggcctgatggggccacgcggcctgcccgggagcccaggaaacattggacctgcaggcaaagaaggacctgtgggtctgcccgggatcgatggccgacccggtcccatcggacccgccggtgctaggggggaaccgggaaacattggcttccccgggcccaagggccctactggggatcccggaaaaaacggggacaagggccacgcaggactcgccggtgccagaggcgcacccggccccgacggtaataatggcgctcagggacctccaggcccacagggggtccagggcgggaagggcgagcaaggccctcctggaccccccgggttccagggtttaccgggcccatccgggcctgccggggaagtcggcaagccaggggagcgcggtctgcacggcgaatttgggctgcccggacccgccggaccccgaggggagaggggtccaccaggggaaagcggagctgcgggacccacaggaccaatcgggtccaggggacccagcgggccacctggtccggacggcaataaaggagagcctggcgtcgtcggtgccgtgggtactgcagggccatcaggtccgtcgggtcttcctggagaacgaggcgccgccggcattcctggcggtaagggagagaaaggtgagcctggactacgcggggagattgggaatcctgggagagatggggctcgcggggccccaggagctgttggggctcccggtccagcgggcgctaccggagaccgaggtgaggcaggggctgccgggccagccggacccgccggtcctagggggtcccccggggagaggggcgaggttggccctgccggacctaacgggttcgccggccctgctggggccgcgggacagcctggagccaaaggcgagcgcggagctaagggcccaaagggtgaaaacggcgttgtgggtcctaccggtcccgtgggcgctgccgggcccgctgggcccaatggacctcccgggccagcaggaagccggggggacggtggcccccccggcatgactggtttccccggcgcagctggccggacaggtcctccgggtccttcggggatttcgggtccccctggaccacctggacctgccggaaaggaaggtctcagaggccccaggggcgaccagggcccagtgggccgtacaggtgaggtgggggccgtaggcccacccggatttgccggagaaaaaggcccaagtggggaggctggcacagcaggcccacccgggacgcccggtccccagggacttcttggtgcccctggtattctggggcttcccggtagtcgcggggaaagaggtttaccaggtgtggccggtgctgtcggcgagcccggacctctggggatcgctgggcctcccggtgcacgcggcccaccaggcgccgtgggcagccctggggtcaatggggcaccaggagaagcaggacgagatggaaatccaggcaacgatggtcccccagggcgtgatggccagcctggacacaagggtgagcgcggttacccaggtaatatcggacccgtgggggcggctggagcccccgggccccatgggcctgttggacccgccgggaaacatgggaaccgtggcgagacaggtccctcaggccccgttgggcctgccggcgccgttggccctagagggccatctggtccacagggcatcaggggggacaaaggcgagcccggagaaaagggcccccggggactgccggggctgaaaggccacaatggactgcaagggctgcctggtatagccggtcatcatggagaccagggagcccctgggtctgtcgggcctgcagggccacgcggccccgccggccctagcggacctgcggggaaagatgggaggactggccaccccggcacggttggccctgccggtattcggggtccgcagggccaccaaggccccgcagggcctccggggccgccaggaccaccgggtcctccaggcgtttctggggggggctacgactttggatacgacggcgacttctaccgtgccgaccagccaagatcagcaccttcccttcggcccaaagactatgaagttgatgccacattgaagagtctgaacaatcagatcgaaacactcttgacaccagagggcagtagaaagaatccagctagaacctgcagagacctgcggctcagccatcccgagtggtcatccgggtattattggattgatcccaaccagggatgcaccatggacgccattaaagtttactgcgatttttcaaccggagaaacctgtattcgcgcacagcccgaaaacatccctgctaaaaactggtaccgctctagcaaggacaagaaacatgtttggctgggagaaacaatcaatgccgggagccaattcgagtacaacgtagaaggagtgactagtaaggagatggcgactcagttagctttcatgaggcttctggctaactatgcctctcagaacatcacgtaccattgtaagaattccattgcgtacatggacgaggagaccggcaacctgaagaaggccgtcattctgcaggggagtaacgatgtggagttggtcgcagaagggaactctagatttacctacacagtcctcgtggatgggtgttcaaagaagacaaacgaatggggtaagactataatagaatataaaacaaacaagcccagccgcctgccgttcctcgacatcgccccactggacattggcggcgccgaccaggagttctttgttgacatcgggccggtgtgtttcaag

SEQ ID NO: 1375 - DNA, 4098 bp, Artificial Sequence
  derived and/or modified sequence
atgctcagttttgtcgataccaggactttgcttctactagcggttaccttatgtctcgctacttgtcaatcactgcaagaggagactgtgagaaaaggccccgccggcgaccgaggtcctcgaggtgagagaggacccccaggcccccctgggagggatggcgaggacgggcctacaggcccgcccggcccccccggcccccccggaccccctggcctagggggcaactttgcagcccagtacgatgggaaaggagttggcctgggccccggacccatggggcttatggggccacgtgggccaccgggcgccgcaggagccccgggcccacagggctttcaaggcccggccggagagccaggcgagccaggtcaaaccggacctgccggggctcgggggcccgctggaccacctggaaaggccggggaggacggtcaccctggcaagccaggtaggcccggtgagcgtggcgtggtcgggcctcaaggagcaagagggttcccaggcacacccgggctgccaggatttaagggaatcaggggacataatggcttggacggactgaaagggcagcctggggctcccggtgtaaagggggagccaggtgcacccggcgaaaatggtacgcccggacagaccggagccaggggcttaccaggcgaaagaggccgagtgggggcacctggcccagccggtgcccgcggctctgatggctccgtgggccctgttggacctgccggtccgattggatcagccggacctcctggtttcccaggagctccaggccccaaaggcgaaataggagccgttggcaacgcaggccccgcaggacccgcaggcccacgcggggaggttggtttacctggtctgagtggccctgtgggacccccgggcaatcccggcgccaacggcctgaccggagctaaaggggccgccggcctgccgggagttgccggagcccccgggctcccaggaccccgtggcataccaggtccagtaggagcggccggcgccaccggagcccgcggtctcgtgggagaaccgggacccgcaggttccaaaggtgagtcaggcaataagggagagccgggcagcgctgggccacagggacctccaggacccagcggagaagaaggcaaacgtggacccaatggagaggctggtagtgccggaccccctgggccaccgggtctgaggggctctccaggcagcagggggcttccaggggccgacggtagggctggcgttatgggcccccccggatctaggggggctagtggaccggcgggagtgcgagggccaaatggcgatgcaggccgacctggtgagcctgggctgatgggacctcgcggcctgcctggctcccccggcaacataggccccgctggtaaagagggccccgtggggttgcccggtattgatggtaggccagggcctattggtccggccggcgcccgaggggagcccgggaacattgggttccccggtcccaaaggccccaccggcgaccctggaaagaatggagataagggccatgcaggactggccggtgccaggggtgcccccggccccgatggcaataacggcgcacaggggcctccaggcccacagggagtgcagggtgggaagggagaacaagggccccccggcccacccgggttccaggggctccctggaccaagtggaccagccggcgaagtagggaaacctggggaacgcgggctgcacggtgaattcggactgcccggtcctgcggggccccggggtgaaagaggtccccctggggagtcgggtgcagccggtccaaccggaccaatcggctcacggggtccctcaggccctcctggcccagacggcaataaaggagaacctggtgtggtcggagctgtagggaccgccggtcccagtggcccttcagggctgccaggggagagaggcgccgccggaataccagggggtaagggcgaaaagggggaaccggggctgcgcggagagattggcaaccctgggagagatggcgctcggggggctcctggggctgtaggcgccccggggccagcaggggccaccggggaccgaggcgaagcgggtgccgccggtcctgctggccctgccggcccacggggaagcccaggagaacgtggagaggttggccccgcaggtcctaacggttttgctggccccgccggcgcagcaggacagccaggtgctaagggggagcggggcgctaagggtcccaaaggtgaaaacggggttgtgggccccaccgggccggtgggagctgcaggacctgccgggcccaacggcccgcctgggccggcaggatcccgcggggatggtgggccacctggaatgaccggctttcctggagccgcgggtcgcaccggcccccctggaccttcaggtatctctggtcccccaggtcctcctgggccggccggcaaggagggtctcaggggcccacgaggagatcagggaccagttggaaggacaggggaagtgggggctgttgggccacccggattcgctggagaaaagggcccttccggcgaagctgggactgctgggccgcccgggacaccgggcccgcaggggctgctgggcgcccctggtatcctcggacttcctggcagcaggggcgaacgcggccttcctggagttgctggagcagtgggcgaacctggtcctcttgggattgccgggccaccgggcgcccgaggcccccctggagccgtagggtcccctggagtgaatggcgctcccggagaggctggccgcgatggaaacccaggaaatgacggcccaccaggcagagatggccagcccggccataagggcgaaagaggttaccccggcaacatcggccctgtgggggctgccggcgcccccgggccccatggaccagtcgggccagccggcaagcacggaaatcggggggagaccggtcccagcggcccagtaggtccagccggcgcagtggggccaaggggacccagcggccctcaaggtatcaggggggataaaggagaaccaggcgagaaaggcccccgcggcctgccaggcttgaaagggcataacggcctgcagggcctccccggaatcgctggtcaccatggggaccaaggcgccccggggtccgtgggccccgccggccccagagggcctgccggaccaagcggtcccgcgggtaaagatggccggacaggacaccctggaaccgtaggaccggcaggtatacgcgggcctcaaggtcatcaggggcccgctgggccaccgggaccacctgggccacccggacctccaggggtgagtggtggcgggtatgactttggatatgacggggatttctaccgggctgaccagcctcgctcagccccctctctgagacctaaggactatgaggtggatgctacactgaagtccctgaataatcagattgaaactctgttgacccccgagggaagtcggaaaaatccggctcgaacatgtagggatttgaggttgtcacatcctgagtggtcctccgggtactactggatcgacccaaaccagggatgcaccatggacgccataaaggtgtactgcgacttctctactggggagacatgtataagggctcaacctgagaatatccctgcaaagaactggtatagatcgagcaaggacaagaagcatgtctggttgggcgaaaccataaacgccgggtcccagttcgagtacaatgtggagggagtaacgtccaaggaaatggcaactcaactggcgtttatgaggttactggcaaattacgcttcccagaacattacataccactgcaagaactccatagcatatatggatgaggaaacaggaaatctgaagaaggcagtgatcctccagggatcaaacgacgtagaactggttgcggagggcaatagtcggttcacctatacggtcttggtggatggctgttccaagaagacgaatgagtgggggaaaactatcatagaatacaagaccaataaaccatctagactgccatttctagacattgcccccctggacatcgggggcgctgatcaggagttttttgttgatattggccctgtgtgttttaaa

SEQ ID NO: 1376 - DNA, 4098 bp, Artificial Sequence
  derived and/or modified sequence
atgctgtcctttgtcgacactcgtacgctgctgcttcttgcggtgactctgtgtctggccacctgtcaatcgctgcaggaggagacggtgcggaagggtccagctggtgatcgcggccctaggggagaacgcggaccgcctggacctccgggtcgcgacggcgaggacgggcctaccgggcctcctggtcctcccggcccccctggtccacctggactgggaggcaactttgcagctcagtacgatggtaagggagtgggtctgggacctggtccaatgggacttatgggacccagaggcccaccaggcgccgccggtgcacctgggccgcagggatttcaagggccagcaggtgagcctggcgagcccggacagaccgggcctgccggtgcaagaggaccagcgggaccaccgggaaaagcaggagaggacggccatccaggaaaacccgggcggcccggcgaacgcggcgtggtgggcccgcaaggggcaagagggtttccgggtaccccaggactccccggttttaagggaatcagaggccacaatgggcttgatgggcttaagggacagcccggcgcccccggggttaagggagaaccgggagcacctggcgaaaacggtacccctggacaaaccggagctcgtggtctgcctggcgaacgcggccgggtgggagcgccaggaccagctggggctcgaggaagcgatggctccgtgggtcccgtcggcccagcaggccctattgggtcggcaggcccgcctggatttcctggagctcccggacctaagggtgaaattggagcggtcggcaatgctggtccagcaggaccggcaggaccacgcggcgaggtggggctgcccgggttgagcggaccagtgggaccgccaggtaaccctggggcaaacggccttacgggggccaaaggagcagccggtctgcctggggtggcaggcgcacctggcctccctggacctcgtggcattcctgggccagtcggggcagctggagcaactggtgccagaggacttgtcggagaacctggaccagcaggttccaagggagaatcaggaaataagggcgaaccaggatccgccggcccacaaggtcctcctggaccatcaggcgaagaaggaaagagaggtcctaacggagaagctggcagcgcgggacctcctggaccccccggtttgagaggctcacctgggtcgagagggctcccgggagctgatggacgtgccggcgttatgggaccgccaggatcgagaggagcgagcggtcctgctggagtgaggggaccaaacggggacgcggggcgtcctggtgaaccgggtctgatgggacctcgaggccttcctggatcaccgggcaacatcggaccagcaggtaaggaaggaccagtggggctgccaggcatcgatggtcgcccggggcccatcggtccagcgggcgcacgcggcgaacccggcaacattgggtttcctggtccaaaaggacctaccggcgatcccggtaagaacggagataaagggcacgcaggtctggcgggagccagaggtgcccctggaccagatggcaacaatggtgcccaggggccaccaggacctcaaggcgtgcaaggaggcaaaggtgaacaaggacctccgggcccacctggatttcagggactccccggaccctcgggaccagcaggagaagtcgggaagccgggagaacgagggttgcacggagaattcggtttgccgggacctgccggaccaaggggtgagcgtgggccaccaggagagagcggagcagcaggcccaaccggacccattgggtcccggggacctagcggtccacccggccctgacggcaacaagggtgaaccaggagttgtcggagctgtgggtactgcaggtccttccggcccgagcgggcttcctggtgaacgcggagcagcgggtattcctggcggaaagggagaaaagggtgagcctgggctgcgtggcgaaattggaaatccaggacgagatggagcacggggtgccccaggagcagtgggtgcacctggacccgctggtgcaactggcgataggggagaagcgggcgccgcaggccctgccggcccagcgggaccacgaggttcacctggtgaaaggggtgaggtgggtccagccggaccaaacggattcgctggtcctgctggagccgcaggacagcccggagccaaaggcgagcgtggtgcgaagggacccaagggagaaaacggggtcgtgggtcctaccggccccgtgggcgcagcaggtccagcaggccctaacggccctcccggtcctgccggatctcgcggagatggtggaccaccaggcatgactggatttcccggtgccgccggaagaaccggcccaccaggcccttccggcatatcaggaccacccggtccaccagggccggcgggaaaggagggtctgcggggacctcggggagatcaagggcctgtcggtaggactggtgaggtgggggcggtggggccgccgggatttgcgggggagaagggcccttcgggcgaagccggtactgcagggccacctggtacccctggtccacaaggactgcttggagcgcctggtatacttggactgcctggttcgcggggggagcggggccttccgggtgttgcaggggcagtgggagaacctggacctttgggtattgcaggtccgccaggcgcaagaggaccccccggagccgtgggatcgcctggagtcaacggcgcaccaggtgaagcagggagggacggaaatcccggtaacgatggtcctcccggacgagatggccagcctggtcataagggcgaacgcggataccccggtaacataggacctgtcggagcagcaggggcacctggccctcatgggcccgtggggcctgctgggaagcacggcaaccgaggtgaaaccgggccttctgggccggtgggtccagcgggcgcagtggggcctcggggtccctccggaccgcaaggtatcaggggcgacaaaggtgaacccggagaaaaaggaccgcgtgggctgcctggattgaaaggtcataatgggctccaaggattgcccggaatagccggacatcacggcgaccaaggggcgcctggttcagtgggccctgccgggccacggggcccggcaggtccttcgggtccagcaggaaaggatggacgaaccggtcatccaggtaccgttggcccagcaggtatacggggtccacaaggacatcagggcccagcaggaccacccggcccacccggacctccgggaccacccggtgtgtcggggggtggatacgatttcgggtacgacggcgacttctacagagcggatcagccacggtccgctccctcccttagaccaaaggactacgaagttgacgcaactctgaagtcccttaacaaccaaattgaaactctcctcactccagaaggctcccggaagaacccggcacggacgtgcagagatcttaggctctcgcatcctgagtggagctcgggatactattggattgatcctaaccagggctgtacgatggatgccattaaggtgtactgtgatttttccactggcgaaacttgcataagagcacaaccggaaaacattccggcaaagaattggtaccggtcgtccaaagacaagaaacatgtgtggttgggagagactatcaatgccggtagccaattcgaatacaatgtggaaggagtgacctcgaaggagatggcgacccagctcgcattcatgcgcttgcttgccaattacgcctcccaaaacattacttatcactgtaaaaactcgatcgcatacatggatgaagagacgggtaaccttaagaaggcagtcattctgcaagggtcaaacgacgtcgagcttgtcgcagagggtaattcgaggttcacttacaccgtgctggtcgatggttgttcgaaaaagactaatgagtggggcaagacgattattgaatacaagaccaataagccctcacgccttccttttcttgacattgcacctctggatataggtggtgcggatcaggaattctttgtggacatagggcctgtctgcttcaag

SEQ ID NO: 1377 - DNA, 4244 bp, Artificial Sequence
  derived and/or modified sequence
gggaaataagagagaaaagaagagtaagaagaaatataagagccaccatgctgtcgttcgtggacacacgaacccttctgcttctcgcagtgactttgtgtcttgcgacatgtcagtcgctccaagaagaaacggtgcgaaaagggcctgccggtgacaggggtcctcggggagaaagaggtccaccaggccctccgggaagggatggggaagatgggcccactggaccacccggtccgcctggacctccgggtccgcctggtttgggtggcaactttgcggcacaatatgatgggaagggagtgggacttggtccagggccgatgggacttatgggaccccgaggtccgccaggggctgcgggagccccagggccacagggttttcaaggaccggcaggggagcccggtgagcccggacagaccgggccggcgggtgctaggggaccagctgggcctcccggaaaggctggtgaagatggtcatccgggtaaacctggccgacccggtgaacgcggagtcgtcggacctcagggcgcacggggattccccggaacacccgggttgcctggtttcaagggaattcgaggccacaatggactggacgggctgaagggtcagccgggagcgccaggtgtcaagggcgaaccaggggctccgggagagaacggcacaccgggtcagactggtgccagagggttgccaggggaacggggaagggtgggtgcgcctgggccagcgggtgcacgcggaagcgatgggtcggtagggcctgtcggcccagcgggtccgattgggtccgctggtccgcctgggtttccgggtgcccctgggcccaagggcgagatcggggcagtggggaatgcgggacctgccggacccgcagggccgaggggcgaggtggggctgcccggtttgtccggaccggtaggaccaccagggaacccgggagcaaacggtctgacgggtgccaagggtgcagcgggtttgccgggagtagccggtgcgccagggcttccgggacccagaggtatccccggacccgtgggggctgcaggggccacgggagcaagaggcctcgtcggggagccgggtcctgctggctcaaaaggggaatcagggaataagggtgagcctggctcagcaggtccccaaggtccgcctggcccatcgggagaagaggggaagaggggtcccaatggagaagcggggtcagcgggaccacctgggccaccaggattgcgaggtagccctggttcacggggactccctggagcggacggtcgggctggagtaatggggccacccgggtcgagaggcgcgtcaggtcctgccggagtcaggggacccaatggtgacgccggacggccaggtgaaccgggactcatgggtccgaggggattgcctggatcaccgggcaacatcgggcctgccggtaaagagggaccggtgggacttcccggaattgacggtagaccagggcccattgggcctgctggggcacggggagagcccggaaacatcgggtttccaggccccaaaggacctactggggaccctggcaagaatggagacaaaggtcacgcagggctggcgggagccagaggggcaccgggacccgacggaaacaacggggcacaaggaccgccaggtcctcaaggggtgcagggcggaaagggtgaacagggtccgccaggcccacctggttttcagggtctgccaggtccctcgggaccggcaggagaggtggggaagccaggcgaaagagggctgcacggagagttcggactccccggtcccgcggggcccagaggcgaacggggaccaccgggagagtcgggagcggcagggcctacgggacccatcggatcgagaggaccgtccggtcctccgggaccggatggaaacaagggagaacccggagtggtgggagcagtcggaactgcgggaccaagcggtccatcggggctccctggtgagaggggagctgcgggaatcccagggggcaaaggcgagaagggcgagccaggactcaggggagaaattgggaatcctggcagggacggagcgaggggagcaccgggagcggtcggtgcacctggtccagccggagcgacgggggataggggagaagcaggggcagccggaccggctgggcctgccggtccacgagggtcacccggagaacggggagaagtcggaccagcaggtccgaacgggttcgcgggtccagcaggtgctgcgggacagccgggtgcgaaaggggagcgcggagcaaagggtcccaagggggaaaacggtgtcgtcggtccgacaggtccggtaggggcagcagggccagctggacctaatggtcctcccggaccagccggatcaagaggtgatggcggaccaccgggaatgacagggttccccggtgcagccggtcgcaccggaccaccaggtccgtcgggaatttccggtccccctggcccacccggaccggctgggaaagaggggctgagagggcctagaggggatcagggacccgtcggaagaacgggggaagtgggtgcggtcgggccaccgggattcgctggggaaaaagggccctcgggcgaggccggaaccgcaggtccacccggtacaccgggaccgcagggtctgttgggagcacccggcatccttggtctgcccggtagcagaggcgagagaggactgcctggagtcgcgggagccgtgggggagcctggaccgttggggatcgccggaccccctggggcgaggggaccgcctggtgccgtcggttcgcctggtgtcaatggagcacctggtgaggctggacgggacggtaatcccggaaacgatggtccaccgggacgagatgggcagcctggacacaagggtgagagaggttatccggggaacattggtcccgtcggtgcggcaggagcaccagggcctcacgggccagtcgggccagccggaaagcacgggaatcgaggcgagactggaccttccggtccggtggggccagcgggagctgtaggaccaaggggtcctagcggaccacagggcattcgaggggacaaaggtgaacccggtgagaaaggaccgagagggctccccggactgaagggacacaacggactccaggggttgccgggaatcgcagggcatcatggcgatcagggagcgcctggatcggtcggaccggcaggtccgcgaggacccgctgggccttcgggaccagcggggaaagatggaaggacgggtcatcccgggacagtcggtcctgccggcatccgcggaccccagggtcatcagggtccagcgggaccccctggtccacctggcccaccaggacctcccggagtgtcgggtggcgggtacgattttggttatgacggagacttctatagggcggatcagccccgatcagcgccgtcgcttcggcctaaagactatgaggtggatgcaactctcaagtcgctcaacaatcagattgaaacgctgcttacgcccgaaggctcacgcaagaatccagctagaacttgtcgggatctgagactctcacacccagagtggtcgtccggctattactggatcgaccccaatcagggatgtaccatggacgccatcaaagtgtactgcgacttttcgacgggtgagacttgcatcagggctcagcccgagaatatcccagcgaagaactggtatcggtccagcaaagacaagaagcacgtgtggttgggggaaaccatcaacgccggaagccagtttgagtacaatgtagagggggtgacgtcgaaagagatggcaacgcaactggccttcatgaggctcttggcgaattacgcgtcacagaacatcacataccattgcaaaaacagcattgcgtacatggacgaagagacagggaatttgaaaaaggccgtaatcttgcaagggtcgaacgacgtggaacttgtagcggaaggtaactcgcgcttcacatacacggtgttggtggatggatgctccaaaaagacaaacgaatggggaaagacgatcatcgaatacaaaaccaacaaaccctcacgactccctttcttggatatcgcgcctcttgacattggtggagccgaccaggaattctttgtggatattggcccagtatgcttcaaatgataagctgccttctgcggggcttgccttctggccatgcccttcttctctcccttgcacctgtacctcttggtctttgaataaagcctgagtaggaag

SEQ ID NO: 1378 - DNA, 696 bp, Artificial Sequence
  derived and/or modified sequence
atggcaaagtgggtcccggctctgctgctccgccgcgtcccactcttctcgctccgctttcgccccgcatcttccaccttccttccagtccttgcggcgaccgagcccgcagtgtcagtccccagcggggacctgagtatgccggtgaagacgagagcggaaggcgaggacgacggcttcggggaagcgggtgacccgaggagactgctggagcgaccttggcgtttccgggggtgccttcccgggaaggggaatcgggatgttggcttcgaagggaccgaagggcccacctcgacccgccccgagtgggtttggagttgtaggtgctgtctcggatgcagggcgagcacccgcgagcgggtaaccagtcccgtgagagctgcaggtccccagccccgttttacagatagggaaactgaggcagctgctgggacactcgcccatatgggttttgctccacccacttccttcagccactttacagaccaggagttgagggactgctcgagcttagagtgtttaggggtggttgagggtgacccccatgttctgtgctctactctatccctatccaggccttctcccagcgccactctcacgctcctgcttgctagctcctgcttgctagctcctgctcctcccagcttcatcctcctcctgtttacattaattgctcctgatcttccacactcttga

SEQ ID NO: 1379 - RNA, 4101 nt, Artificial Sequence
  derived and/or modified sequence
augcuguccuuugucgauacuaggacauugcuacuacuggccgugacauugugucuggcuacaugucaaucuuugcaagaggagacugugagaaaggggcccgcuggcgaccgugggccccggggagaaagggggcccccuggaccuccaggcagagauggagaagauggccccaccgggccucccggucccccgggcccaccaggcccuccuggucucggagguaacuucgcagcccaguacgauggcaagggcguggggcucggucccggaccuauggggcugauggggccacgcgggccgccaggggcugcuggcgcgccgggcccccaaggguuccaaggccccgcuggggagcccggagaaccaggccaaacagggccugcuggagcaagaggcccugcgggaccuccugggaaggcuggagaggacgggcacccaggcaagccugggcggcccggggagcgaggcgucguggggccccaaggagccagagguuuucccgguacacccggccuuccuggauuuaaaggcauaaggggucacaauggacuugacggguugaaagggcaaccgggcgcaccgggagugaaaggcgaacccggugcuccaggggagaauggaacgccaggucagacaggcgccaggggacugccaggggaacguggaagggugggagcacccgggcccgccggagccagagguucagaugggagugucggaccaguagguccggccggccccaucggaucagcaggcccuccaggcuuuccgggagccccugggcccaaaggcgaaauuggagcugugggcaacgcuggaccagccgggcccgcugguccccguggagagguaggucuuccuggguugucagggccuguagguccaccgggcaaucccggcgcuaacggucugaccggcgccaaaggcgcagcugggcugccugggguugcuggggcacccggacugcccggaccccgagguaucccugggccggugggugcggcuggcgcgacaggcgccaggggacuaguuggugaacccggcccagcgggcuccaagggcgagucuggcaauaaaggcgaaccagggagcgcggggccacagggcccgcccggccccagcggggaggaggguaagcguggaccgaauggagaagcgggaucagcaggacccccuggccccccuggacucaggggaucuccuggcagcagggggcugccuggggccgaugguagggcagggguuaugggcccaccaggcaguaggggcgcauccggccccgcggggguccgcggaccuaacggugaugcuggacggcccggugaaccagggcucaugggcccuagaggcuuaccuggcagcccaggcaauauuggaccugccggcaaagagggccccgucgggcuaccagguauugauggacgccccgguccaauagguccagcaggcgcaaggggcgagccugguaacaucggauuucccggucccaaaggccccacuggggauccagguaagaacggcgacaagggacacgcuggcuuggccggagcacgcggagcaccagguccggauggcaacaacggcgcacaggguccaccagggccucagggcgugcagggaggaaaaggagaacaggggccgccagguccucccggauuucagggacucccaggccccucgggaccagcuggagagguuggcaaacccggugaaagaggacuucacggcgaauuuggcuuacccgguccugcgggcccccgcggagaacgggggccuccuggugaaaguggagcagcaggccccacuggccccauuggcagcagagggcccagcggccccccuggucccgaugggaauaagggcgagccggggguugugggcgcugugggaacagcagguccgagcggcccuagcggccucccaggcgaacggggagcagcaggaauaccgggagguaaaggggagaagggugagccuggccugcguggcgagaucgggaaccccggacgagauggcgcgcggggggcgccuggagcugugggagcucccggacccgccggggccaccggagacagaggagaagcaggagcugccggcccugcaggcccagcugguccaaggggcagcccgggcgaacgaggcgaaguuggaccugccggccccaacggauucgcaggcccagcaggagccgccgggcagccuggcgccaaaggagaaagaggagcuaagggaccaaaaggcgagaaugggguagugggccccacugguccuguuggggcagcgggcccagccgggccuaacggaccaccuggacccgcugggucccgaggcgacggcggaccccccggaaugacaggguuccccggugccgccggaagaaccgguccaccugguccuucuggcauuagcgggccaccugggccgcccggaccggccggcaaagaagggcuccggggcccucgaggggaccaggguccugucgggagaacuggagagguaggggcuguagggccuccaggcuuugcuggcgagaagggcccaagcggcgaggcugguacugcugggccccccggaacaccagggccacaagggcuacugggagccccaggcauccugggguuaccuggcucccggggugagagagggcuaccuggaguugcuggagccgugggagagcccggcccucucggcaucgccgguccaccaggcgccagaggucccccuggcgccgugggaagccccgggguuaacggagcaccuggcgaagcaggacgcgacgggaacccaggaaaugaugguccacccggccgggacggucaacccgggcauaaaggagaaagaggcuaccccggcaacauaggcccagugggugcagcaggagcaccaggcccucauggcccugugggccccgccgguaaacauggcaaccgcggugaaaccggcccaucuggcccagugggccccgccggugcagucggcccccgcgggcccuccgguccucaaggaaucaggggggauaaaggggagccgggagagaaaggaccuaggggucuccccggccucaaaggacauaaugggcugcaaggccugcccggaauugcaggccaccacggagaucaaggggccccagguagcgucggucccgcggggccccguggccccgccgggccaagcgggccugccggaaaagauggucggaccgggcauccuggcaccguaggaccagcuggaaucagggguccccaaggccaucaaggccccgccgguccaccuggcccucccggaccgccuggcccuccuggggucucaggaggcggauaugauuuuggauacgacggcgauuuuuaccgggcagaucagccucggagcgcaccuaguuugcggcccaaagauuaugaaguugacgccacacugaaaagccugaauaaccagaucgagacgcuccucacuccagaagguagcaggaagaacccugccaggacaugcagggaucuuagacugucccacccugaaugguccuccggguauuauuggaucgaucccaaccaggggugcacaauggacgcgaucaaagucuacugugacuuuaguacaggugagacaugcauccgagcacagccagaaaacauccccgccaaaaauugguaccgauccaguaaagauaaaaagcaugucuggcugggagagacaauaaaugccggaucacaauuugaguacaauguugaaggcgucaccucaaaggagauggcaacccaacuggcguuuaugagacuacuggcgaauuacgcaucacagaacaucacauaucauugcaagaacuccaucgcuuauauggacgaagagaccggcaaucugaaaaaggcuguuauccugcaggguucgaacgacgucgaacucguggccgaggggaauagucguuuuacauacaccguccugguggauggaugcuccaagaagaccaaugagugggguaagacuaucaucgaauauaaaacuaacaagccaagucgacugccuuuccuggacaucgcgccacuggauaucgguggcgccgaucaggaguuuuucguugacauuggcccagugugcuuuaaguag

SEQ ID NO: 1380 - RNA, 4104 nt, Artificial Sequence
  derived and/or modified sequence
augcucucuuucguggauaccaggacacuccugcuccucgccgugacccugugucuagcaacgugccagugcacccuuggaggacagacauuaucuaaauucccgcccuaccuccacauugagagaucugaacaggguccaccaggcccaccugggagagacggagaagacgggccaacaggccccccaggcccucccgguccuccugggccccccggccugggcggaaacuucgcugcacaguaugacggaaaaggagugggucuuggaccuggaccuauggggcuuauggggccuagggguccacccggugccgccggagcucccggcccgcaaggcuuucagggccccgcuggugaacccggggaaccuggacagaccgggcccgccggcgcucggggaccggccgguccccccggaaaagcgggggaggauggucauccaggcaagccgggccgucccggugaaagaggggugguagggccucagggagcgcgcggcuucccgggaacacccggucugcccggguucaaaggaauccggggucacaacggccuagacggccuuaaggggcagccuggcgcaccuggaguuaaaggagaaccaggagcucccggagaaaauggaaccccaggccaaacuggcgcccgcggucuucccggagagcgcggcaggguaggagccccaggaccugccggagcaaggggaagcgacggcucuguuggccccguagggccugcugggcccauuggaagugcaggaccccccggauuucccggagccccggguccaaagggcgagaucggggcaguggggaacgcggggccagccggaccagccgggccuagaggagaaguuggccuacccggacucuccgggcccgucggcccacccggcaauccuggagccaauggccugacaggcgcaaaaggagcagcuggacucccaggcguggccggagcuccugggcuaccuggaccccgcgggauacccggcccugugggcgcugcuggugcaacuggcgcacgaggucuggugggcgaaccgggaccugcagguucaaagggggagucuggaaacaagggggagccuggaagcgcagggccucagggcccaccgggaccgucaggugaggaaggaaagcgagggccaaauggagaggcuggcucagcggggccaccuggaccccccggucugaggggaagcccagguagccgcggucucccuggcgccgauggaagggcugggguaaugggcccaccaggcagcagaggagccucggggccugcaggaguacggggccccaacggcgacgccggcagaccgggugagccgggccugaugggcccccguggacugcccgguucaccaggcaauauuggaccugccgggaaagaaggaccggucgggcuuccugguaucgacggacgccccggacccauuggccccgcaggagcccgaggcgagccagguaacaucggauucccuggccccaaggguccgacaggcgauccuggaaaaaauggagacaagggacacgccggacucgccggagcacgcggagccccuggcccggacggcaauaacggagcacagggaccgccugguccccagggcgugcagggcggcaaaggagaacagggucccccagggcccccaggcuuucaaggguuacccggcccauccggcccugccggggaggugggcaaaccuggggaaagagggcugcauggcgaguucggacuccccggcccugccggcccucggggcgaacgggguccgccuggggagaguggagccgccggaccuacaggcccuauaggcucgagagggccuagcggccccccaggucccgaugggaauaaaggagaacccggcguagucggcgccgugggaaccgccgggccuucuggacccucuggguuacccggugagcgcggggccgccggcauaccugggggcaagggagagaagggcgaaccggggcugcgcggggagauugggaaucccggcagagauggggcccguggagcgccuggugccgugggagcuccaggcccggcgggcgccaccggcgaucggggagaggcaggcgcugcaggacccgcaggccccgccggaccuaggggcagcccuggagaaagaggggaagugggcccggcggggccaaauggauuugccggccccgcuggugccgcaggccagccuggcgcuaaaggcgaaagaggugcuaaaggcccaaagggagaaaaugggguaguggggccuacggggccagugggcgcagcugguccggcagguccaaauggcccacccggaccagccggaagccgcggggacggagggccucccgguaugacuggauuucccggugcugccggaaggacugggccaccugggccaucuggcaucucuggcccaccugggccacccggaccagccggaaaggaaggacuccgaggaccuagaggagaucaaggccccguaggccggacaggagaaguuggcgccguggggcccccugguuucgcuggggagaaggggcccucgggcgaggcggguacugcggguccaccagguacacccgguccucaggggcuucucggagcacccggcauccugggguugccuggaagcaggggagaacguggcuugccugggguugcgggagccgucggagaacccgguccucucggaauugcagggccacccggcgcucggggccccccuggcgccgucggcagcccaggcguuaauggcgcucccggggaagccggucgagauggcaaucccgguaacgauggaccuccuggcagggauggccagccugggcauaaaggagagagagguuaccccggaaauaucggaccuguuggagcugccggggcaccugggccgcauggucccguugggcccgccggcaaacauggcaaccggggagagacuggacccucuggcccaguggggcccgcaggcgcaguaggaccgagaggccccuccgggccgcagggaauacgaggcgacaaaggggaacccggagaaaaggggccaagaggccugccaggccugaaaggacauaacggguugcagggacuaccagggauugccggacaucacggagaccagggcgcucccggcuccguggggccagcuggcccacgcggcccagcaggacccaguggucccgcuggaaaggacggacguacaggccacccuggcacugucggccccgccggcauccgcgguccgcaggggcaccagggcccugccggcccgccugguccuccuggcccgcccggaccuccaggcgugucuggugggggauacgacuucggcuacgauggcgauuuuuauagggcugaccaaccccgaagugccccaucacugcgccccaaagacuaugagguggaugcaaccuuaaaaucccucaauaaccagaucgaaacccugcuaaccccugaggggucgaggaagaaccccgcacgaaccugucgggaccuccgccuaagccacccagagugguccuccggauacuauuggauugaucccaaccagggauguacuauggacgcuauuaagguguacugcgauuuuucuaccggagaaaccuguauaagagcucagccggagaauauuccggcgaagaacugguauagaucuuccaaagauaaaaaacacgugugguuaggugaaacaauuaaugccgggucccaguuugaauacaacguugaaggugugacaucuaaagaaauggcuacacagcucgcguucaugcggcuguuagcaaauuacgccucccaaaauaucacuuaucacugcaaaaacuccauagcguauauggacgaagagaccggcaacuugaagaaggcggugauacuucaggggucgaacgacguggaacugguggccgagggcaauagcagauucacuuauacagugcuaguggacgggugcucuaagaagacgaaugaaugggggaagacaaucauagaauacaaaaccaauaagcccuccaggcuucccuuccuugauauugccccuuuggauauuggcggcgccgaccaagaauuuuuuguggacaucgguccuguuuguuucaaauag

SEQ ID NO: 1381 - RNA, 4101 nt, Artificial Sequence
  derived and/or modified sequence
augcucagcuuugucgacacacgcacccugcuguuacucgcagucacacuaugccuugcaacuugucaaucgcuacaggaggaaacaguaagaaaggggccugccggugauaggggaccaaggggggaacgcggaccaccggguccuccaggcagagauggugaagacgggccuacaggaccucccggcccaccaggcccucccgguccuccuggacucggcgggaauuucgcagcccaguacgauggcaaagguguuggccucggaccggggcccaugggcuugaugggaccuagaggcccgcccggagccgccggggccccaggcccucagggauuucaagggccagccggcgaaccaggagaaccuggccagaccgguccugccggagcaagaggaccugcggguccccccggcaaggcaggagaagacgggcaccccggcaaaccuggacggccaggagagcgcggcgucgucggcccccaaggugcgcgcggauuccccggaacacccggacugcccggguuuaaaggcaucagaggacauaacggguuagauggccugaaaggccagcccggagccccuggcguuaaaggcgagccaggagcuccuggcgaaaaugggacaccgggacagacaggcgcucgaggcuuaccaggugaaagggguaggguuggcgcucccgggccggcaggagcccggggaucugacggaucagugggaccagucgggccagccggcccuauuggaagugcuggaccaccuggcuucccaggugcucccggcccaaagggagaaauuggcgccgugggaaacgccggaccugcuggacccgccggaccccggggugagguuggacuucccggccugucaggaccuguggguccuccuggcaauccuggagcuaauggccucaccggcgcgaaaggugcggcagggcuucccggcguggccggcgccccuggccugccaggcccucgcggaauccccgggcccguuggagcggcaggagccaccggcgcucgcggacucgucggagagccgggcccagcuggaaguaaaggagaaagugggaauaaaggagagcccgggagugcgggcccacaaggcccccccgggcccucaggcgaagaaggaaagcgcgggcccaacggagaagcuggauccgcaggaccacccggccccccuggccugagaggaucaccuggaaguaggggacugcccggggcagacgggcgcgcaggcgugauggguccuccaggaaguagaggagcuucaggacccgcgggugugcggggaccaaauggugacgcuggaagacccggggaaccaggcuuaaugggaccucggggguugccuggcucccccgggaacauuggcccugccggcaaggagggaccagugggcuugccuggaauagacggucgucccggaccaaucggaccagcaggugcacgcggagagcccggaaacaucggguuccccggacccaagggacccacuggggauccagguaagaacggcgacaagggacacgcuggcuuggccggagcacgcggagcaccagguccggauggcaacaacggcgcacaggguccaccagggccucagggcgugcagggaggaaaaggagaacaggggccgccagguccucccggauuucagggacucccaggccccucgggaccagcuggagagguuggcaaacccggugaaagaggacuucacggcgaauuuggcuuacccgguccugcgggcccccgcggagaacgggggccuccuggugaaaguggagcagcaggcccuacugggccgauaggaagucguggcccgagcggcccuccgggaccagauggaaauaagggcgaaccuggaguugugggugccguugguacugccgguccauccggaccaagugggcuaccuggcgagcguggagccgcaggcaucccuggaggcaaaggagagaagggcgaacccggccugcgaggugaaauugggaaucccggccgagacggcgcaagaggugcccccggagccgugggugcgccuggaccagcaggggcgaccggggauagaggagaagcaggugcggccgggcccgccgggcccgccgggccaagaggaucaccaggagaaagaggcgaaguaggccccgcaggaccgaauggguucgcugggccagcaggagcugcgggucagccuggcgcaaagggcgagcgcggcgcuaaggggccaaaaggagagaacggggucguuggaccaaccggaccaguuggcgcagcuggaccugccggaccgaauggaccacccggacccgcaggcagucggggcgauggcggccccccaggaaugaccggcuuuccuggagccgcagguagaacagguccaccuggcccaagcgggauaucaggaccaccugggccaccggggcccgcuggcaaggagggccuuaggggcccacgaggagaccagggcccgguaggacgcaccggagaggugggagcuguuggccccccggguuucgcgggggagaaaggaccauccggagaagccggcacagcuggaccacccgggacccccgguccucagggacugcugggagcucccggcauucucggccuaccugggucuagaggagaaagaggauugcccggaguugcaggcgcugucggcgagcccggcccccuggguauagcuggaccucccggagcccgcgguccgccaggcgcagucggauccccaggggugaauggggcucccggagaggcuggacgggaugggaauccagggaacgacggaccgccaggucgugauggacagccuggucacaagggggaacgcgguuaucccgggaauaucggaccagugggggccgccggagcucccgggccucaugggccagucggcccugcugguaaacacggcaaccgaggagagacaggaccuuccggcccagucggcccggccggugcugugggaccucgcggaccuucaggcccacaaggaaucagaggggacaagggggaaccaggugagaagggcccuagggguuugcccggacugaaaggccacaauggccuccagggacugccuggcauagccggacaucauggugaucaaggggccccagguagcguagguccugccgguccaagaggccccgcuggcccuuccggaccugcuggcaaggaugggcgcaccggacacccaggaacuguggggccagccgguauuaggggaccucaaggacaucaggguccugccggcccccccggaccucccggcccgcccggcccgccuggaguuuccggaggaggauaugauuucggcuacgacggggauuucuaccgcgcggaccagccuaggagcgcacccagccugaggcccaaggacuacgagguugacgcaacucuaaaaagccugaauaaccagaucgagacuuuguuaacaccagaggggagccgcaaaaacccugccaggacauguagagauuugagacugagucacccagaaugguccuccgguuacuacuggaucgauccaaaccaggguugcacaauggaugccaucaaaguguacugcgacuuuucuacaggggaaacuuguaucagagcacagcccgaaaauauaccugcaaaaaauugguaccggucauccaaagauaagaaacacgugugguuaggugaaacaaucaacgcugggagccaguuugaguauaacguagagggcgugacuagcaaagagauggcuacgcagcuggccuucaugagacuccuugcuaauuaugcuucgcagaacaucacauaucacuguaaaaauuccauugccuauauggaugaggaaacuggaaaccugaaaaaagcugucauccuacaagguaguaaugaugucgagcuuguggcagaaggaaauucaagauucaccuacacugugcuuguagacggaugcaguaaaaaaacaaacgaauggggaaagacaaucaucgaguacaaaacaaacaagcccagcagacucccuuuucuggacauugccccccucgacauuggcggggcagaccaggaauuuuuugucgauaucggaccuguguguuucaaauag

SEQ ID NO: 1382 - RNA, 4104 nt, Artificial Sequence
  derived and/or modified sequence
augcuuagcuuuguggauacaagaacccuucuucuccuugcugugacauuaugucuagcgaccugucaaugcacacugggaggacagacccucucaaaguuuccccccuaccugcacauagagcggucugagcagggccccccuggaccccccggucgcgacggcgaggauggucccaccggcccccccggcccucccggcccuccuggcccucccggacugggugguaacuucgccgcacaguaugacgguaaaggcgugggccucggaccaggaccaaugggauuaaugggcccuagaggccccccaggagccgcuggagcccccggaccucaaggauuucagggcccugcaggagaaccgggagagcccgggcagacuggcccugcaggcgcaagagggccugcaggaccuccuggaaaagcaggcgaagauggccaucccggaaagcccggccgcccaggcgagcguggaguggugggaccucagggcgccagaggauuucccggaacucccggccuuccuggcuuuaaagggauaagagggcauaauggcuuagauggacucaaagggcagccuggcgcccccggcgugaagggugaaccgggugcuccaggcgagaacggcacuccuggccagaccggagcacgggggcucccuggcgaacgaggaaggguuggagcgccgggcccagcgggugcccgcggauccgauggcucaguugggccaguugggccagcuggaccaauaggaagugcaggcccccccggauuuccuggcgcccccggacccaagggggaaauuggcgcuguuggcaaugcaggacccgcggguccagccggcccuaggggcgaaguaggcuuaccaggacuguccggcccagucggaccgccagguaauccuggagccaauggccugacaggcgcaaaaggagcagcuggacucccaggcguggccggagcuccugggcuaccuggaccccgcgggauacccggcccugugggcgcugcuggugcaacuggcgcacgaggucuggugggcgaaccgggaccugcagguucaaagggggagucuggaaacaagggggagccuggaagcgcagggccucagggcccaccgggaccgucaggugaggaaggaaagcgagggccaaauggagaggcuggcucagcggggccaccuggaccccccggucugagggggagcccuggaucaagggggcuccccggggcagauggucgcgcagguguaaugggaccaccugggagcagaggcgccucagguccagcuggaguccgcggaccaaacggugaugcuggccgcccaggcgaaccagggcucaugggaccucggggcuugccaggaagccccggaaauaucggaccggcuggcaaggagggaccaguaggcuuaccaggaauagauggcagaccaggcccuauuggcccugcuggagcacggggagagcccggcaacauaggguucccagggccaaaggggccaacuggugauccaggcaaaaauggcgauaaaggacacgcugggcuggcgggagcaaggggagccccuggaccugauggaaauaacggggcacaagggcccccagggccacagggagugcagggcgggaaaggagaacaggguccaccaggcccacccggauuccagggccugccaggaccuagcgguccagcuggugaagugggcaaaccuggggaacgcggguuacacggagaguuuggucugcccgguccugcugguccuagaggcgagcguggccccccuggggagucuggcgcagcugggcccacaggaccaauuggaaguagagggcccuccggaccaccuggucccgauggaaacaaaggagagcccgguguggugggagcagugggaacugccgguccgucagguccgucugggcuaccgggagagagaggagccgccggaauccccggaggaaaaggggaaaaaggugagccugggcugaggggggagauugguaacccaggccgcgacggcgcccgcggcgccccaggagcaguuggcgccccagggcccgccggugcuacaggugauaggggagaagcuggcgcggcuggucccgcugguccugccgggccccgagggucgccaggggaacggggagaagugggacccgccggccccaacgguuucgccgggcccgcuggcgcugcuggacagcccggagcgaagggagaacgaggggccaagggaccaaaaggcgagaacggaguugucggaccuaccggaccagugggcgcugcgggucccgccgggccaaacggaccaccaggcccagcuggcucccggggggacggagggccaccaggaaugacaggcuucccuggugcagcagguagaaccgggccaccuggccccucugguaucuccggaccccccggccccccaggccccgcuggcaaagagggcuugcgcgguccgaggggcgaucagggacccguugguaggaccggggaaguuggcgcugugggccccccggguuucgcaggggagaagggaccaaguggcgaggccggaacagcuggaccucccgggacacccggcccacaaggucugcuuggugccccuggcaucuuaggccugcccgguucacgaggggagcgagggcugcccggaguugccggcgcugugggugagccaggccccuuggguaucgcaggcccgcccggagccaggggaccgccuggcgcugugggcagcccuggcgugaauggagcccccggcgaagcaggccgggauggaaacccagggaacgauggacccccggguagagacggccaaccaggccacaaaggggagaggggauaccccgggaacaucggaccugucggagccgcuggagccccggguccacacggcccugugggaccagcagggaagcacggcaaucggggggaaacagggccuucgggaccugucggaccagcuggagcaguggggccgcgcggacccucaggaccccaaggaauuagaggagauaaaggagaaccuggagaaaagggcccaagaggauugccuggacugaaaggacacaacggucuccaaggacucccaggaauagcagggcaccacggagaucagggcgcccccggcagcgucgguccugcaggaccccgagggccagcuggaccauccgggccagccgguaaggacggccgcacugggcacccagggacuguggggcccgccgggauacggggcccacaaggccaccaagggcccgccgguccaccaggccccccagggccacccggaccaccaggaguguccggaggcggcuacgacuuugguuacgacggcgauuuuuaccgugccgaccagccccguucugcccccaguuugcgaccuaaggacuacgagguggacgcaacucucaaaagccuuaauaaucagaucgaaacacugcugaccccugaaggaucacgcaagaacccugcaagaaccugucgggaccugagacuuucacacccagaauggagcucaggcuacuacuggaucgauccaaaucagggcugcacuauggaugcgauuaagguguacugugacuuuagcacaggcgagacuugcaucagggcccagcccgaaaauauccccgcuaaaaacugguaucggagcuccaaagauaagaaacacgucugguugggcgaaacuauuaacgcaggcucccaguuugaauacaacgucgaaggcgucacauccaaggagauggccacgcagcuggcauuuaugagacuauuagccaacuacgcaucacaaaauaucacauaucauuguaagaacagcauagcguacauggacgaagaaacuggcaacuugaagaaagccgugauucuacagggaagcaaugaugucgaacugguggccgaaggaaauucaagguucaccuauacaguacugguugacgggugcagcaagaagacaaaugagugggguaagaccaucauagaauauaaaaccaacaaaccuagccgacucccauuccuggacaucgcaccuuuggauauuggcggugcagaucaagaauucuucguggacaucgggccgguguguuuuaaguag

SEQ ID NO: 1383 - RNA, 4244 nt, Artificial Sequence
  derived and/or modified sequence
gggaaauaagagagaaaagaagaguaagaagaaauauaagagccaccaugcugucguucguggacacacgaacccuucugcuucucgcagugacuuugugucuugcgacaugucagucgcuccaagaagaaacggugcgaaaagggccugccggugacagggguccucggggagaaagagguccaccaggcccuccgggaagggauggggaagaugggcccacuggaccacccgguccgccuggaccuccggguccgccugguuuggguggcaacuuugcggcacaauaugaugggaagggagugggacuugguccagggccgaugggacuuaugggaccccgagguccgccaggggcugcgggagccccagggccacaggguuuucaaggaccggcaggggagcccggugagcccggacagaccgggccggcgggugcuaggggaccagcugggccucccggaaaggcuggugaagauggucauccggguaaaccuggccgacccggugaacgcggagucgucggaccucagggcgcacggggauuccccggaacacccggguugccugguuucaagggaauucgaggccacaauggacuggacgggcugaagggucagccgggagcgccaggugucaagggcgaaccaggggcuccgggagagaacggcacaccgggucagacuggugccagaggguugccaggggaacggggaagggugggugcgccugggccagcgggugcacgcggaagcgaugggucgguagggccugucggcccagcggguccgauuggguccgcugguccgccuggguuuccgggugccccugggcccaagggcgagaucggggcaguggggaaugcgggaccugccggacccgcagggccgaggggcgagguggggcugcccgguuuguccggaccgguaggaccaccagggaacccgggagcaaacggucugacgggugccaagggugcagcggguuugccgggaguagccggugcgccagggcuuccgggacccagagguauccccggacccgugggggcugcaggggccacgggagcaagaggccucgucggggagccggguccugcuggcucaaaaggggaaucagggaauaagggugagccuggcucagcagguccccaagguccgccuggcccaucgggagaagaggggaagaggggucccaauggagaagcggggucagcgggaccaccugggccaccaggauugcgagguagcccugguucacggggacucccuggagcggacggucgggcuggaguaauggggccacccgggucgagaggcgcgucagguccugccggagucaggggacccaauggugacgccggacggccaggugaaccgggacucauggguccgaggggauugccuggaucaccgggcaacaucgggccugccgguaaagagggaccggugggacuucccggaauugacgguagaccagggcccauugggccugcuggggcacggggagagcccggaaacaucggguuuccaggccccaaaggaccuacuggggacccuggcaagaauggagacaaaggucacgcagggcuggcgggagccagaggggcaccgggacccgacggaaacaacggggcacaaggaccgccagguccucaaggggugcagggcggaaagggugaacaggguccgccaggcccaccugguuuucagggucugccaggucccucgggaccggcaggagagguggggaagccaggcgaaagagggcugcacggagaguucggacuccccggucccgcggggcccagaggcgaacggggaccaccgggagagucgggagcggcagggccuacgggacccaucggaucgagaggaccguccgguccuccgggaccggauggaaacaagggagaacccggaguggugggagcagucggaacugcgggaccaagcgguccaucggggcucccuggugagaggggagcugcgggaaucccagggggcaaaggcgagaagggcgagccaggacucaggggagaaauugggaauccuggcagggacggagcgaggggagcaccgggagcggucggugcaccugguccagccggagcgacgggggauaggggagaagcaggggcagccggaccggcugggccugccgguccacgagggucacccggagaacggggagaagucggaccagcagguccgaacggguucgcggguccagcaggugcugcgggacagccgggugcgaaaggggagcgcggagcaaagggucccaagggggaaaacggugucgucgguccgacagguccgguaggggcagcagggccagcuggaccuaaugguccucccggaccagccggaucaagaggugauggcggaccaccgggaaugacaggguuccccggugcagccggucgcaccggaccaccagguccgucgggaauuuccggucccccuggcccacccggaccggcugggaaagaggggcugagagggccuagaggggaucagggacccgucggaagaacgggggaagugggugcggucgggccaccgggauucgcuggggaaaaagggcccucgggcgaggccggaaccgcagguccacccgguacaccgggaccgcagggucuguugggagcacccggcauccuuggucugcccgguagcagaggcgagagaggacugccuggagucgcgggagccgugggggagccuggaccguuggggaucgccggacccccuggggcgaggggaccgccuggugccgucgguucgccuggugucaauggagcaccuggugaggcuggacgggacgguaaucccggaaacgaugguccaccgggacgagaugggcagccuggacacaagggugagagagguuauccggggaacauuggucccgucggugcggcaggagcaccagggccucacgggccagucgggccagccggaaagcacgggaaucgaggcgagacuggaccuuccgguccgguggggccagcgggagcuguaggaccaagggguccuagcggaccacagggcauucgaggggacaaaggugaacccggugagaaaggaccgagagggcuccccggacugaagggacacaacggacuccagggguugccgggaaucgcagggcaucauggcgaucagggagcgccuggaucggucggaccggcagguccgcgaggacccgcugggccuucgggaccagcggggaaagauggaaggacgggucaucccgggacagucgguccugccggcauccgcggaccccagggucaucaggguccagcgggacccccugguccaccuggcccaccaggaccucccggagugucggguggcggguacgauuuugguuaugacggagacuucuauagggcggaucagccccgaucagcgccgucgcuucggccuaaagacuaugagguggaugcaacucucaagucgcucaacaaucagauugaaacgcugcuuacgcccgaaggcucacgcaagaauccagcuagaacuugucgggaucugagacucucacacccagaguggucguccggcuauuacuggaucgaccccaaucagggauguaccauggacgccaucaaaguguacugcgacuuuucgacgggugagacuugcaucagggcucagcccgagaauaucccagcgaagaacugguaucgguccagcaaagacaagaagcacgugugguugggggaaaccaucaacgccggaagccaguuugaguacaauguagagggggugacgucgaaagagauggcaacgcaacuggccuucaugaggcucuuggcgaauuacgcgucacagaacaucacauaccauugcaaaaacagcauugcguacauggacgaagagacagggaauuugaaaaaggccguaaucuugcaagggucgaacgacguggaacuuguagcggaagguaacucgcgcuucacauacacgguguugguggauggaugcuccaaaaagacaaacgaauggggaaagacgaucaucgaauacaaaaccaacaaacccucacgacucccuuucuuggauaucgcgccucuugacauugguggagccgaccaggaauucuuuguggauauuggcccaguaugcuucaaaugauaagcugccuucugcggggcuugccuucuggccaugcccuucuucucucccuugcaccuguaccucuuggucuuugaauaaagccugaguaggaag

SEQ ID NO: 1384 - protein, 1466 aa, Artificial Sequence
  derived and/or modified sequence
MMSFVQKGSWLLLALLHPTIILAQQEAVEGGCSHLGQSYADRDVWKPEPCQICVCDSGSVLCDDIICDDQELDCPNPEIPFGECCAVCPQPPTAPTRPPNGQGPQGPKGDPGPPGIPGRNGDPGIPGQPGSPGSPGPPGICESCPTGPQNYSPQYDSYDVKSGVAVGGLAGYPGPAGPPGPPGPPGTSGHPGSPGSPGYQGPPGEPGQAGPSGPPGPPGAIGPSGPAGKDGESGRPGRPGERGLPGPPGIKGPAGIPGFPGMKGHRGFDGRNGEKGETGAPGLKGENGLPGENGAPGPMGPRGAPGERGRPGLPGAAGARGNDGARGSDGQPGPPGPPGTAGFPGSPGAKGEVGPAGSPGSNGAPGQRGEPGPQGHAGAQGPPGPPGINGSPGGKGEMGPAGIPGAPGLMGARGPPGPAGANGAPGLRGGAGEPGKNGAKGEPGPRGERGEAGIPGVPGAKGEDGKDGSPGEPGANGLPGAAGERGAPGFRGPAGPNGIPGEKGPAGERGAPGPAGPRGAAGEPGRDGVPGGPGMRGMPGSPGGPGSDGKPGPPGSQGESGRPGPPGPSGPRGQPGVMGFPGPKGNDGAPGKNGERGGPGGPGPQGPPGKNGETGPQGPPGPTGPGGDKGDTGPPGPQGLQGLPGTGGPPGENGKPGEPGPKGDAGAPGAPGGKGDAGAPGERGPPGLAGAPGLRGGAGPPGPEGGKGAAGPPGPPGAAGTPGLQGMPGERGGLGSPGPKGDKGEPGGPGADGVPGKDGPRGPTGPIGPPGPAGQPGDKGEGGAPGLPGIAGPRGSPGERGETGPPGPAGFPGAPGQNGEPGGKGERGAPGEKGEGGPPGVAGPPGGSGPAGPPGPQGVKGERGSPGGPGAAGFPGARGLPGPPGSNGNPGPPGPSGSPGKDGPPGPAGNTGAPGSPGVSGPKGDAGQPGEKGSPGAQGPPGAPGPLGIAGITGARGLAGPPGMPGPRGSPGPQGVKGESGKPGANGLSGERGPPGPQGLPGLAGTAGEPGRDGNPGSDGLPGRDGSPGGKGDRGENGSPGAPGAPGHPGPPGPVGPAGKSGDRGESGPAGPAGAPGPAGSRGAPGPQGPRGDKGETGERGAAGIKGHRGFPGNPGAPGSPGPAGQQGAIGSPGPAGPRGPVGPSGPPGKDGTSGHPGPIGPPGPRGNRGERGSEGSPGHPGQPGPPGPPGAPGPCCGGVGAAAIAGIGGEKAGGFAPYYGDEPMDFKINTDEIMTSLKSVNGQIESLISPDGSRKNPARNCRDLKFCHPELKSGEYWVDPNQGCKLDAIKVFCNMETGETCISANPLNVPRKHWWTDSSAEKKHVWFGESMDGGFQFSYGNPELPEDVLDVHLAFLRLLSSRASQNITYHCKNSIAYMDQASGNVKKALKLMGSNEGEFKAEGNSKFTYTVLEDGCTKHTGEWSKTVFEYRTRKAVRLPIVDIAPYDIGGPDQEFGVDVGPVCFL

SEQ ID NO: 1385 - protein, 1163 aa, Artificial Sequence
  derived and/or modified sequence
MMSFVQKGSWLLLALLHPTIILAQQEAVEGGCSHLGQSYADRDVWKPEPCQICVCDSGSVLCDDIICDDQELDCPNPEIPFGECCAVCPQPPTAPTRPPNGQGPQGPKGDPGPPGIPGRNGDPGIPGQPGSPGSPGPPGICESCPTGPQNYSPQYDSYDVKSGVAVGGLAGYPGPAGPPGPPGPPGTSGHPGSPGSPGYQGPPGEPGQAGPSGPPGPPGAIGPSGPAGKDGESGRPGRPGERGLPGPPGIKGPAGIPGFPGMKGHRGFDGRNGEKGETGAPGLKGENGLPGENGAPGPMGPRGAPGERGRPGLPGAAGARGNDGARGSDGQPGPPGPPGTAGFPGSPGAKGEVGPAGSPGSNGAPGQRGEPGPQGHAGAQGPPGPPGINGSPGGKGEMGPAGIPGAPGLMGARGPPGPAGANGAPGLRGGAGEPGKNGAKGEPGPRGERGEAGIPGVPGAKGEDGKDGSPGEPGANGLPGAAGERGAPGFRGPAGPNGIPGEKGPAGERGAPGPAGPRGAAGEPGRDGVPGGPGMRGMPGSPGGPGSDGKPGPPGSQGESGRPGPPGPSGPRGQPGVMGFPGPKGNDGAPGKNGERGGPGGPGPQGPPGKNGETGPQGPPGPTGPGGDKGDTGPPGPQGLQGLPGTGGPPGENGKPGEPGPKGDAGAPGAPGGKGDAGAPGERGPPGLAGAPGLRGGAGPPGPEGGKGAAGPPGPPGAAGTPGLQGMPGERGGLGSPGPKGDKGEPGGPGADGVPGKDGPRGPTGPIGPPGPAGQPGDKGEGGAPGLPGIAGPRGSPGERGETGPPGPAGFPGAPGQNGEPGGKGERGAPGEKGEGGPPGLFGPPGKDGTSGHPGPIGPPGPRGNRGERGSEGSPGHPGQPGPPGPPGAPGPCCGGVGAAAIAGIGGEKAGGFAPYYGDEPMDFKINTDEIMTSLKSVNGQIESLISPDGSRKNPARNCRDLKFCHPELKSGEYWVDPNQGCKLDAIKVFCNMETGETCISANPLNVPRKHWWTDSSAEKKHVWFGESMDGGFQFSYGNPELPEDVLDVHLAFLRLLSSRASQNITYHCKNSIAYMDQASGNVKKALKLMGSNEGEFKAEGNSKFTYTVLEDGCTKHTGEWSKTVFEYRTRKAVRLPIVDIAPYDIGGPDQEFGVDVGPVCFL

SEQ ID NO: 1386 - DNA, 4401 bp, Artificial Sequence
  derived and/or modified sequence
atgatgagcttcgtgcagaagggcagctggctgctgctggccctgctgcaccccaccatcatcctggcccagcaggaggccgtggagggcggctgcagccacctgggccagagctacgccgacagagacgtgtggaagcccgagccctgccagatctgcgtgtgcgacagcggcagcgtgctgtgcgacgacatcatctgcgacgaccaggagctggactgccccaaccccgagatccccttcggcgagtgctgcgccgtgtgcccccagccccccaccgcccccaccagaccccccaacggccagggcccccagggccccaagggcgaccccggcccccccggcatccccggcagaaacggcgaccccggcatccccggccagcccggcagccccggcagccccggcccccccggcatctgcgagagctgccccaccggcccccagaactacagcccccagtacgacagctacgacgtgaagagcggcgtggccgtgggcggcctggccggctaccccggccccgccggcccccccggcccccccggcccccccggcaccagcggccaccccggcagccccggcagccccggctaccagggcccccccggcgagcccggccaggccggccccagcggcccccccggcccccccggcgccatcggccccagcggccccgccggcaaggacggcgagagcggcagacccggcagacccggcgagagaggcctgcccggcccccccggcatcaagggccccgccggcatccccggcttccccggcatgaagggccacagaggcttcgacggcagaaacggcgagaagggcgagaccggcgcccccggcctgaagggcgagaacggcctgcccggcgagaacggcgcccccggccccatgggccccagaggcgcccccggcgagagaggcagacccggcctgcccggcgccgccggcgccagaggcaacgacggcgccagaggcagcgacggccagcccggcccccccggcccccccggcaccgccggcttccccggcagccccggcgccaagggcgaggtgggccccgccggcagccccggcagcaacggcgcccccggccagagaggcgagcccggcccccagggccacgccggcgcccagggcccccccggcccccccggcatcaacggcagccccggcggcaagggcgagatgggccccgccggcatccccggcgcccccggcctgatgggcgccagaggcccccccggccccgccggcgccaacggcgcccccggcctgagaggcggcgccggcgagcccggcaagaacggcgccaagggcgagcccggccccagaggcgagagaggcgaggccggcatccccggcgtgcccggcgccaagggcgaggacggcaaggacggcagccccggcgagcccggcgccaacggcctgcccggcgccgccggcgagagaggcgcccccggcttcagaggccccgccggccccaacggcatccccggcgagaagggccccgccggcgagagaggcgcccccggccccgccggccccagaggcgccgccggcgagcccggcagagacggcgtgcccggcggccccggcatgagaggcatgcccggcagccccggcggccccggcagcgacggcaagcccggcccccccggcagccagggcgagagcggcagacccggcccccccggccccagcggccccagaggccagcccggcgtgatgggcttccccggccccaagggcaacgacggcgcccccggcaagaacggcgagagaggcggccccggcggccccggcccccagggcccccccggcaagaacggcgagaccggcccccagggcccccccggccccaccggccccggcggcgacaagggcgacaccggcccccccggcccccagggcctgcagggcctgcccggcaccggcggcccccccggcgagaacggcaagcccggcgagcccggccccaagggcgacgccggcgcccccggcgcccccggcggcaagggcgacgccggcgcccccggcgagagaggcccccccggcctggccggcgcccccggcctgagaggcggcgccggcccccccggccccgagggcggcaagggcgccgccggcccccccggcccccccggcgccgccggcacccccggcctgcagggcatgcccggcgagagaggcggcctgggcagccccggccccaagggcgacaagggcgagcccggcggccccggcgccgacggcgtgcccggcaaggacggccccagaggccccaccggccccatcggcccccccggccccgccggccagcccggcgacaagggcgagggcggcgcccccggcctgcccggcatcgccggccccagaggcagccccggcgagagaggcgagaccggcccccccggccccgccggcttccccggcgcccccggccagaacggcgagcccggcggcaagggcgagagaggcgcccccggcgagaagggcgagggcggcccccccggcgtggccggcccccccggcggcagcggccccgccggcccccccggcccccagggcgtgaagggcgagagaggcagccccggcggccccggcgccgccggcttccccggcgccagaggcctgcccggcccccccggcagcaacggcaaccccggcccccccggccccagcggcagccccggcaaggacggcccccccggccccgccggcaacaccggcgcccccggcagccccggcgtgagcggccccaagggcgacgccggccagcccggcgagaagggcagccccggcgcccagggcccccccggcgcccccggccccctgggcatcgccggcatcaccggcgccagaggcctggccggcccccccggcatgcccggccccagaggcagccccggcccccagggcgtgaagggcgagagcggcaagcccggcgccaacggcctgagcggcgagagaggcccccccggcccccagggcctgcccggcctggccggcaccgccggcgagcccggcagagacggcaaccccggcagcgacggcctgcccggcagagacggcagccccggcggcaagggcgacagaggcgagaacggcagccccggcgcccccggcgcccccggccaccccggcccccccggccccgtgggccccgccggcaagagcggcgacagaggcgagagcggccccgccggccccgccggcgcccccggccccgccggcagcagaggcgcccccggcccccagggccccagaggcgacaagggcgagaccggcgagagaggcgccgccggcatcaagggccacagaggcttccccggcaaccccggcgcccccggcagccccggccccgccggccagcagggcgccatcggcagccccggccccgccggccccagaggccccgtgggccccagcggcccccccggcaaggacggcaccagcggccaccccggccccatcggcccccccggccccagaggcaacagaggcgagagaggcagcgagggcagccccggccaccccggccagcccggcccccccggcccccccggcgcccccggcccctgctgcggcggcgtgggcgccgccgccatcgccggcatcggcggcgagaaggccggcggcttcgccccctactacggcgacgagcccatggacttcaagatcaacaccgacgagatcatgaccagcctgaagagcgtgaacggccagatcgagagcctgatcagccccgacggcagcagaaagaaccccgccagaaactgcagagacctgaagttctgccaccccgagctgaagagcggcgagtactgggtggaccccaaccagggctgcaagctggacgccatcaaggtgttctgcaacatggagaccggcgagacctgcatcagcgccaaccccctgaacgtgcccagaaagcactggtggaccgacagcagcgccgagaagaagcacgtgtggttcggcgagagcatggacggcggcttccagttcagctacggcaaccccgagctgcccgaggacgtgctggacgtgcacctggccttcctgagactgctgagcagcagagccagccagaacatcacctaccactgcaagaacagcatcgcctacatggaccaggccagcggcaacgtgaagaaggccctgaagctgatgggcagcaacgagggcgagttcaaggccgagggcaacagcaagttcacctacaccgtgctggaggacggctgcaccaagcacaccggcgagtggagcaagaccgtgttcgagtacagaaccagaaaggccgtgagactgcccatcgtggacatcgccccctacgacatcggcggccccgaccaggagttcggcgtggacgtgggccccgtgtgcttcctgtag

SEQ ID NO: 1387 - DNA, 3492 bp, Artificial Sequence
  derived and/or modified sequence
atgatgagcttcgtgcagaagggcagctggctgctgctggccctgctgcaccccaccatcatcctggcccagcaggaggccgtggagggcggctgcagccacctgggccagagctacgccgacagagacgtgtggaagcccgagccctgccagatctgcgtgtgcgacagcggcagcgtgctgtgcgacgacatcatctgcgacgaccaggagctggactgccccaaccccgagatccccttcggcgagtgctgcgccgtgtgcccccagccccccaccgcccccaccagaccccccaacggccagggcccccagggccccaagggcgaccccggcccccccggcatccccggcagaaacggcgaccccggcatccccggccagcccggcagccccggcagccccggcccccccggcatctgcgagagctgccccaccggcccccagaactacagcccccagtacgacagctacgacgtgaagagcggcgtggccgtgggcggcctggccggctaccccggccccgccggcccccccggcccccccggcccccccggcaccagcggccaccccggcagccccggcagccccggctaccagggcccccccggcgagcccggccaggccggccccagcggcccccccggcccccccggcgccatcggccccagcggccccgccggcaaggacggcgagagcggcagacccggcagacccggcgagagaggcctgcccggcccccccggcatcaagggccccgccggcatccccggcttccccggcatgaagggccacagaggcttcgacggcagaaacggcgagaagggcgagaccggcgcccccggcctgaagggcgagaacggcctgcccggcgagaacggcgcccccggccccatgggccccagaggcgcccccggcgagagaggcagacccggcctgcccggcgccgccggcgccagaggcaacgacggcgccagaggcagcgacggccagcccggcccccccggcccccccggcaccgccggcttccccggcagccccggcgccaagggcgaggtgggccccgccggcagccccggcagcaacggcgcccccggccagagaggcgagcccggcccccagggccacgccggcgcccagggcccccccggcccccccggcatcaacggcagccccggcggcaagggcgagatgggccccgccggcatccccggcgcccccggcctgatgggcgccagaggcccccccggccccgccggcgccaacggcgcccccggcctgagaggcggcgccggcgagcccggcaagaacggcgccaagggcgagcccggccccagaggcgagagaggcgaggccggcatccccggcgtgcccggcgccaagggcgaggacggcaaggacggcagccccggcgagcccggcgccaacggcctgcccggcgccgccggcgagagaggcgcccccggcttcagaggccccgccggccccaacggcatccccggcgagaagggccccgccggcgagagaggcgcccccggccccgccggccccagaggcgccgccggcgagcccggcagagacggcgtgcccggcggccccggcatgagaggcatgcccggcagccccggcggccccggcagcgacggcaagcccggcccccccggcagccagggcgagagcggcagacccggcccccccggccccagcggccccagaggccagcccggcgtgatgggcttccccggccccaagggcaacgacggcgcccccggcaagaacggcgagagaggcggccccggcggccccggcccccagggcccccccggcaagaacggcgagaccggcccccagggcccccccggccccaccggccccggcggcgacaagggcgacaccggcccccccggcccccagggcctgcagggcctgcccggcaccggcggcccccccggcgagaacggcaagcccggcgagcccggccccaagggcgacgccggcgcccccggcgcccccggcggcaagggcgacgccggcgcccccggcgagagaggcccccccggcctggccggcgcccccggcctgagaggcggcgccggcccccccggccccgagggcggcaagggcgccgccggcccccccggcccccccggcgccgccggcacccccggcctgcagggcatgcccggcgagagaggcggcctgggcagccccggccccaagggcgacaagggcgagcccggcggccccggcgccgacggcgtgcccggcaaggacggccccagaggccccaccggccccatcggcccccccggccccgccggccagcccggcgacaagggcgagggcggcgcccccggcctgcccggcatcgccggccccagaggcagccccggcgagagaggcgagaccggcccccccggccccgccggcttccccggcgcccccggccagaacggcgagcccggcggcaagggcgagagaggcgcccccggcgagaagggcgagggcggcccccccggcctgttcggcccccccggcaaggacggcaccagcggccaccccggccccatcggcccccccggccccagaggcaacagaggcgagagaggcagcgagggcagccccggccaccccggccagcccggcccccccggcccccccggcgcccccggcccctgctgcggcggcgtgggcgccgccgccatcgccggcatcggcggcgagaaggccggcggcttcgccccctactacggcgacgagcccatggacttcaagatcaacaccgacgagatcatgaccagcctgaagagcgtgaacggccagatcgagagcctgatcagccccgacggcagcagaaagaaccccgccagaaactgcagagacctgaagttctgccaccccgagctgaagagcggcgagtactgggtggaccccaaccagggctgcaagctggacgccatcaaggtgttctgcaacatggagaccggcgagacctgcatcagcgccaaccccctgaacgtgcccagaaagcactggtggaccgacagcagcgccgagaagaagcacgtgtggttcggcgagagcatggacggcggcttccagttcagctacggcaaccccgagctgcccgaggacgtgctggacgtgcacctggccttcctgagactgctgagcagcagagccagccagaacatcacctaccactgcaagaacagcatcgcctacatggaccaggccagcggcaacgtgaagaaggccctgaagctgatgggcagcaacgagggcgagttcaaggccgagggcaacagcaagttcacctacaccgtgctggaggacggctgcaccaagcacaccggcgagtggagcaagaccgtgttcgagtacagaaccagaaaggccgtgagactgcccatcgtggacatcgccccctacgacatcggcggccccgaccaggagttcggcgtggacgtgggccccgtgtgcttcctgtag

SEQ ID NO: 1388 - DNA, 5543 bp, Artificial Sequence
  derived and/or modified sequence
gtgagggaagccaaactttttcctatttaaggccaaagcaaaggaatctcagtggctgagttttatgacgggcccggtgctgaagggcagggaacaacttgatggtgctactttgaactgcttttcttttctcctttttgcacaaagagtctcatgtctgatatttagacatgatgagctttgtgcaaaaggggagctggctacttctcgctctgcttcatcccactattattttggcacaacaggaagctgttgaaggaggatgttcccatcttggtcagtcctatgcggatagagatgtctggaagccagaaccatgccaaatatgtgtctgtgactcaggatccgttctctgcgatgacataatatgtgacgatcaagaattagactgccccaacccagaaattccatttggagaatgttgtgcagtttgcccacagcctccaactgctcctactcgccctcctaatggtcaaggacctcaaggccccaagggagatccaggccctcctggtattcctgggagaaatggtgaccctggtattccaggacaaccagggtcccctggttctcctggcccccctggaatctgtgaatcatgccctactggtcctcagaactattctccccagtatgattcatatgatgtcaagtctggagtagcagtaggaggactcgcaggctatcctggaccagctggccccccaggccctcccggtccccctggtacatctggtcatcctggttcccctggatctccaggataccaaggaccccctggtgaacctgggcaagctggtccttcaggccctccaggacctcctggtgctataggtccatctggtcctgctggaaaagatggagaatcaggtagacccggacgacctggagagcgaggattgcctggacctccaggtatcaaaggtccagctgggatacctggattccctggtatgaaaggacacagaggcttcgatggacgaaatggagaaaagggtgaaacaggtgctcctggattaaagggtgaaaatggtcttccaggcgaaaatggagctcctggacccatgggtccaagaggggctcctggtgagcgaggacggccaggacttcctggggctgcaggtgctcggggtaatgacggtgctcgaggcagtgatggtcaaccaggccctcctggtcctcctggaactgccggattccctggatcccctggtgctaagggtgaagttggacctgcagggtctcctggttcaaatggtgcccctggacaaagaggagaacctggacctcagggacacgctggtgctcaaggtcctcctggccctcctgggattaatggtagtcctggtggtaaaggcgaaatgggtcccgctggcattcctggagctcctggactgatgggagcccggggtcctccaggaccagccggtgctaatggtgctcctggactgcgaggtggtgcaggtgagcctggtaagaatggtgccaaaggagagcccggaccacgtggtgaacgcggtgaggctggtattccaggtgttccaggagctaaaggcgaagatggcaaggatggatcacctggagaacctggtgcaaatgggcttccaggagctgcaggagaaaggggtgcccctgggttccgaggacctgctggaccaaatggcatcccaggagaaaagggtcctgctggagagcgtggtgctccaggccctgcagggcccagaggagctgctggagaacctggcagagatggcgtccctggaggtccaggaatgaggggcatgcccggaagtccaggaggaccaggaagtgatgggaaaccagggcctcccggaagtcaaggagaaagtggtcgaccaggtcctcctgggccatctggtccccgaggtcagcctggtgtcatgggcttccccggtcctaaaggaaatgatggtgctcctggtaagaatggagaacgaggtggccctggaggacctggccctcagggtcctcctggaaagaatggtgaaactggacctcagggacccccagggcctactgggcctggtggtgacaaaggagacacaggaccccctggtccacaaggattacaaggcttgcctggtacaggtggtcctccaggagaaaatggaaaacctggggaaccaggtccaaagggtgatgccggtgcacctggagctccaggaggcaagggtgatgctggtgcccctggtgaacgtggacctcctggattggcaggggccccaggacttagaggtggagctggtccccctggtcccgaaggaggaaagggtgctgctggtcctcctgggccacctggtgctgctggtactcctggtctgcaaggaatgcctggagaaagaggaggtcttggaagtcctggtccaaagggtgacaagggtgaaccaggcggtccaggtgctgatggtgtcccagggaaagatggcccaaggggtcctactggtcctattggtcctcctggcccagctggccagcctggagataagggtgaaggtggtgcccccggacttccaggtatagctggacctcgtggtagccctggtgagagaggtgaaactggccctccaggacctgctggtttccctggtgctcctggacagaatggtgaacctggtggtaaaggagaaagaggggctccgggtgagaaaggtgaaggaggccctcctggagttgcaggaccccctggaggttctggacctgctggtcctcctggtccccaaggtgtcaaaggtgaacgtggcagtcctggtggacctggtgctgctggcttccctggtgctcgtggtcttcctggtcctcctggtagtaatggtaacccaggacccccaggtcccagcggttctccaggcaaggatgggcccccaggtcctgcgggtaacactggtgctcctggcagccctggagtgtctggaccaaaaggtgatgctggccaaccaggagagaagggatcgcctggtgcccagggcccaccaggagctccaggcccacttgggattgctgggatcactggagcacggggtcttgcaggaccaccaggcatgccaggtcctaggggaagccctggccctcagggtgtcaagggtgaaagtgggaaaccaggagctaacggtctcagtggagaacgtggtccccctggaccccagggtcttcctggtctggctggtacagctggtgaacctggaagagatggaaaccctggatcagatggtcttccaggccgagatggatctcctggtggcaagggtgatcgtggtgaaaatggctctcctggtgcccctggcgctcctggtcatccaggcccacctggtcctgtcggtccagctggaaagagtggtgacagaggagaaagtggccctgctggccctgctggtgctcccggtcctgctggttcccgaggtgctcctggtcctcaaggcccacgtggtgacaaaggtgaaacaggtgaacgtggagctgctggcatcaaaggacatcgaggattccctggtaatccaggtgccccaggttctccaggccctgctggtcagcagggtgcaatcggcagtccaggacctgcaggccccagaggacctgttggacccagtggacctcctggcaaagatggaaccagtggacatccaggtcccattggaccaccagggcctcgaggtaacagaggtgaaagaggatctgagggctccccaggccacccagggcaaccaggccctcctggacctcctggtgcccctggtccttgctgtggtggtgttggagccgctgccattgctgggattggaggtgaaaaagctggcggttttgccccgtattatggagatgaaccaatggatttcaaaatcaacaccgatgagattatgacttcactcaagtctgttaatggacaaatagaaagcctcattagtcctgatggttctcgtaaaaaccccgctagaaactgcagagacctgaaattctgccatcctgaactcaagagtggagaatactgggttgaccctaaccaaggatgcaaattggatgctatcaaggtattctgtaatatggaaactggggaaacatgcataagtgccaatcctttgaatgttccacggaaacactggtggacagattctagtgctgagaagaaacacgtttggtttggagagtccatggatggtggttttcagtttagctacggcaatcctgaacttcctgaagatgtccttgatgtgcatctggcattccttcgacttctctccagccgagcttcccagaacatcacatatcactgcaaaaatagcattgcatacatggatcaggccagtggaaatgtaaagaaggccctgaagctgatggggtcaaatgaaggtgaattcaaggctgaaggaaatagcaaattcacctacacagttctggaggatggttgcacgaaacacactggggaatggagcaaaacagtctttgaatatcgaacacgcaaggctgtgagactacctattgtagatattgcaccctatgacattggtggtcctgatcaagaatttggtgtggacgttggccctgtttgctttttataaaccaaactctatctgaaatcccaacaaaaaaaatttaactccatatgtgttcctcttgttctaatcttgtcaaccagtgcaagtgaccgacaaaattccagttatttatttccaaaatgtttggaaacagtataatttgacaaagaaaaatgatacttctctttttttgctgttccaccaaatacaattcaaatgctttttgttttatttttttaccaattccaatttcaaaatgtctcaatggtgctataataaataaacttcaacactctttatgataacaacactgtgttatattctttgaatcctagcccatctgcagagcaatgactgtgctcaccagtaaaagataacctttctttctgaaatagtcaaatacgaaattagaaaagccctccctattttaactacctcaactggtcagaaacacagattgtattctatgagtcccagaagatgaaaaaaattttatacgttgataaaacttataaatttcattgattaatctcctggaagattggtttaaaaagaaaagtgtaatgcaagaatttaaagaaatatttttaaagccacaattattttaatattggatatcaactgcttgtaaaggtgctcctcttttttcttgtcattgctggtcaagattactaatatttgggaaggctttaaagacgcatgttatggtgctaatgtactttcacttttaaactctagatcagaattgttgacttgcattcagaacataaatgcacaaaatctgtacatgtctcccatcagaaagattcattggcatgccacaggggattctcctccttcatcctgtaaaggtcaacaataaaaaccaaattatggggctgcttttgtcacactagcatagagaatgtgttgaaatttaactttgtaagcttgtatgtggttgttgatcttttttttccttacagacacccataataaaatatcatattaaaattc

SEQ ID NO: 1389 - DNA, 4581 bp, Artificial Sequence
  derived and/or modified sequence
ggctgagttttatgacgggcccggtgctgaagggcagggaacaacttgatggtgctactttgaactgcttttcttttctcctttttgcacaaagagtctcatgtctgatatttagacatgatgagctttgtgcaaaaggggagctggctacttctcgctctgcttcatcccactattattttggcacaacaggaagctgttgaaggaggatgttcccatcttggtcagtcctatgcggatagagatgtctggaagccagaaccatgccaaatatgtgtctgtgactcaggatccgttctctgcgatgacataatatgtgacgatcaagaattagactgccccaacccagaaattccatttggagaatgttgtgcagtttgcccacagcctccaactgctcctactcgccctcctaatggtcaaggacctcaaggccccaagggagatccaggccctcctggtattcctgggagaaatggtgaccctggtattccaggacaaccagggtcccctggttctcctggcccccctggaatctgtgaatcatgccctactggtcctcagaactattctccccagtatgattcatatgatgtcaagtctggagtagcagtaggaggactcgcaggctatcctggaccagctggccccccaggccctcccggtccccctggtacatctggtcatcctggttcccctggatctccaggataccaaggaccccctggtgaacctgggcaagctggtccttcaggccctccaggacctcctggtgctataggtccatctggtcctgctggaaaagatggagaatcaggtagacccggacgacctggagagcgaggattgcctggacctccaggtatcaaaggtccagctgggatacctggattccctggtatgaaaggacacagaggcttcgatggacgaaatggagaaaagggtgaaacaggtgctcctggattaaagggtgaaaatggtcttccaggcgaaaatggagctcctggacccatgggtccaagaggggctcctggtgagcgaggacggccaggacttcctggggctgcaggtgctcggggtaatgacggtgctcgaggcagtgatggtcaaccaggccctcctggtcctcctggaactgccggattccctggatcccctggtgctaagggtgaagttggacctgcagggtctcctggttcaaatggtgcccctggacaaagaggagaacctggacctcagggacacgctggtgctcaaggtcctcctggccctcctgggattaatggtagtcctggtggtaaaggcgaaatgggtcccgctggcattcctggagctcctggactgatgggagcccggggtcctccaggaccagccggtgctaatggtgctcctggactgcgaggtggtgcaggtgagcctggtaagaatggtgccaaaggagagcccggaccacgtggtgaacgcggtgaggctggtattccaggtgttccaggagctaaaggcgaagatggcaaggatggatcacctggagaacctggtgcaaatgggcttccaggagctgcaggagaaaggggtgcccctgggttccgaggacctgctggaccaaatggcatcccaggagaaaagggtcctgctggagagcgtggtgctccaggccctgcagggcccagaggagctgctggagaacctggcagagatggcgtccctggaggtccaggaatgaggggcatgcccggaagtccaggaggaccaggaagtgatgggaaaccagggcctcccggaagtcaaggagaaagtggtcgaccaggtcctcctgggccatctggtccccgaggtcagcctggtgtcatgggcttccccggtcctaaaggaaatgatggtgctcctggtaagaatggagaacgaggtggccctggaggacctggccctcagggtcctcctggaaagaatggtgaaactggacctcagggacccccagggcctactgggcctggtggtgacaaaggagacacaggaccccctggtccacaaggattacaaggcttgcctggtacaggtggtcctccaggagaaaatggaaaacctggggaaccaggtccaaagggtgatgccggtgcacctggagctccaggaggcaagggtgatgctggtgcccctggtgaacgtggacctcctggattggcaggggccccaggacttagaggtggagctggtccccctggtcccgaaggaggaaagggtgctgctggtcctcctgggccacctggtgctgctggtactcctggtctgcaaggaatgcctggagaaagaggaggtcttggaagtcctggtccaaagggtgacaagggtgaaccaggcggtccaggtgctgatggtgtcccagggaaagatggcccaaggggtcctactggtcctattggtcctcctggcccagctggccagcctggagataagggtgaaggtggtgcccccggacttccaggtatagctggacctcgtggtagccctggtgagagaggtgaaactggccctccaggacctgctggtttccctggtgctcctggacagaatggtgaacctggtggtaaaggagaaagaggggctccgggtgagaaaggtgaaggaggccctcctggactctttggacctcctggcaaagatggaaccagtggacatccaggtcccattggaccaccagggcctcgaggtaacagaggtgaaagaggatctgagggctccccaggccacccagggcaaccaggccctcctggacctcctggtgcccctggtccttgctgtggtggtgttggagccgctgccattgctgggattggaggtgaaaaagctggcggttttgccccgtattatggagatgaaccaatggatttcaaaatcaacaccgatgagattatgacttcactcaagtctgttaatggacaaatagaaagcctcattagtcctgatggttctcgtaaaaaccccgctagaaactgcagagacctgaaattctgccatcctgaactcaagagtggagaatactgggttgaccctaaccaaggatgcaaattggatgctatcaaggtattctgtaatatggaaactggggaaacatgcataagtgccaatcctttgaatgttccacggaaacactggtggacagattctagtgctgagaagaaacacgtttggtttggagagtccatggatggtggttttcagtttagctacggcaatcctgaacttcctgaagatgtccttgatgtgcatctggcattccttcgacttctctccagccgagcttcccagaacatcacatatcactgcaaaaatagcattgcatacatggatcaggccagtggaaatgtaaagaaggccctgaagctgatggggtcaaatgaaggtgaattcaaggctgaaggaaatagcaaattcacctacacagttctggaggatggttgcacgaaacacactggggaatggagcaaaacagtctttgaatatcgaacacgcaaggctgtgagactacctattgtagatattgcaccctatgacattggtggtcctgatcaagaatttggtgtggacgttggccctgtttgctttttataaaccaaactctatctgaaatcccaacaaaaaaaatttaactccatatgtgttcctcttgttctaatcttgtcaaccagtgcaagtgaccgacaaaattccagttatttatttccaaaatgtttggaaacagtataatttgacaaagaaaaatgatacttctctttttttgctgttccaccaaatacaattcaaatgctttttgttttatttttttaccaattccaatttcaaaatgtctcaatggtgctataataaataaacttcaacactctttatgataacaacactgtgttatattctttgaatcctagcccatctgcagagcaatgactgtgctcaccagtaaaagataacctttctttctgaaatagtcaaatacgaaattagaaaagccctccctattttaactacctcaactggtcagaaacacagattgtattctatgagtcccagaagatgaaaaaaattttatacgttgataaaacttataaatttcattgattaatctcctggaagattggtttaaaaagaaaagtgtaatgcaagaatttaaagaaatatttttaaagccacaattattttaatattggatatcaactgcttgtaaaggtgctcctcttttttcttgtcattgctggtcaagattactaatatttgggaaggctttaaagacgcatgttatggtgctaatgtactttcacttttaaactctagatcagaattgttgacttgcattcagaacataaatgcacaaaatctgtacatgtctcccatcagaaagattcattggcatgccacaggggattctcctccttcatcctgtaaaggtcaacaataaaaaccaaattatggggctgcttttgtcacactagcatagagaatgtgttgaaatttaactttgtaagcttgtatgtggttgttgatcttttttttccttacagacacccataataaaatatcatattaaaattc

SEQ ID NO: 1390 - DNA, 4401 bp, Artificial Sequence
  derived and/or modified sequence
atgatgagtttcgtacagaaaggatcttggttgctactcgcgctgctgcaccctaccattattttagctcaacaggaagctgtagaaggcggttgttctcacctgggtcaaagctacgctgaccgtgatgtctggaaacccgagccttgccagatctgtgtgtgcgactcaggatcagtcttgtgcgatgatatcatctgcgacgaccaggaattagattgtccaaatcccgagattccatttggggagtgctgtgctgtgtgcccccagcccccgacagcccctactaggcctccgaacgggcaggggccccagggccctaagggggatcccgggcccccaggcatacccggtcgaaatggcgatcccggaatcccaggccagccgggcagccctgggagccctggccccccaggaatctgtgagtcttgccccactggtccccagaactacagcccacagtacgattcttatgatgtcaagtcaggagtggctgtgggtggactcgctggataccccggacctgcaggtccccctgggccccctggtcccccgggcactagcggacacccaggttctccaggctctcccggttaccaaggcccaccgggtgagcccggacaagcaggcccttcagggccccccggcccacctggggcgataggccccagcggccctgctggaaaagacggagagagtgggcgtccagggcgaccaggcgaacggggcttgcccggacctcccggtattaaagggccagctggcattccgggattcccgggaatgaagggtcacagaggctttgatggccgaaacggtgagaaaggggaaaccggagctcccggcctgaaaggggaaaacggcctccccggcgagaacggcgcccctggaccgatgggccctagaggagcccccggcgagcgaggtagacccgggctgcctggagcagctggtgccaggggtaacgatggagctagagggagcgacggacagcccgggccacccgggcccccaggtactgctggattcccaggaagccccggagccaaaggtgaggtgggccccgcaggctcaccggggtccaatggcgccccaggccaacggggggaaccagggccccaaggccacgctggcgcccaaggacctcctgggcccccagggattaacgggtctcccggcggaaaaggtgagatgggccctgccggcatacctggagccccaggactgatgggggccagggggccacccgggcccgccggtgctaacggcgccccaggtttgcgggggggcgcaggcgagccggggaagaacggggccaaaggcgaacccggccccagaggggagagaggagaggccggtattcctggcgtgccaggtgcaaagggtgaggatggcaaagacggaagtcctggagagcctggcgccaacggactgcctggcgctgccggcgagagaggggcacctggctttcgggggccagcaggccctaacgggattccgggcgagaagggcccggccggagaacgaggggcccccggcccagctggaccacgaggggcagccggcgagccaggccgggacggagttccagggggtcccgggatgcgcggcatgccaggaagccctgggggtccaggctctgacggcaagcccgggccgccagggagtcagggggagagtgggaggcctggcccccctgggccgagtggcccccgcggccagcccggggtcatgggatttcccggacctaaaggcaacgatggtgccccaggcaagaatggcgagcggggcgggccgggcggccccggcccccagggccctcccggaaagaacggcgagactggcccccagggaccgcccggacctacagggccgggcggggataaaggtgacaccgggcctcccgggccccagggcctgcaggggctccctgggacaggtggaccccctggcgagaatgggaaacccggcgaaccaggtccaaaaggggacgccggcgcccccggcgctcctggggggaagggcgatgccggagcccccggcgagcggggacccccgggtctagctggagcccctggcctcaggggaggggccgggccgcccggacccgagggaggcaagggggcagcaggaccccctggccccccaggcgcagctggaactcccgggcttcaaggcatgccgggcgaaaggggcgggttgggatcacctgggcccaagggagacaagggcgagcccggcggcccgggtgccgatggggttccgggaaaggatggtcctagagggccgacgggccccatcgggcctcccgggccagccgggcagcccggtgataaaggggaaggcggagcccctggattgcccggaatcgctgggcccaggggttctcctggcgagaggggcgagaccggaccccctggcccagctggctttccgggagctccaggccagaatggcgaacctggaggaaaaggcgaaaggggcgcgccaggggagaagggtgagggtggaccgccaggtgtggctgggcctccgggtgggtccgggcccgccggacctcctggcccacaaggcgttaagggcgaacgaggatctcccggaggccccggtgccgcgggatttcccggtgcccgggggcttcccggacctcccggtagcaatgggaaccccgggccaccgggaccttcagggtccccagggaaggatggccctcctgggcccgctggaaataccggcgcccctggtagccccggggtgtccggtcctaaaggagatgccgggcagcccggcgagaagggtagcccaggtgcccaaggaccgcccggagcccccgggccgctgggcatcgcaggtatcacaggcgcccgaggactcgcggggccaccgggcatgcctggacctaggggatctccagggcctcagggcgtcaagggagaaagtggaaaaccaggggcgaacggactcagtggggagagaggaccacccggcccacaaggactccccggcttagctggcaccgctggggagccagggcgagatggtaatcccggcagcgatggactccctggccgcgatggtagtcccgggggtaagggtgataggggagaaaatggtagtcccggcgcccctggcgctccaggtcacccagggcctccaggtcccgtaggcccagccgggaagtccggggaccgaggcgaaagcggcccggccggccccgccggagcacccgggcctgctggctcccgcggtgcccccggccctcagggtcccaggggtgataagggcgagactggggagagaggagcagcgggcattaaagggcacagaggctttcctggcaatcccggtgccccaggttcgcccggccctgcaggccagcagggagccatcggctcccctgggcccgcagggccccgcggacccgtcgggccttcaggcccccccgggaaagacggcacaagcggtcatcctggaccaatcggtccaccgggcccacgtggcaaccggggcgagagaggctccgaaggctcacccgggcatccaggccagccaggtccgccgggacctcccggcgcgccgggcccgtgctgtggcggagtaggcgccgcagcaattgcaggcattgggggcgaaaaagcagggggcttcgcaccatattacggagatgagcccatggattttaaaatcaatacagacgagattatgacaagcctaaaaagcgtgaacggccaaatcgagagtctgatctctcccgacggatcccgaaagaatcctgcccgcaactgtagagacctgaaattctgccacccggagcttaaatctggggaatattgggttgacccaaatcagggctgcaagctggatgccatcaaagtgttttgtaacatggagactggggagacgtgcatttctgccaatccattgaacgtgccccgcaagcactggtggactgactctagcgccgagaagaaacacgtgtggttcggggaaagcatggacgggggttttcaattctcgtacggaaatcccgagctgcctgaagacgttctcgatgtgcacctcgcctttcttagactgttgagttctcgtgctagtcaaaatatcacctaccactgcaagaactcaatagcatatatggatcaggcaagcgggaatgtgaaaaaggccctgaaactgatggggtcaaacgaaggagaatttaaggcggaaggtaacagtaagttcacctacaccgtgctggaggatgggtgcactaagcacactggggagtggagcaaaaccgtgtttgagtacaggacccgcaaggcagtaagactacctatcgtggatatagccccgtacgatataggaggcccagatcaggagttcggagttgacgtgggaccagtatgtttcctgtag

SEQ ID NO: 1391 - DNA, 3492 bp, Artificial Sequence
  derived and/or modified sequence
atgatgtcctttgttcagaaaggaagctggctgctactggctctgttgcacccgaccataatcctggcgcagcaggaggcagttgaaggcggctgtagccatctgggccagtcatacgcagacagggacgtatggaaaccggaaccctgccagatatgcgtctgcgactcagggagcgtgctctgtgatgatattatttgcgatgaccaggagctggactgtccaaatcccgaaattccgtttggcgaatgttgtgcagtgtgtccccagcccccaactgctcctacccgtcctcctaatggccaaggtccacagggacccaagggagacccaggaccaccaggaataccgggaaggaacggtgaccctggaatcccaggacagcctgggtcgcctggtagcccaggccctccggggatatgtgaatcatgtccgaccggccctcagaattactccccacagtacgactcctacgatgtaaagtcgggggtcgccgtaggcggactagccgggtatcctggccccgcgggacctccaggaccgcctggccctcctggtacatcaggacaccccggatcgcccgggtcccctggttatcagggacctccaggagagcccggacaggcaggtccttctggccctccaggacctccaggcgctataggtccaagcggacccgcagggaaggatggagagagcggaagaccaggtagaccgggcgagcggggtttgccaggaccgcccggtatcaagggccccgccgggatcccgggtttcccgggaatgaagggccaccggggattcgatggacggaacggtgagaaaggtgaaactggggcaccaggcctgaaaggggagaacgggctgcccggagagaacggcgctcctgggccaatgggcccaaggggcgctccaggcgaaagaggccggccaggtctaccaggcgctgccggtgctcgcggaaacgatggagcccgtggaagcgatggacagccgggtccccccggacccccgggcacagcgggtttcccaggatccccaggtgctaagggtgaggtgggccccgcagggtctccaggatctaacggagcaccaggacagcgcggcgagccaggtccccaaggccacgctggagctcaggggcccccaggcccgccagggattaacggtagccccgggggcaagggtgagatgggtcctgccggcatccccggggcacccggcctgatgggggctcggggtcctcccggtcctgccggtgctaacggagctccagggcttcgaggtggggccggagagcctggaaaaaatggtgctaagggcgagccaggtcctcggggtgagcggggcgaagcaggaatccctggggttcccggcgccaaaggagaggacggcaaggatggtagcccaggggagcccggagccaatggcctccccggagccgcaggtgagaggggggccccgggcttcagaggacccgctggacccaacggaattcctggggagaagggacctgctggcgaaaggggagccccgggtcccgctggcccaaggggagctgccggggagccgggtcgagatggcgtccctggaggcccggggatgagaggaatgccaggctccccaggtggcccaggcagtgatggaaagcccgggccgccaggatcccagggggagtcaggacgtcccggccctcctgggccatctggacctaggggtcaaccaggcgtgatgggtttccctggccctaagggaaacgacggagcacctggcaagaatggagagcgcggtggccctggcggccctggcccacaggggcctcccggcaaaaatggtgaaacaggcccccaggggccaccgggacccaccggtcccggtggcgacaaaggagatactggccccccaggaccccaggggctgcaagggttacccgggaccggaggcccccctggagaaaacggtaagcccggagaaccgggaccaaagggagatgctggcgctccaggcgcaccagggggcaaaggagacgccggagcccccggcgagcggggaccgcccggactggctggggcccctggcctgcgcgggggcgctgggccccctggacctgaaggagggaaaggagccgcgggcccacccggcccgcccggggccgccgggacccccggactccaggggatgcctggggagcgtggagggctgggttcacccggtcccaaaggagataagggcgaacctggtggtcctggcgcggacggagttcctgggaaagacggaccccgagggcccactggcccgatcggcccccccgggcctgctgggcagcctggggataagggcgaggggggggctcccggtctgcccggcattgcaggtccccgcgggagtcccggagagcgtggcgaaactggcccccccgggccagccggatttcctggagcccctggccagaatggggagcccggcgggaagggtgaacgaggggcgccgggcgagaagggagagggagggccaccgggactgttcggacctccaggcaaagatggtacctcaggccaccccggccctatcggaccccccggaccacgcggaaatcgcggagagcgaggttccgaaggatctcctggacatccaggtcagcccgggccacccggcccacctggagctccaggaccatgctgcggaggggtcggcgccgcagctattgctggaattgggggtgagaaagccggtgggtttgccccgtattacggtgacgaacctatggacttcaaaattaatactgacgagatcatgactagtctgaagtcagtcaatggccaaatcgaaagcctgatttctcctgacggctcaagaaaaaaccccgcccggaactgccgggacctgaagttctgccatcccgagctgaaatcaggcgagtattgggtcgaccctaaccaggggtgcaagctggatgcaatcaaagtattctgcaatatggagactggagagacatgtattagcgctaaccctctaaatgtgcccagaaagcactggtggaccgacagtagtgccgagaagaaacatgtttggttcggcgagagtatggacggaggatttcaattttcatacgggaacccagagttgcccgaggacgtgctagatgttcatcttgcctttctgcggctgctgagtagcagagcctctcaaaacatcacttatcactgcaaaaactcaattgcttacatggatcaggcttccggcaatgtcaagaaggcgctgaagcttatgggatctaacgagggagagttcaaggccgaaggaaatagcaagttcacatatactgtcttagaggatgggtgtacaaaacacaccggagagtggagtaagaccgtgtttgaatatcgcacccggaaggcggtgcggctgcctattgtcgacattgcaccttacgacatcggcggccccgaccaagaattcggcgtagatgtcggtccagtctgcttcctctag

SEQ ID NO: 1392 - DNA, 4401 bp, Artificial Sequence
  derived and/or modified sequence
atgatgagctttgtgcagaagggctcctggctgctgctggccctgctgcaccccaccatcatcctggcccagcaggaggccgtggagggcggctgcagccacctgggccagagctatgctgacagagatgtgtggaagccagagccctgccagatctgtgtgtgtgacagcggctctgtgctgtgtgatgacatcatctgtgatgaccaggagctggactgccccaaccctgagatcccctttggagagtgctgtgctgtgtgcccccagcccccaacagcccccacccggccccccaacggccagggcccccagggccccaagggggaccccggccccccaggcatccctggaagaaatggagaccccggcatccctggccagcccggcagccctggcagccctggccccccaggcatctgtgagagctgccccaccggcccccagaactacagcccccagtatgacagctatgatgtgaagagcggcgtggccgtgggcggcctggccggctacccaggccctgctggccccccaggccccccaggccccccaggcaccagcggccaccctggcagccctggcagccctggctaccagggccccccaggagagcccggccaggccggccccagcggccccccaggccccccaggggccatcggccccagcggccctgctgggaaggatggagagagcggccggcccggccggcctggagagcggggcctgcccggccccccaggcatcaagggccctgctggcatccctggcttccctggcatgaagggccaccggggctttgatggaagaaatggagagaagggggagaccggggcccctggcctgaagggggagaatggcctgcccggggagaatggagcccctggccccatgggccccaggggggcccctggagagcggggccggcccggcctgcccggggctgctggggcccggggaaatgatggagcccggggcagtgatggccagcccggccccccaggccccccaggcacagctggcttccctggcagccctggggccaagggggaggtgggccctgctggcagccctggcagcaatggagcccctggccagagaggagagcccggcccccagggccatgctggggcccagggccccccaggccccccaggcatcaatggcagccctgggggcaaaggagagatgggccctgctggcatccctggggcccctggcctgatgggcgcccggggccccccaggccctgctggggccaacggggcccctggcctgcggggcggggccggggagcccgggaagaatggagccaagggggagcccggccccagaggagagcggggggaggccggcatccctggggtgcctggggccaagggagaagatggcaaggatggcagccctggagagcccggggccaacggcctgcctggagctgctggggagcggggggcccctggcttccggggccctgctggccccaacggcatccctggagagaagggccctgctggggagcggggggcccctggccctgctggccccagaggagctgctggggagcccggcagagatggagtgcctgggggccctggcatgaggggcatgcctggcagccctgggggccctggcagtgatggcaagccaggccccccaggcagccagggcgagagcggccggcccggccccccaggccccagcggcccccggggccagcccggggtgatgggcttccctggccccaagggaaatgatggagcccctgggaagaatggagagcggggcggccctgggggccctggcccccagggccccccaggcaagaatggagagaccggcccccagggccccccaggccccactggacctggaggagacaagggggacaccggccccccaggcccccagggcctgcagggcctgcccggcaccggcggccccccaggagaaaatggcaagccaggagagcccggccccaagggagatgctggggcccctggggcccctgggggcaaaggagatgctggggcccctggagagcggggccccccaggcctggccggggcccctggcctgcggggcggggccggccccccaggccctgagggcggcaaaggagctgctggccccccaggccccccaggagctgctggcaccccaggcctgcagggcatgcctggagagcggggcggcctgggcagccctggccccaagggggacaagggggagcccggcggccctggagcagatggagtgcctgggaaggatggcccccggggccccaccggccccatcggccccccaggccctgctggccagcccggggacaagggggagggcggggcccctggcctgcccggcattgctggcccccggggcagccctggagagcggggggagactggacctcctggccctgctggcttccctggggcccctggccagaatggagagcccggcggcaagggggagcggggggcccctggagagaagggggagggcggccccccaggagtggccggccccccaggcggcagcggccctgctggccccccaggcccccagggcgtgaagggggagcggggcagccctgggggccctggagctgctggcttccctggggcccggggcctgcccggccccccaggcagcaatggaaatcctggccccccaggccccagcggcagccctgggaaggatggccccccaggccctgctggcaacacaggagcccctggcagccctggggtgtctggccccaagggagatgctggccagcctggagagaagggcagccctggggcccagggccccccaggggcccctggccccctgggcattgctggcatcactggagcccggggcctggccggccccccaggcatgcctggcccccggggcagccctggcccccagggcgtgaagggggagagcggcaagccaggggccaacggcctgtctggagagcggggccccccaggcccccagggcctgcccggcctggccggcacagctggggagcccggcagagatggcaaccctggcagtgatggcctgcccggcagagatggcagccctgggggcaaaggagacagaggagaaaatggcagccctggggcccctggggcccctggccaccctggccccccaggccctgtgggccctgctgggaagagcggggacagaggagagagcggccctgctggccctgctggggcccctggccctgctggcagcagaggagcccctggcccccagggccccaggggggacaagggggagactggagagagaggagctgctggcatcaagggccaccggggcttccctggcaaccctggggcccctggcagccctggccctgctggccagcagggcgccatcggcagccctggccctgctggcccccggggccctgtgggccccagcggccccccaggcaaggatggcaccagcggccaccctggccccatcggccccccaggcccccggggcaacagaggagagcggggcagcgagggcagccctggccaccctggccagcccggccccccaggccccccaggggcccctggcccctgctgcggcggcgtgggcgctgctgccatcgccggcatcggcggggagaaggccggcggctttgccccctactatggagatgagcccatggacttcaagatcaacacagatgagatcatgaccagcctgaagtctgtgaatggccagatcgagagcctcatcagcccagatggcagcaggaagaacccagccaggaactgccgggacctgaagttctgccaccctgagctgaagagcggggagtactgggtggaccccaaccagggctgcaagctggatgccatcaaggtgttctgcaacatggagaccggggagacctgcatcagcgccaaccccctgaatgtgcccaggaagcactggtggacagacagcagcgctgagaagaagcacgtgtggtttggagagagcatggatggcggcttccagttctcctatggcaaccctgagctgcctgaagatgtgctggatgtgcacctggccttcctgcggctgctgagcagccgggccagccagaacatcacctaccactgcaagaacagcatcgcctacatggaccaggccagcggaaatgtgaagaaggccctgaagctgatgggcagcaatgaaggagagttcaaggccgagggcaacagcaagttcacctacacagtgctggaggatggctgcaccaagcacactggagagtggagcaagacagtgtttgagtaccgcaccaggaaggctgtgcggctgcccatcgtggacatcgccccctatgacattggaggccctgaccaggagtttggagtggatgtgggccctgtgtgcttcctgtag

SEQ ID NO: 1393 - DNA, 3492 bp, Artificial Sequence
  derived and/or modified sequence
atgatgagctttgtgcagaagggctcctggctgctgctggccctgctgcaccccaccatcatcctggcccagcaggaggccgtggagggcggctgcagccacctgggccagagctatgctgacagagatgtgtggaagccagagccctgccagatctgtgtgtgtgacagcggctctgtgctgtgtgatgacatcatctgtgatgaccaggagctggactgccccaaccctgagatcccctttggagagtgctgtgctgtgtgcccccagcccccaacagcccccacccggccccccaacggccagggcccccagggccccaagggggaccccggccccccaggcatccctggaagaaatggagaccccggcatccctggccagcccggcagccctggcagccctggccccccaggcatctgtgagagctgccccaccggcccccagaactacagcccccagtatgacagctatgatgtgaagagcggcgtggccgtgggcggcctggccggctacccaggccctgctggccccccaggccccccaggccccccaggcaccagcggccaccctggcagccctggcagccctggctaccagggccccccaggagagcccggccaggccggccccagcggccccccaggccccccaggggccatcggccccagcggccctgctgggaaggatggagagagcggccggcccggccggcctggagagcggggcctgcccggccccccaggcatcaagggccctgctggcatccctggcttccctggcatgaagggccaccggggctttgatggaagaaatggagagaagggggagaccggggcccctggcctgaagggggagaatggcctgcccggggagaatggagcccctggccccatgggccccaggggggcccctggagagcggggccggcccggcctgcccggggctgctggggcccggggaaatgatggagcccggggcagtgatggccagcccggccccccaggccccccaggcacagctggcttccctggcagccctggggccaagggggaggtgggccctgctggcagccctggcagcaatggagcccctggccagagaggagagcccggcccccagggccatgctggggcccagggccccccaggccccccaggcatcaatggcagccctgggggcaaaggagagatgggccctgctggcatccctggggcccctggcctgatgggcgcccggggccccccaggccctgctggggccaacggggcccctggcctgcggggcggggccggggagcccgggaagaatggagccaagggggagcccggccccagaggagagcggggggaggccggcatccctggggtgcctggggccaagggagaagatggcaaggatggcagccctggagagcccggggccaacggcctgcctggagctgctggggagcggggggcccctggcttccggggccctgctggccccaacggcatccctggagagaagggccctgctggggagcggggggcccctggccctgctggccccagaggagctgctggggagcccggcagagatggagtgcctgggggccctggcatgaggggcatgcctggcagccctgggggccctggcagtgatggcaagccaggccccccaggcagccagggcgagagcggccggcccggccccccaggccccagcggcccccggggccagcccggggtgatgggcttccctggccccaagggaaatgatggagcccctgggaagaatggagagcggggcggccctgggggccctggcccccagggccccccaggcaagaatggagagaccggcccccagggccccccaggccccactggacctggaggagacaagggggacaccggccccccaggcccccagggcctgcagggcctgcccggcaccggcggccccccaggagaaaatggcaagccaggagagcccggccccaagggagatgctggggcccctggggcccctgggggcaaaggagatgctggggcccctggagagcggggccccccaggcctggccggggcccctggcctgcggggcggggccggccccccaggccctgagggcggcaaaggagctgctggccccccaggccccccaggagctgctggcaccccaggcctgcagggcatgcctggagagcggggcggcctgggcagccctggccccaagggggacaagggggagcccggcggccctggagcagatggagtgcctgggaaggatggcccccggggccccaccggccccatcggccccccaggccctgctggccagcccggggacaagggggagggcggggcccctggcctgcccggcattgctggcccccggggcagccctggagagcggggggagactggacctcctggccctgctggcttccctggggcccctggccagaatggagagcccggcggcaagggggagcggggggcccctggagagaagggggagggcggccccccaggcctgtttggccccccaggcaaggatggcaccagcggccaccctggccccatcggccccccaggcccccggggcaacagaggagagcggggcagcgagggcagccctggccaccctggccagcccggccccccaggccccccaggggcccctggcccctgctgcggcggcgtgggcgccgccgccatcgccggcattggaggagagaaggccggcggctttgccccctactatggagatgagcccatggacttcaagatcaacacagatgagatcatgaccagcctgaagtctgtgaatggccagatcgagagcctcatcagcccagatggcagcaggaagaacccagccaggaactgccgggacctgaagttctgccaccctgagctgaagtctggagagtactgggtggaccccaaccagggctgcaagctggatgccatcaaggtgttctgcaacatggagactggagagacctgcatcagcgccaaccccctgaatgtgcccaggaagcactggtggacagacagcagcgctgagaagaagcacgtgtggtttggagagagcatggatggcggcttccagttctcctatggcaaccctgagctgcctgaagatgtgctggatgtgcacctggccttcctgcggctgctgagcagccgggccagccagaacatcacctaccactgcaagaacagcatcgcctacatggaccaggccagcggaaatgtgaagaaggccctgaagctgatgggcagcaatgaaggagagttcaaggccgagggcaacagcaagttcacctacacagtgctggaggatggctgcaccaagcacactggagagtggagcaagacagtgtttgagtaccgcaccaggaaggctgtgcggctgcccatcgtggacatcgccccctatgacatcggcggccctgaccaggagtttggagtggatgtgggccctgtgtgcttcctgtag

SEQ ID NO: 1394 - DNA, 4401 bp, Artificial Sequence
  derived and/or modified sequence
atgatgagcttcgtgcagaagggcagctggctgctgctggccctgctgcaccccaccatcattctggcccagcaggaagccgtcgagggaggatgtagccacttagggcagagctacgctgaccgtgatgtgtggaaacctgaaccttgtcagatctgtgtatgcgatagcggcagcgttttatgcgacgacatcatctgcgatgatcaggaactggactgtcctaatcccgaaataccttttggtgagtgttgtgccgtgtgccctcaacctcccacagcgccaactcgacctcctaatggtcaaggaccccagggccctaaaggggacccgggtcccccaggaatcccgggccgaaatggcgacccaggcatcccgggacagcccgggtctccagggagcccgggcccacccggaatctgcgaaagctgccctactggtccacagaattatagccctcagtacgactcttacgatgttaagtctggggtcgctgtcggggggctggccggataccccggtccagccggacccccgggcccacccggtcccccagggacttcaggccaccccggctcaccggggagtccggggtatcaaggtccacctggtgagccaggtcaggctggaccatctggcccgcctggcccacctggtgcaatcgggcctagcggcccggcgggcaaggatggcgagagtggtaggccaggtcgcccaggagagcgcgggcttcccgggccaccgggaataaagggccccgcgggcattccagggttccccggcatgaaaggccataggggcttcgacgggcgcaacggggaaaagggtgagacaggtgcccccggtctgaagggagaaaatggcctgccaggcgagaacggcgccccaggcccgatgggcccaaggggtgccccaggcgagagggggcggccaggtctaccaggtgccgcaggcgctagggggaatgatggcgcccgggggtccgacggccagcctggccctcccggcccacccggcactgccggattcccaggatcgcccggggctaagggcgaggtggggcccgcaggatcacctggctcaaatggggcccctggacaaagaggagaaccagggccacaagggcacgccggggcacaaggccctcctggccctcccggaattaacggttcaccaggaggcaagggtgagatgggcccagccggcattcctggcgcccccggactgatgggcgcccgggggccccccgggccagctggcgcaaatggtgcacctggcctgcgcggaggagccggtgagcctggcaaaaatggcgcgaagggagagcccggcccccggggagaaaggggggaggcagggattccgggcgttcccggcgcaaagggggaagacggtaaggatggctcgcctggtgagcctggggccaacgggctgccgggcgctgcaggggagagaggggcaccgggatttagagggcctgccgggcccaatggaattcccggagaaaaggggcccgctggtgaaaggggggcacccggccccgccgggcctcgaggtgctgccggggagcctgggcgcgacggggtgcctggcgggcccggaatgagaggcatgcccggctctccggggggtcccggctcagacgggaagccaggacccccaggctctcagggggaaagtggccgccctggtccccccggtcccagtggcccccgtggacagccgggggtgatgggatttcccggcccaaaaggaaatgatggtgcgcctggaaagaatggcgaacggggggggcctgggggccctggtccccagggacctccagggaagaatggggagacgggcccccagggcccaccgggacccacgggtccagggggtgataaaggtgacaccgggccacctgggccccagggcctacagggtttacccggaaccggcggtccaccaggcgaaaacggaaagccgggtgaacccgggcctaaaggggatgccggagcccctggggcccctgggggcaagggggatgctggggcccccggggaacggggaccccctggtctggccggtgcaccagggctgcgagggggagccggcccaccagggcctgagggcggcaagggagccgccggaccaccaggacccccaggtgcggccggaacccccggactacaaggcatgcctggagagcgagggggcctggggagtccaggtccgaagggggataaaggtgagccagggggacctggggctgatggggtgccgggcaaagacggaccccggggtcctacaggcccgatcgggccacctggaccggcgggccagcccggtgacaagggggaaggtggtgctcctgggctgcccgggatagctggtccgcgggggtccccaggagagagaggggaaacaggccctccaggtccggcagggttccctggcgccccgggccagaacggggaacctggcggcaaaggagagagaggcgctccaggcgaaaaaggggagggcggaccgccaggagtggctggccccccaggcgggagtggcccagccgggccccctggtcctcaaggcgtgaagggcgagagagggtctccgggcgggcccggcgctgcaggctttccaggcgcccgaggcttacctggcccgcctggcagtaatggaaatcccggtcccccgggcccctcgggctccccagggaaagatggcccacctgggcctgccgggaacaccggcgctccgggctcacctggcgtcagcggccccaagggtgatgccggccagccaggtgagaaaggctcgcctggtgctcaggggccacccggagccccaggacctcttggaatcgcaggcatcacaggcgcccgaggacttgccggtccaccaggaatgcctgggcccagaggcagtcctggccctcagggagtcaaaggcgaatcaggcaagccaggggctaatggactctctggagaacggggtcccccaggaccgcagggcctgcccggacttgccggaacagccggcgaaccgggcagggatggcaacccgggctcagacggcctgccgggaagagatggtagtcctggcggcaagggagataggggggaaaatggaagtccgggcgctccaggtgcccccggtcacccaggtcctccaggccccgtgggccctgcagggaaatccggggacaggggcgaaagcggcccagcaggaccagccggcgcccctgggccagcggggagcagaggtgctccgggcccgcagggccccagaggagacaagggggagaccggagaaaggggagcagcaggtatcaaaggtcacagggggttcccaggtaatcccggcgcgccaggctccccaggccccgccgggcagcagggagctattgggtctccagggcccgcaggaccacgcgggcccgttggaccgtctggcccccccgggaaggacggaacgtctggccatcctggtccaatcggcccgcctgggcctcgtggcaatcgtggggagcgcggatctgaaggcagcccaggacaccccggacaaccaggccctccaggcccgcccggcgccccaggaccttgttgcggcggggttggtgccgcggcgattgctggaatcggaggtgagaaggccggaggcttcgcgccttactacggtgatgagcccatggacttcaagatcaacacagacgagatcatgacatctctcaaaagtgtcaatggccagattgaatccctgatcagtcccgatggtagcaggaagaatcctgccaggaattgtagggacctgaagttttgccatccggaacttaagtccggtgaatattgggttgaccctaaccaggggtgtaaactggatgccattaaggtcttctgcaacatggaaacaggtgaaacatgtatatctgcaaaccctctcaatgtccctcgtaaacattggtggacagactctagtgctgaaaagaagcacgtctggttcggggaaagcatggacgggggatttcagtttagctatgggaaccctgaattgcccgaagacgttctggatgtgcatctcgcatttctgagacttctgtcctccagagcttctcagaatattacatatcactgcaagaattctattgcctatatggatcaggcatccggcaatgtgaagaaggcattgaaactcatgggcagcaatgagggcgaatttaaagccgaagggaattcaaagtttacctacaccgtcctcgaggacgggtgtactaagcatacgggtgaatggtccaaaactgtttttgagtatcggactcggaaggctgttagattgcccatagtggacatagctccttatgacattggaggaccagatcaggagtttggagttgacgttggacccgtgtgctttttgtag

SEQ ID NO: 1395 - DNA, 3492 bp, Artificial Sequence
  derived and/or modified sequence
atgatgagcttcgtgcagaagggcagctggctgctgctggccctgctccatcctacaatcatcctggcccaacaggaagccgttgagggcggctgctcgcacttggggcagagctacgccgatcgggacgtttggaagccagaaccttgccagatctgtgtatgtgattccgggagtgtcctgtgtgacgatatcatttgtgatgaccaggagctggactgccccaatccagaaattcctttcggtgaatgttgcgccgtgtgcccccagccgccaactgctcctacgagaccacctaatggccaagggccccaggggccaaaaggagatcccgggccccccggtattccgggtcgcaacggtgatcctggaatcccgggacagcctggttcccctggaagcccaggcccacccggcatatgcgagtcttgtcccaccggtcctcagaactactctccacagtacgattcttacgatgtaaaatccggcgtggcggtaggaggtctcgctgggtaccctggacccgcaggcccacctggtccacccggccctcccggcacatccggacatccaggttctcccgggtcccccggatatcaaggacctcctggtgaacctggccaggcgggaccttctggtccccccggccccccaggggccatcggaccctccggccccgcaggtaaggatggcgagtcagggcgccccggacgccccggcgagcgtggcctgcctggtcccccaggcattaagggaccagcaggcattccaggtttcccaggcatgaaagggcatcggggattcgacggacgcaacggcgagaaaggagagaccggcgctcccggcctgaaaggagaaaacgggctgccaggtgagaacggagcaccggggccaatgggtccccgaggtgccccaggagagcggggccgaccaggacttcccggtgccgcgggcgcgcggggaaacgacggggcaagaggtagcgatggccagcccggcccccccggaccccctggaacggccgggtttcctggctctcctggagctaagggagaggttggacctgcgggaagtcctggaagcaacggcgccccgggacagcgcggagaaccaggaccacaggggcatgccggggcccaaggcccccctggccctccagggataaacggatccccaggaggtaaaggcgagatgggcccggccggaatccctggcgcacccgggctcatgggggcgcgggggccaccggggcctgcaggcgcaaatggagctccaggcttacggggcggggctggtgagcctggcaagaatggcgccaaaggggagcccgggccgcggggcgaaaggggagaagccgggatccctggagtgcctggagccaagggagaagatggaaaggacggctctcccggagaaccaggggcaaatgggctaccaggtgctgccggtgagcgcggtgcccctggattccgaggaccagctggccctaacgggattccgggcgagaaggggcctgctggggagcggggagctccaggccccgccgggcctaggggggcagccggcgagccagggcgggacggggtgcctggggggcccgggatgcggggaatgcctggtagtcccggcggacctgggtccgacgggaagcccggcccacccggcagtcaaggtgaaagcgggcggcctgggcctccgggcccgagtggtcctcgggggcagcctggcgtgatgggctttccaggccccaagggcaatgatggcgccccaggcaaaaacggggaaaggggcggtcccgggggccccggtccacaagggccccctggaaaaaatggtgaaaccggccctcagggccctccgggaccgacaggaccagggggcgacaaaggtgacacaggtccacctggacctcaaggtctccagggactgcctggcacaggagggcctccaggtgaaaacgggaaacccggcgagcccggccctaagggagacgccggcgcccccggggcccccggcgggaagggggacgccggcgcgcctggtgagcgtgggcctccagggttggccggagcccccggactccgaggtggagcggggccgccaggcccggagggaggtaagggagccgcaggccctcccggcccgcccggcgctgcggggactcccggtctccaaggcatgccaggggagaggggcggcctcgggagtcccggcccaaagggcgacaaaggcgaacctggcgggcctggtgccgacggtgtgccaggcaaggatggcccccgggggccaaccggacccataggcccgccaggacccgcaggacagcctggtgacaaaggggagggcggagcccctggccttcccgggattgccgggcctcggggcagcccgggtgaaaggggggaaaccggtcctccagggccagctggcttccctggcgcacccggtcagaatggagagcctggcgggaagggcgaaagaggagccccaggtgaaaaaggtgaaggcggccccccaggattgtttggaccacctggaaaggacggaacctctgggcatcctggcccaatcggccctcccggacctagaggaaatagaggagagcgtggttcggagggtagccctgggcacccgggacaaccaggaccgccaggacccccgggagcccctggcccgtgctgtgggggcgtgggcgcagctgccatcgcaggaattggaggagagaaagccggtggcttcgcaccgtactatggcgatgagccaatggactttaagattaacaccgacgaaatcatgacatcgctgaaatcagtgaacggtcagatcgaaagccttattagccctgacgggagcagaaagaaccccgctaggaactgcagagatcttaagttctgccaccccgagcttaagagcggggaatactgggtcgaccccaaccagggctgtaagctggatgccattaaggtattctgcaatatggagacaggcgagacctgcatttccgcaaatcccctgaacgttcccagaaagcactggtggaccgactcatccgccgagaaaaagcacgtgtggtttggagagtctatggatggagggttccagttttcttatgggaacccagagctgcctgaggatgtgttggatgttcatcttgccttcttgagactgttgtccagcagagccagccagaacatcacataccattgcaaaaacagcatcgcctacatggatcaggcgtccgggaatgtcaagaaggctctgaagctcatggggtcaaatgaaggcgagttcaaagcagaggggaatagcaagtttacctatacagtgctcgaagatggctgtaccaagcacactggtgagtggtctaagaccgtttttgagtaccggactagaaaagctgtgcggctaccaattgtggatatcgcaccctacgacatcggcggtcccgaccaggaatttggcgtggatgtggggccggtgtgcttcctttag

SEQ ID NO: 1396 - DNA, 4401 bp, Artificial Sequence
  derived and/or modified sequence
atgatgagtttcgtacagaaaggctcatggcttctgttagcgctactccacccaactataatcctcgctcagcaagaggccgtggaaggcggttgctcccatctaggtcaaagttatgccgatagagatgtctggaagcctgaaccgtgtcagatttgcgtgtgtgattcaggctcagtgctgtgtgacgacataatctgtgacgaccaggaacttgactgccccaacccagaaattccttttggggagtgttgtgccgtgtgcccccagccccctaccgcccctactagaccaccaaatggacagggaccccagggaccaaagggcgaccctgggcctccaggcatccctggacgcaacggagatccaggcattccagggcaacccggtagccccggatctcctggccctcccggaatatgcgagagttgtcctaccggtcctcagaactattcaccccaatatgactcttacgatgtcaagagtggtgttgcggtaggtggattggccggatacccaggcccagccggtccccctggcccacctggaccacccggtacctcagggcacccaggcagcccaggctcacccggttaccagggccctcccggtgagccaggccaagccggaccatctggtccccctggccctccaggagcaataggccctagcggacctgctggaaaggacggtgagtctggacgcccaggacgcccaggcgaaagaggcttgccgggaccacccggaatcaaaggcccagcaggtatccctggattcccaggcatgaagggacacagagggttcgacggccgtaatggtgagaaaggtgagacaggagcccctgggctgaagggagaaaatggcctgccaggagagaacggcgcacccggacccatgggacccaggggggctcccggagagcgcggtaggccagggttgccaggcgctgcaggggctcgcggtaacgatggcgcacgaggctccgatgggcagccaggacctccgggtcccccaggtactgccggattccctggatcaccgggagctaaaggggaagttggccctgccggttctcccggatctaatggagctccaggacaaaggggcgaaccaggtcctcaggggcatgccggtgcacagggtcccccaggccctccaggaataaacgggagtcccggtggtaagggcgagatggggccagccggaatccctggggcacctgggctgatgggagcaaggggcccacccggacccgctggagccaatggggcaccaggcctcagaggcggtgccggtgagcccggaaagaatggcgctaagggggaacctggaccccgtggagaaagaggcgaggccggtatcccaggcgtgcctggcgctaaaggggaggacggaaaggacggctcccctggcgaaccaggggcaaatggtctgccaggagctgccggtgagagaggcgctcccggatttcgcggaccggcaggtcccaatggcatccctggcgaaaaggggcctgccggagagcgtggtgctcccggtccggcagggcctaggggtgccgctggtgaaccaggcagggacggtgtgcccggaggacctggaatgcggggtatgccgggaagccctgggggacctggcagcgatggcaagccaggccctccaggttctcaaggggaatcagggaggcccggaccccctgggccttctggccctagagggcaacccggagttatggggttcccaggcccaaagggtaacgatggagcgccaggcaagaacggcgagcgcggtggacccggtgggccagggcctcaaggtccccctgggaaaaacggcgaaaccgggcctcagggacctcccggacccaccggacctggcggagacaagggggacaccggaccaccaggccctcagggtttgcaaggcttgccaggcaccgggggacccccaggtgagaacggcaagcccggtgagccgggacccaagggagatgcaggagccccaggtgcgcctgggggaaaaggcgacgctggggctccaggggagcgaggcccaccaggcctcgccggtgctcccggtcttagaggaggcgctggtccccctggtccagagggcggtaaaggggctgccggaccacccggaccacccggagccgcagggacccccggtctccagggcatgcccggagagcggggtgggctggggtcgcccggacctaagggggacaagggagaaccgggaggtcctggggcagacggggttccaggcaaagacggacctagaggacccactgggccaatcggccctcccggacccgctgggcagcccggagacaaaggagagggaggagcaccaggcctccccggaattgctggacctcgcggatctccgggtgagcggggtgagacgggccctcccggtccagctggattccctggcgcacctggccaaaacggtgagccgggtgggaaaggcgaaagaggagcaccaggcgagaagggagagggtgggccaccaggtgtggctgggcctccgggtggatcaggtcctgccggtccacctggaccccagggcgttaagggggaacgaggatcacctggaggtcccggagctgcgggttttcctggagccaggggactacctgggcctccagggtcaaatggcaacccagggccacccggtccctctggctcccctggaaaagacggcccacctgggcctgcgggaaacaccggtgcccctggcagccctggcgtgagtggacctaaaggagatgccggacaacccggagaaaaaggcagtcctggggctcagggacctcctggagctcctggtcccctcggaatcgcaggtattaccggcgctagaggcttggcaggtccaccagggatgccgggtcctcgagggtctccaggccctcagggagtcaaaggcgaatcaggcaagcccggagctaacggtctctcgggggagagagggccacctggtcctcagggactccccggtcttgccggaacagccggagaaccagggagagacggaaacccaggctccgatggcttgccaggccgagacggaagcccgggaggcaaaggcgaccggggagagaatggctctcccggtgcccctggtgcacccggacatcctggaccgcctgggcctgtggggccagctggtaagtcaggcgaccggggagagagcggaccagctggtcctgcaggtgcccctggaccggcaggaagtcgtggggcacctgggccacaggggccacggggagacaagggagagaccggagaacggggagcagccggaatcaaaggtcaccgaggtttccctggcaacccaggagctcctggcagtccgggacctgccggacaacagggagccatcgggtcacccggtcccgctggtccgaggggccctgtcggtcctagcggccctccaggaaaggacggaacaagcggccaccccggaccaatcggtccgccagggccaaggggaaaccgtggcgagagaggcagcgaggggtccccaggccaccctgggcagccaggaccgcctggaccgccaggagcgccaggaccgtgttgtggtggcgtcggggcagctgccattgccggaatcgggggtgagaaggctggaggctttgccccatattatggcgacgaacccatggactttaaaattaataccgatgaaataatgacttccctgaagagcgtcaatggacagatagaaagccttattagtccagatggctctaggaagaaccctgctagaaactgccgcgatctaaagttctgccatccagagctgaagagtggagagtactgggtggacccaaaccagggctgcaagttggacgccattaaggttttttgcaacatggaaacaggcgagacttgtatttctgcaaaccctctgaacgtaccaagaaagcattggtggaccgactcgtcagcagagaagaagcacgtgtggtttggagaaagtatggacgggggatttcaattctcttacggaaacccagagctgccagaagacgtgctagacgtgcatctggcctttctccggttacttagctcgagagcaagtcagaatataacttaccactgcaagaattctatcgcttacatggaccaagcctcaggcaacgtgaagaaggcactgaaactgatggggtcaaatgaaggcgagttcaaagcagagggcaattcaaagtttacatacactgtgctggaggacgggtgcacaaaacacaccggtgagtggtccaagacggttttcgaatacaggacacgtaaggctgtgaggttacctatagtggatattgcgccatacgatatagggggacctgatcaggagttcggcgttgatgttggccctgtgtgttttctgtag

SEQ ID NO: 1397 - DNA, 3492 bp, Artificial Sequence
  derived and/or modified sequence
atgatgtccttcgtccaaaaagggagctggctgcttctggcactcctgcacccaactataatcctggcgcagcaggaggctgttgaagggggatgctcacacttaggacagtcatatgctgaccgggacgtatggaagcctgaaccatgccagatttgcgtgtgcgatagcggatccgtgctctgcgacgacattatatgcgatgatcaggagctggattgccccaacccagagatcccttttggcgagtgctgcgccgtgtgcccacagccacctactgctcccactcgcccacctaatgggcagggcccacaagggcctaaaggagatcccggacctccgggaattccagggagaaacggtgatcctggaatccctgggcagccaggatcacccggaagtcctgggccacccggtatctgcgagagttgtcccacagggcctcagaactattccccccaatacgatagttatgatgtgaaatcaggggtcgccgtgggtggcctggctggatacccaggccctgcagggccaccgggacccccaggtcctcctggtactagtggccacccaggcagtcctgggtcccctggctatcaagggccaccaggggaacctggacaggccggaccgtcagggcctccgggtccacctggagcaatcgggcctagcggccctgccggtaaggacggggagagtggcaggcctggcaggcctggtgagcggggtctgccaggcccacctgggatcaaggggcctgcaggaataccgggattcccagggatgaaagggcaccgcggtttcgatgggaggaatggagaaaaaggcgagaccggtgccccaggcctcaagggcgagaacggacttcccggtgaaaacggtgcacccggtccgatgggacccaggggtgcccctggagaacggggaagaccgggtcttccgggagctgctggtgcccgaggtaacgacggcgctcgaggaagcgatggacagccaggaccgccaggccctccgggaactgctggtttccccggatcccctggggcaaagggagaggtgggtccagcgggttcacctgggagcaacggcgcacccggacagcgcggtgagcctggaccacaggggcacgctggagcacaagggcctcccggaccgccaggtattaatggtagcccaggcggtaagggagaaatgggcccagccggaattccaggggctccaggcctcatgggagcgcgaggcccacccggacctgccggagcaaacggtgcccctgggctgcggggaggcgcaggcgaacctggcaaaaacggcgcaaagggcgaacccggacccaggggcgagcgaggagaagccggtattccaggggtacccggagccaagggtgaggatggcaaggacggtagccccggagagccaggagccaatggactccccggagcagcaggggagcggggagctcccggattccggggtcccgctggacccaacggaattccaggagaaaaaggccctgctggggagcgcggagccccaggacctgctgggcctagaggagcagccggtgagcctggcagagatggggttcctggtggtccgggaatgcgtggcatgccgggtagccctggaggcccaggcagtgacgggaagccaggcccacctggtagccaaggcgaatctggacgcccaggccctcccggaccgtctggtccacggggtcaacctggggttatgggatttcccggtccaaaaggcaacgacggggctccaggaaaaaacggggaaaggggaggcccaggcggacctgggcctcaggggccacctggtaaaaacggagagacaggccctcaggggccacctggcccaacaggacccggaggcgacaagggtgacacaggtcctcctggcccacagggtttgcagggcctacccggtactgggggtcctcctggagagaacggcaagcccggagagccaggtcccaagggagacgcaggcgctcctggggctccaggaggcaagggcgacgcaggggctcccggagagcggggaccccctgggctcgccggagctcctggattacgtggcggtgccggaccacccggaccagaaggaggtaagggcgctgccggtcccccaggtccgcctggagccgctggaacccctgggctccaagggatgccaggcgaaagaggaggcctgggaagccccggtccgaaaggcgacaagggagagcctggcggtcccggagccgatggcgtcccagggaaagatgggcctagaggacccacgggaccgattggaccgcctggcccagcaggacaacctggcgacaagggagaaggcggtgccccaggcctcccaggtattgctggcccacgtggatcccctggcgaaagaggtgaaaccggacctcccggacctgccggatttccaggcgcaccgggtcagaatggggagccgggagggaagggggagagaggggcaccgggagaaaaaggggaaggcggtcccccaggcctttttgggccacctggtaaggacggaaccagcgggcacccgggtcctatcggacctcccggaccacggggtaataggggagaacgtggctccgagggcagcccaggacatccaggtcaaccaggtccgcctggcccacctggtgccccaggcccatgttgcggtggggtgggcgcagcagctatcgccggaatcggtggggagaaagctggtggctttgccccttactacggggacgagcctatggacttcaagatcaatacggacgaaattatgactagcctgaaatctgtgaatgggcaaattgaatctttaataagccctgatggtagccgcaagaatccagcaagaaactgtcgggatctgaaattttgccatcccgaacttaagtccggcgagtactgggtagaccccaatcaggggtgcaagctcgacgctataaaagtgttttgtaatatggagaccggggagacctgcatttcagcgaatcctctgaacgtgcccagaaaacactggtggactgactcaagcgccgaaaagaagcacgtctggtttggagaatccatggacggcggatttcaatttagttatggaaatcctgaacttcccgaggatgttctcgacgtccacttggcctttctcaggcttctgtcttcacgggctagtcagaacatcacttatcactgcaagaattccatcgcttacatggatcaggccagcggcaatgtcaagaaggcattgaaactcatgggatcaaatgaaggtgagttcaaggccgaaggaaatagtaaattcacttatactgtactggaggacggttgtacaaagcacacaggagaatggtccaagactgtgttcgagtaccgaactcggaaagcggtgcggcttccgatcgtcgacatagctccctacgatatcggcggtccagatcaagagtttggcgtggatgtaggaccagtgtgcttcctgtag

SEQ ID NO: 1398 - DNA, 441 bp, Artificial Sequence
  derived and/or modified sequence
cctgggcctcccggacggcctggaaaacccggattccctaagcccggaggtcctggaggaccggcaattcctggcgcaccagggagacctttcgtgccaggaatacccggatggcctggcgcaccggctgcacctggctttccaatgccttccggcccacggagcccgggtggcccatggggcccagggggtcccattggtcccatttctccaggtccgggaatccccggtggtcccggtggacctagggggcctgggaggccggcaggacccacttctcccttcgggccatacggcccactctcacctggcttcccaggctctccagggaccccagggttcccaaccgccgacggtccagggggaccagggaaccccggatctccctggagccccggtctcccctaccccaggggcccagcaggaccaggtggcccatag

SEQ ID NO: 1399 - DNA, 2077 bp, Artificial Sequence
  derived and/or modified sequence
aggacacagtgagcgcttcaacgcgctgaactaaacgaatgaaggggaacaccaactcagctgtcacccccgcccccaagtgtcactggctagaagatcttcccccggttcgccggcagcaccggtgggtcttgtcacctctgcgccccgcagccctccggaggctgcagttgctgtctgctgacaggcgtcccctcaggagaacgggagctcctccagcgcagggccctgctcagcacccctggtcccgggggcccccacggaggccgccgcgctcagtgaaactttgccgcgcgcagcagtggccggagacccgcgcggaccctctccccgcggggacccgccagggcgagtcgcccctcccccgcggcagacgacccgacctgggccaaggtcggccaagtgctcgccgcctgcccagcggcccttggacccacaggacccggacccgagtgcgcggaagcctccgagccgcggccaggtctcagaatgcgcggcggggcagcccggcccgtcaagcagcgaagccgaaactagaagcctgaggtctggcttggtcactgtttgctggggaactccgacgagcaactacccttcggggactcagtttcccccgggccaagtgagacggacagctgcggctcccgcgagaactcgcgcgggaacaggagctgcgggctccgcacagcgcccggcacgtagacccagtctactaacgggctggaaggtcgcgctcccgcctccgcgcctccctagaacctttctcacctcaagctcgggctcccggactctctcacctcacggcccctccttccaccttgggccgcccagcctcaaccgccctcacttccgctgacccgccccccggaagcgatcctccgcagctgcgcaccgaggcgcacctccgcgcaccctcaggaggcgggtccagctcggtggcgaggggagcgcggcccccgagtgggcgaggcgctggcggctgtaggctccgataccgcggagcacactcccctccatcgagaccgtgcccccgcggggtctgtgtccccgggaggagttggctgcgtttggagatccctcggcctggtattcgtcgcgtctccctgcttgttgctctccacgtttagccccatccgacttctggaagcccaggggtgtgtcgctcgacccctaaaatatgctcctacccctagggcaaacttcagaatcctcaccctggcccccttcccagttcttggttcccaggcaggtccctttgcaaagcctctctccagcaagaatgcgcagaatgggcctctttctcctcttgactcctgccctccagcactttgcagctttcttctattttagcctctctctctctctctcacacacacacacacacacacacacacacacacacacacacacggtatattcaatgagtttgcttattagatgggtacttgatgtacaagactccagaggctctgtgggaagagccacattccttccaggctcactaacccactccctctttgtgctccagccctcactgtcttggtctgtggcatgcagttcctgggtcacatttccttctctgccttcagcacagcctcgggctgtgcctggctcccaggctggagttccttggttccaaagcctgcagtcccctctgccagagacagagctggtttcatgggtgaacagcccatgcagtcacaacgggccgcatgctcagaatcctgtacttggtttagtactttgctgttgccgtcttgaaatgattttctaataggggttcttgtgttttcattttgcacggggctgtgcaaattatgtgactggtcctggctagagacctcagaggtcgtccaccctgatctccaccatatctcaaacgctgaagattgacttccaggtctggccctcttcccaggatggcacattgtgttttaatcattacctttccctcctgtgcgatggcggatcatgcaagtccacgctggctgtctgtcctgggtgtagatgctgatttggtgtcccactcagatccccttgcaggaagaacggagctccctacctgggaatttccttc

SEQ ID NO: 1400 - DNA, 407 bp, Artificial Sequence
  derived and/or modified sequence
aaagggtgctcactggtacccggacaaccatttcacagactggtgtgccctataggcatcccagtgatacaccatcagccagagagcctgtgaactcttccaagcagaagggctctccctgccccctctccccgcgcagctcgctctgccctccgcctcctcttctccgcccactctcgccgcggtctcctggcggcggaggctttgtctcgtgggctggtccccagcggctccctccccgaacagctgctgctccagggaggaagcggcgcgggtgctgtccagcttcccggtgctgaaaaccggagggctcgtcatccaccactaccatgtaagggccatgagaagggctcatcctggcgcagcgcggacatggaggaggacttattccagctaaggcagctgcc

SEQ ID NO: 1401 - protein, 1424 aa, Artificial Sequence
  derived and/or modified sequence
MSARTAPRPQVLLLPLLLVLLAAAPAASKGCVCKDKGQCFCDGAKGEKGEKGFPGPPGSPGQKGFTGPEGLPGPQGPKSFRAIPSYSGGKSLQGISGLPGFSGSPGLPGTPGNTGPYGLVGVPGCSGSKGEQGFPGLPGTLGYPGIPGIHNLKIFKGAPAKEEDIELDAKGDPGLPGAPGPQGLPGPPGFPGPVGPPGPPGFFGFPGAMGPRGPKSFVLSSRISTKGEKGVKGLTGPPGPPGTVIVTLTGPDNRTDLKGEKGDKGAMGEPGPPGPSGLPGESYGSEKGAPGDPGLQGKPGKDGVPGFPGSEGVKGNRGFPGLMGEDGIKEEKRDVAIVSFSSKTEYYDTYQEKGDEGTPGPPGPRGARGPQGKNKFRCIPGSQGSSRPGLRGAPGWPGLKGSKGERGRPGKDAMGTPGSPGCAGSPGLPGSPGPPGPPGDIVFRKGPPGDHGLPGYLGSPGIPGVDGPKGEPGLLCTQCPYIPGPPGLPGLPGLHGVKGIPGRQGAAGLKGSPGSPGNTGLPGFPGFPGAQGDPGLKGEKGETLQPEGQVGVPGDPGLRGQPGRKGLDGIPGTPGVKGLPGPKGELALSGEKGDQGPPGDPGSPGSPGPAGPAGPPGYGPQGEPGLQGTQGVPGAPGPPGEAGPRGELSVSTPVPGPPGPPGPPGHPGPQGPPGIPGSLGKCGDPGLPGPDGEPGIPGIGFPGPPGPKGDQGFPGTKGSLGCPGKMGEPGLPGKPGLPGAKGEPAVAMPGGPGTPGFPGERGNSGEHGEIGLPGLPGLPGTPGNEGLDGPRGDPGQPGPPGEQGPPGRCIEGPRGAQGLPGLNGLKGQQGRRGKTGPKGDPGIPGLDRSGFPGETGSPGIPGHQGEMGPLGQRGYPGNPGILGPPGEDGVIGMMGFPGAIGPPGPPGNPGTPGQRGSPGIPGVKGQRGTPGAKGEQGDKGNPGPSEISHVIGDKGEPGLKGFAGNPGEKGNRGVPGMPGLKGLKGLPGPAGPPGPRGDLGSTGNPGEPGLRGIPGSMGNMGMPGSKGKRGTLGFPGRAGRPGLPGIHGLQGDKGEPGYSEGTRPGPPGPTGDPGLPGDMGKKGEMGQPGPPGHLGPAGPEGAPGSPGSPGLPGKPGPHGDLGFKGIKGLLGPPGIRGPPGLPGFPGSPGPMGIRGDQGRDGIPGPAGEKGETGLLRAPPGPRGNPGAQGAKGDRGAPGFPGLPGRKGAMGDAGPRGPTGIEGFPGPPGLPGAIIPGQTGNRGPPGSRGSPGAPGPPGPPGSHVIGIKGDKGSMGHPGPKGPPGTAGDMGPPGRLGAPGTPGLPGPRGDPGFQGFPGVKGEKGNPGFLGSIGPPGPIGPKGPPGVRGDPGTLKIISLPGSPGPPGTPGEPGMQGEPGPPGPPGNLGPCGPRGKPGKDGKPGTPGPAGEKGNKGSKGEPESLFHQL

SEQ ID NO: 1402 - protein, 1670 aa, Artificial Sequence
  derived and/or modified sequence
MSARTAPRPQVLLLPLLLVLLAAAPAASKGCVCKDKGQCFCDGAKGEKGEKGFPGPPGSPGQKGFTGPEGLPGPQGPKGFPGLPGLTGSKGVRGISGLPGFSGSPGLPGTPGNTGPYGLVGVPGCSGSKGEQGFPGLPGTLGYPGIPGAAGLKGQKGAPAKEEDIELDAKGDPGLPGAPGPQGLPGPPGFPGPVGPPGPPGFFGFPGAMGPRGPKGHMGERVIGHKGERGVKGLTGPPGPPGTVIVTLTGPDNRTDLKGEKGDKGAMGEPGPPGPSGLPGESYGSEKGAPGDPGLQGKPGKDGVPGFPGSEGVKGNRGFPGLMGEDGIKGQKGDIGPPGFRGPTEYYDTYQEKGDEGTPGPPGPRGARGPQGPSGPPGVPGSPGSSRPGLRGAPGWPGLKGSKGERGRPGKDAMGTPGSPGCAGSPGLPGSPGPPGPPGDIVFRKGPPGDHGLPGYLGSPGIPGVDGPKGEPGLLCTQCPYIPGPPGLPGLPGLHGVKGIPGRQGAAGLKGSPGSPGNTGLPGFPGFPGAQGDPGLKGEKGETLQPEGQVGVPGDPGLRGQPGRKGLDGIPGTPGVKGLPGPKGELALSGEKGDQGPPGDPGSPGSPGPAGPAGPPGYGPQGEPGLQGTQGVPGAPGPPGEAGPRGELSVSTPVPGPPGPPGPPGHPGPQGPPGIPGSLGKCGDPGLPGPDGEPGIPGIGFPGPPGPKGDQGFPGTKGSLGCPGKMGEPGLPGKPGLPGAKGEPAVAMPGGPGTPGFPGERGNSGEHGEIGLPGLPGLPGTPGNEGLDGPRGDPGQPGPPGEQGPPGRCIEGPRGAQGLPGLNGLKGQQGRRGKTGPKGDPGIPGLDRSGFPGETGSPGIPGHQGEMGPLGQRGYPGNPGILGPPGEDGVIGMMGFPGAIGPPGPPGNPGTPGQRGSPGIPGVKGQRGTPGAKGEQGDKGNPGPSEISHVIGDKGEPGLKGFAGNPGEKGNRGVPGMPGLKGLKGLPGPAGPPGPRGDLGSTGNPGEPGLRGIPGSMGNMGMPGSKGKRGTLGFPGRAGRPGLPGIHGLQGDKGEPGYSEGTRPGPPGPTGDPGLPGDMGKKGEMGQPGPPGHLGPAGPEGAPGSPGSPGLPGKPGPHGDLGFKGIKGLLGPPGIRGPPGLPGFPGSPGPMGIRGDQGRDGIPGPAGEKGETGLLRAPPGPRGNPGAQGAKGDRGAPGFPGLPGRKGAMGDAGPRGPTGIEGFPGPPGLPGAIIPGQTGNRGPPGSRGSPGAPGPPGPPGSHVIGIKGDKGSMGHPGPKGPPGTAGDMGPPGRLGAPGTPGLPGPRGDPGFQGFPGVKGEKGNPGFLGSIGPPGPIGPKGPPGVRGDPGTLKIISLPGSPGPPGTPGEPGMQGEPGPPGPPGNLGPCGPRGKPGKDGKPGTPGPAGEKGNKGSKGEPGPAGSDGLPGLKGKRGDSGSPATWTTRGFVFTRHSQTTAIPSCPEGTVPLYSGFSFLFVQGNQRAHGQDLGTLGSCLQRFTTMPFLFCNVNDVCNFASRNDYSYWLSTPALMPMNMAPITGRALEPYISRCTVCEGPAIAIAVHSQTTDIPPCPHGWISLWKGFSFIMFTSAGSEGTGQALASPGSCLEEFRASPFLECHGRGTCNYYSNSYSFWLASLNPERMFRKPIPSTVKAGELEKIISRCQVCMKKRH

SEQ ID NO: 1403 - protein, 1838 aa, Artificial Sequence
  derived and/or modified sequence
MDVHTRWKARSALRPGAPLLPPLLLLLLWAPPPSRAAQPADLLKVLDFHNLPDGITKTTGFCATRRSSKGPDVAYRVTKDAQLSAPTKQLYPASAFPEDFSILTTVKAKKGSQAFLVSIYNEQGIQQIGLELGRSPVFLYEDHTGKPGPEDYPLFRGINLSDGKWHRIALSVHKKNVTLILDCKKKTTKFLDRSDHPMIDINGIIVFGTRILDEEVFEGDIQQLLFVSDHRAAYDYCEHYSPDCDTAVPDTPQSQDPNPDEYYTEGDGEGETYYYEYPYYEDPEDLGKEPTPSKKPVEAAKETTEVPEELTPTPTEAAPMPETSEGAGKEEDVGIGDYDYVPSEDYYTPSPYDDLTYGEGEENPDQPTDPGAGAEIPTSTADTSNSSNPAPPPGEGADDLEGEFTEETIRNLDENYYDPYYDPTSSPSEIGPGMPANQDTIYEGIGGPRGEKGQKGEPAIIEPGMLIEGPPGPEGPAGLPGPPGTMGPTGQVGDPGERGPPGRPGLPGADGLPGPPGTMLMLPFRFGGGGDAGSKGPMVSAQESQAQAILQQARLALRGPAGPMGLTGRPGPVGPPGSGGLKGEPGDVGPQGPRGVQGPPGPAGKPGRRGRAGSDGARGMPGQTGPKGDRGFDGLAGLPGEKGHRGDPGPSGPPGPPGDDGERGDDGEVGPRGLPGEPGPRGLLGPKGPPGPPGPPGVTGMDGQPGPKGNVGPQGEPGPPGQQGNPGAQGLPGPQGAIGPPGEKGPLGKPGLPGMPGADGPPGHPGKEGPPGEKGGQGPPGPQGPIGYPGPRGVKGADGIRGLKGTKGEKGEDGFPGFKGDMGIKGDRGEIGPPGPRGEDGPEGPKGRGGPNGDPGPLGPPGEKGKLGVPGLPGYPGRQGPKGSIGFPGFPGANGEKGGRGTPGKPGPRGQRGPTGPRGERGPRGITGKPGPKGNSGGDGPAGPPGERGPNGPQGPTGFPGPKGPPGPPGKDGLPGHPGQRGETGFQGKTGPPGPPGVVGPQGPTGETGPMGERGHPGPPGPPGEQGLPGLAGKEGTKGDPGPAGLPGKDGPPGLRGFPGDRGLPGPVGALGLKGNEGPPGPPGPAGSPGERGPAGAAGPIGIPGRPGPQGPPGPAGEKGAPGEKGPQGPAGRDGLQGPVGLPGPAGPVGPPGEDGDKGEIGEPGQKGSKGDKGEQGPPGPTGPQGPIGQPGPSGADGEPGPRGQQGLFGQKGDEGPRGFPGPPGPVGLQGLPGPPGEKGETGDVGQMGPPGPPGPRGPSGAPGADGPQGPPGGIGNPGAVGEKGEPGEAGEPGLPGEGGPPGPKGERGEKGESGPSGAAGPPGPKGPPGDDGPKGSPGPVGFPGDPGPPGEPGPAGQDGPPGDKGDDGEPGQTGSPGPTGEPGPSGPPGKRGPPGPAGPEGRQGEKGAKGEAGLEGPPGKTGPIGPQGAPGKPGPDGLRGIPGPVGEQGLPGSPGPDGPPGPMGPPGLPGLKGDSGPKGEKGHPGLIGLIGPPGEQGEKGDRGLPGPQGSSGPKGEQGITGPSGPIGPPGPPGLPGPPGPKGAKGSSGPTGPKGEAGHPGPPGPPGPPGEVIQPLPIQASRTRRNIDASQLLDDGNGENYVDYADGMEEIFGSLNSLKLEIEQMKRPLGTQQNPARTCKDLQLCHPDFPDGEYWVDPNQGCSRDSFKVYCNFTAGGSTCVFPDKKSEGARITSWPKENPGSWFSEFKRGKLLSYVDAEGNPVGVVQMTFLRLLSASAHQNVTYHCYQSVAWQDAATGSYDKALRFLGSNDEEMSYDNNPYIRALVDGCATKKGYQKTVLEIDTPKVEQVPIVDIMFNDFGEASQKFGFEVGPACFMG

SEQ ID NO: 1404 - DNA, 5517 bp, Artificial Sequence
  derived and/or modified sequence
atggacgtgcacaccagatggaaggccagaagcgccctgagacccggcgcccccctgctgccccccctgctgctgctgctgctgtgggcccccccccccagcagagccgcccagcccgccgacctgctgaaggtgctggacttccacaacctgcccgacggcatcaccaagaccaccggcttctgcgccaccagaagaagcagcaagggccccgacgtggcctacagagtgaccaaggacgcccagctgagcgcccccaccaagcagctgtaccccgccagcgccttccccgaggacttcagcatcctgaccaccgtgaaggccaagaagggcagccaggccttcctggtgagcatctacaacgagcagggcatccagcagatcggcctggagctgggcagaagccccgtgttcctgtacgaggaccacaccggcaagcccggccccgaggactaccccctgttcagaggcatcaacctgagcgacggcaagtggcacagaatcgccctgagcgtgcacaagaagaacgtgaccctgatcctggactgcaagaagaagaccaccaagttcctggacagaagcgaccaccccatgatcgacatcaacggcatcatcgtgttcggcaccagaatcctggacgaggaggtgttcgagggcgacatccagcagctgctgttcgtgagcgaccacagagccgcctacgactactgcgagcactacagccccgactgcgacaccgccgtgcccgacaccccccagagccaggaccccaaccccgacgagtactacaccgagggcgacggcgagggcgagacctactactacgagtacccctactacgaggaccccgaggacctgggcaaggagcccacccccagcaagaagcccgtggaggccgccaaggagaccaccgaggtgcccgaggagctgacccccacccccaccgaggccgcccccatgcccgagaccagcgagggcgccggcaaggaggaggacgtgggcatcggcgactacgactacgtgcccagcgaggactactacacccccagcccctacgacgacctgacctacggcgagggcgaggagaaccccgaccagcccaccgaccccggcgccggcgccgagatccccaccagcaccgccgacaccagcaacagcagcaaccccgcccccccccccggcgagggcgccgacgacctggagggcgagttcaccgaggagaccatcagaaacctggacgagaactactacgacccctactacgaccccaccagcagccccagcgagatcggccccggcatgcccgccaaccaggacaccatctacgagggcatcggcggccccagaggcgagaagggccagaagggcgagcccgccatcatcgagcccggcatgctgatcgagggcccccccggccccgagggccccgccggcctgcccggcccccccggcaccatgggccccaccggccaggtgggcgaccccggcgagagaggcccccccggcagacccggcctgcccggcgccgacggcctgcccggcccccccggcaccatgctgatgctgcccttcagattcggcggcggcggcgacgccggcagcaagggccccatggtgagcgcccaggagagccaggcccaggccatcctgcagcaggccagactggccctgagaggccccgccggccccatgggcctgaccggcagacccggccccgtgggcccccccggcagcggcggcctgaagggcgagcccggcgacgtgggcccccagggccccagaggcgtgcagggcccccccggccccgccggcaagcccggcagaagaggcagagccggcagcgacggcgccagaggcatgcccggccagaccggccccaagggcgacagaggcttcgacggcctggccggcctgcccggcgagaagggccacagaggcgaccccggccccagcggcccccccggcccccccggcgacgacggcgagagaggcgacgacggcgaggtgggccccagaggcctgcccggcgagcccggccccagaggcctgctgggccccaagggcccccccggcccccccggcccccccggcgtgaccggcatggacggccagcccggccccaagggcaacgtgggcccccagggcgagcccggcccccccggccagcagggcaaccccggcgcccagggcctgcccggcccccagggcgccatcggcccccccggcgagaagggccccctgggcaagcccggcctgcccggcatgcccggcgccgacggcccccccggccaccccggcaaggagggcccccccggcgagaagggcggccagggcccccccggcccccagggccccatcggctaccccggccccagaggcgtgaagggcgccgacggcatcagaggcctgaagggcaccaagggcgagaagggcgaggacggcttccccggcttcaagggcgacatgggcatcaagggcgacagaggcgagatcggcccccccggccccagaggcgaggacggccccgagggccccaagggcagaggcggccccaacggcgaccccggccccctgggcccccccggcgagaagggcaagctgggcgtgcccggcctgcccggctaccccggcagacagggccccaagggcagcatcggcttccccggcttccccggcgccaacggcgagaagggcggcagaggcacccccggcaagcccggccccagaggccagagaggccccaccggccccagaggcgagagaggccccagaggcatcaccggcaagcccggccccaagggcaacagcggcggcgacggccccgccggcccccccggcgagagaggccccaacggcccccagggccccaccggcttccccggccccaagggcccccccggcccccccggcaaggacggcctgcccggccaccccggccagagaggcgagaccggcttccagggcaagaccggcccccccggcccccccggcgtggtgggcccccagggccccaccggcgagaccggccccatgggcgagagaggccaccccggcccccccggcccccccggcgagcagggcctgcccggcctggccggcaaggagggcaccaagggcgaccccggccccgccggcctgcccggcaaggacggcccccccggcctgagaggcttccccggcgacagaggcctgcccggccccgtgggcgccctgggcctgaagggcaacgagggcccccccggcccccccggccccgccggcagccccggcgagagaggccccgccggcgccgccggccccatcggcatccccggcagacccggcccccagggcccccccggccccgccggcgagaagggcgcccccggcgagaagggcccccagggccccgccggcagagacggcctgcagggccccgtgggcctgcccggccccgccggccccgtgggcccccccggcgaggacggcgacaagggcgagatcggcgagcccggccagaagggcagcaagggcgacaagggcgagcagggcccccccggccccaccggcccccagggccccatcggccagcccggccccagcggcgccgacggcgagcccggccccagaggccagcagggcctgttcggccagaagggcgacgagggccccagaggcttccccggcccccccggccccgtgggcctgcagggcctgcccggcccccccggcgagaagggcgagaccggcgacgtgggccagatgggcccccccggcccccccggccccagaggccccagcggcgcccccggcgccgacggcccccagggcccccccggcggcatcggcaaccccggcgccgtgggcgagaagggcgagcccggcgaggccggcgagcccggcctgcccggcgagggcggcccccccggccccaagggcgagagaggcgagaagggcgagagcggccccagcggcgccgccggcccccccggccccaagggcccccccggcgacgacggccccaagggcagccccggccccgtgggcttccccggcgaccccggcccccccggcgagcccggccccgccggccaggacggcccccccggcgacaagggcgacgacggcgagcccggccagaccggcagccccggccccaccggcgagcccggccccagcggcccccccggcaagagaggcccccccggccccgccggccccgagggcagacagggcgagaagggcgccaagggcgaggccggcctggagggcccccccggcaagaccggccccatcggcccccagggcgcccccggcaagcccggccccgacggcctgagaggcatccccggccccgtgggcgagcagggcctgcccggcagccccggccccgacggcccccccggccccatgggcccccccggcctgcccggcctgaagggcgacagcggccccaagggcgagaagggccaccccggcctgatcggcctgatcggcccccccggcgagcagggcgagaagggcgacagaggcctgcccggcccccagggcagcagcggccccaagggcgagcagggcatcaccggccccagcggccccatcggcccccccggcccccccggcctgcccggcccccccggccccaagggcgccaagggcagcagcggccccaccggccccaagggcgaggccggccaccccggcccccccggcccccccggcccccccggcgaggtgatccagcccctgcccatccaggccagcagaaccagaagaaacatcgacgccagccagctgctggacgacggcaacggcgagaactacgtggactacgccgacggcatggaggagatcttcggcagcctgaacagcctgaagctggagatcgagcagatgaagagacccctgggcacccagcagaaccccgccagaacctgcaaggacctgcagctgtgccaccccgacttccccgacggcgagtactgggtggaccccaaccagggctgcagcagagacagcttcaaggtgtactgcaacttcaccgccggcggcagcacctgcgtgttccccgacaagaagagcgagggcgccagaatcaccagctggcccaaggagaaccccggcagctggttcagcgagttcaagagaggcaagctgctgagctacgtggacgccgagggcaaccccgtgggcgtggtgcagatgaccttcctgagactgctgagcgccagcgcccaccagaacgtgacctaccactgctaccagagcgtggcctggcaggacgccgccaccggcagctacgacaaggccctgagattcctgggcagcaacgacgaggagatgagctacgacaacaacccctacatcagagccctggtggacggctgcgccaccaagaagggctaccagaagaccgtgctggagatcgacacccccaaggtggagcaggtgcccatcgtggacatcatgttcaacgacttcggcgaggccagccagaagttcggcttcgaggtgggccccgcctgcttcatgggctag

SEQ ID NO: 1405 - DNA, 5517 bp, Artificial Sequence
  derived and/or modified sequence
atggatgtccacacacggtggaaggcccgcagtgctctccgccctggggctcctctgctgccaccactgcttttactactcctgtgggctcctccccccagtagagccgcccagcccgcggatctgctcaaggtattggacttccacaaccttccagacggcattactaagaccaccgggttttgtgccacaaggcgttcatctaaaggcccggatgtggcatatagggtcacgaaagatgcgcaactgtccgctcctaccaaacagctctatcccgcctccgcttttcccgaagatttctcaattttaaccaccgtcaaggccaaaaaaggatcccaggcatttttagtgagcatctacaacgagcaggggatacagcagatagggctggagcttggtaggtcgccggtctttctctatgaggatcacaccgggaagccaggaccggaggattaccctctgttccgaggcattaatcttagcgacggaaagtggcatcggatcgctctcagcgtgcacaagaaaaacgttacgttgatccttgactgtaaaaaaaagaccactaagtttctggacagaagcgatcatccgatgattgatatcaacggtattattgtcttcggaacgaggatccttgacgaggaggtcttcgagggcgatatccagcagctcttgtttgtgtcagaccatagggctgcctatgactattgcgagcactactcgcccgattgtgacacagccgtgccagacactccacagtcccaggacccaaaccccgatgagtattacaccgagggcgacggcgagggcgaaacttactattatgagtacccatactatgaggacccggaggacctgggaaaggaacctacccccagcaagaagcccgtagaagccgcaaaggaaactaccgaagtgccagaggagctcacaccaaccccaactgaggctgccccaatgccagagacgagcgaaggtgccggtaaggaggaggacgtcgggatcggcgattacgactacgtgcctagcgaggattattatacaccttccccctacgacgatctaacatacggagagggagaagaaaatcctgatcagcctacagaccccggggcaggagcagagattccgacctctactgcagatacctccaattcttctaaccccgctcctcctcccggcgagggggcggatgacctcgagggtgaatttaccgaggaaacaatacgcaacctggatgagaactactacgacccctattacgatccgacctcctcccccagtgagattgggcccgggatgcccgctaatcaggacacaatatacgagggtattggtggtcctcgcggtgagaagggccagaaaggtgagcccgccattatagaaccaggcatgctgatcgaaggacctcctggtccagaagggcccgccggactgcccggcccaccgggaacgatgggacccactggccaggtaggggatccaggcgaaaggggaccccccgggaggccaggacttccaggcgcagacggcctgcccggtcccccagggacgatgctgatgctaccgtttagattcggaggcggcggagacgccgggagcaagggaccaatggtgtcagcccaggagtcccaggcccaggccatattacagcaggctcgactggccctgagaggccccgctggaccaatgggactgacgggaaggcctggcccagtcggaccgccgggaagtggcgggctgaaaggagagccaggcgatgtcggcccgcaaggccctcgaggagtccagggacccccggggccagcaggaaaaccagggcggaggggcagagccggcagcgacggagccagaggcatgcccgggcagaccggacccaaaggagatcgaggcttcgatggccttgccggcctcccgggagagaaagggcatcggggcgatccgggaccatctggtcccccaggcccgccgggcgatgacggggaacggggcgacgatggggaggttggcccccgagggctgcccggagaacctggtcctagagggctcctgggacccaagggaccacctgggccccccggccccccgggcgtaacggggatggacggccagccaggccccaaaggaaatgtaggaccacagggagaaccaggccctcctggtcagcagggcaaccccggcgcccagggattaccaggccctcagggcgccatcggaccgccaggggagaaggggcctctcggaaagcccggccttccaggaatgcccggagccgatgggcctccagggcatcccggcaaagagggtccccctggcgagaaggggggccagggcccccctggtccccaagggccaatagggtacccaggtccccggggcgttaagggggcagacggaattcggggtctgaagggcactaagggggagaagggtgaggacggattcccagggtttaagggcgatatgggaataaaaggcgatagaggggagattgggccgcccggcccccgcggcgaggacggccccgaaggcccaaaaggaagaggcgggccgaacggtgaccccggcccccttggccctccaggcgagaaggggaagcttggggtacctggcctgccgggctaccctggcaggcagggaccaaagggaagcatcggttttcccggattcccaggggctaacggagagaagggcgggcgtgggactcccggaaaaccaggccctcggggccaacggggtccaactggccccagaggcgagcgcgggcccagaggcatcacaggaaaacctggacctaagggcaactccggaggagacgggccagccgggccccccggcgagcgcggccctaacggtccacagggacctactggattcccaggtcccaagggcccccctggtcctcccggcaaggatggacttcccggtcacccaggccagcgaggcgaaaccggattccaagggaaaacggggcctcctggccctccaggcgttgtggggccacagggtcctaccggcgagacggggccaatgggcgagaggggccaccccggccccccaggtcccccaggcgaacaaggactacccgggctggccggaaaggagggaacaaagggcgaccctggccctgccgggttacctggcaaggacggacccccaggacttcggggatttcctggcgatcgaggcctgcctggacccgtgggcgcactgggcctgaaggggaacgaggggcccccaggcccccccgggcccgccggcagtcctggggagcggggcccggccggagcggctggaccaattggaatccccggaaggcctggtccgcaggggcctcctgggccagctggcgagaaaggcgcacctggcgaaaagggtcctcagggccctgctgggagggacggactacagggacctgttggcttacctggacccgctggccctgtggggcccccgggagaggacggcgataaaggggaaatcggggagcctggccagaaaggatccaagggggacaagggggaacagggtccacctggccccacaggcccgcagggacccatcggacagccaggcccaagcggggccgatggcgagcctggtccgcgcggacaacaggggctgttcggccagaaaggggacgagggcccaagaggatttcccggtccgcccggccccgttgggctgcagggcctcccagggcctcccggggagaagggagaaactggggatgtgggccagatgggccctcctggtccacccggacctagagggcctagcggagcccccggagcagacgggcctcagggaccccctggtggcatcggcaatcccggcgcagtcggggaaaaaggagagcccggcgaggccggcgaaccaggattacctggagagggcgggcccccggggccaaagggggagcggggcgagaagggagagtccggcccgagcggggccgcaggtcctccaggaccaaaggggcctcctggcgacgatggcccaaaaggtagccccgggcccgtgggttttccaggtgatcctggcccacctggcgaacccgggcccgccggccaagacggcccccctggtgataaaggagatgatggagaacccggacaaacaggcagccccggccctacgggagaacccgggcctagcgggccacccggtaagcgagggccccctggacccgccggccccgagggccgccagggagagaagggagccaagggagaggcaggcctggagggcccacccggcaaaactgggccaatcggtcctcagggggcgcccgggaagccagggcccgatggacttcgcgggattcctggccctgtgggcgagcagggcttgcctgggagcccagggccagacggtccccccggaccaatggggcctcctggcttaccaggtctgaagggtgactctgggccaaagggggaaaagggacacccgggtctcatcggtctaattggtcctccaggtgagcagggagagaagggagaccgcggcctgcccggaccccagggaagtagtggccccaaaggcgagcaggggatcactggtccaagcgggcctattggccctcccggaccgcctggactgcccggcccaccaggacccaagggcgcgaaaggttcttcagggccgacgggacctaagggagaggcaggtcatccagggccccccgggccacctgggccccccggcgaggtgattcaaccactgcccatccaagcttccaggacacggaggaatatcgacgccagtcagctgctcgacgatggtaatggcgaaaactatgttgactatgccgatggaatggaggaaatctttgggtcccttaactccctaaagttggaaattgagcagatgaagaggcccctgggcactcagcagaaccccgctcggacatgtaaagacctgcagctttgtcatccagatttcccagacggcgagtactgggtggaccccaaccaggggtgtagcagagacagctttaaggtgtattgtaattttacagctggaggaagcacttgtgtcttccctgataagaagtcagagggcgcaaggatcaccagctggccaaaagagaatcctggtagttggtttagcgagtttaagcgtgggaaactactgagctacgtggatgctgagggtaacccggttggagtggtgcaaatgactttcctgagactcctgtcagcctctgcccaccagaatgtgacttatcattgctaccagtccgttgcctggcaagacgccgccactggctcctatgacaaagccctgaggttcctcgggtcaaacgatgaggagatgagttatgataataacccctacatccgcgcgctggtggacgggtgtgctactaaaaagggatatcagaaaactgtgctggaaattgatactccaaaagtcgaacaggtaccaattgtggacattatgttcaatgatttcggagaggcgagtcagaagttcggcttcgaggtcgggccagcctgtttcatgggctag

SEQ ID NO: 1406 - DNA, 5517 bp, Artificial Sequence
  derived and/or modified sequence
atggatgtgcacacccgctggaaggcccggagcgccctgcggcctggggcccccctgctgccccccctgctgctgctgctgctgtgggcccccccacccagccgggccgcccagcctgctgacctgctgaaggtgctggacttccacaacctgcctgatggcatcaccaagaccaccggcttctgtgccaccaggaggagcagcaaaggaccagatgtggcctacagagtgaccaaggatgcccagctgagcgcccccaccaagcagctgtacccagccagcgccttccctgaggacttcagcatcctgaccaccgtgaaggccaagaagggcagccaggccttcctggtgtccatctacaatgagcagggcatccagcagatcggcctggagctgggccgcagccctgtgttcctgtatgaggaccacacaggcaagccaggccctgaggactaccccctcttccggggcatcaacctgagtgatggcaagtggcaccgcatcgccctgtctgtgcacaagaagaatgtgaccctcatcctggactgcaagaagaagaccaccaagttcctggacagaagtgaccaccccatgattgacatcaatggcatcatcgtgtttggcacccgcatcctggatgaggaggtgtttgaaggagacatccagcagctgctgtttgtgtctgaccaccgggccgcctatgactactgtgagcactacagcccagactgtgacacagctgtgcctgacaccccccagagccaggaccccaacccagatgagtactacacagaaggagatggagagggggagacctactactatgagtacccctactatgaagatcctgaggacctgggcaaggagcccacccccagcaagaagcctgtggaggccgccaaggagaccacagaggtgcctgaggagctgacccccacccccacagaagctgcccccatgcctgagaccagcgagggcgccggcaaggaggaggatgtgggcattggagactatgactatgtgcccagcgaggactactacacccccagcccctatgatgacctgacctatggagagggggaggagaacccagaccagcccacagaccccggggccggggctgagatccccaccagcacagctgacaccagcaacagcagcaacccagcccctcctcctggagagggcgcagatgacctggagggggagttcacagaggagaccatccggaacctggatgagaactactatgacccctactatgaccccaccagcagccccagcgagatcggccctggcatgcctgccaaccaggacaccatctatgagggcattggaggccccagaggagagaagggccagaagggggagcccgccatcatcgagcccggcatgctgattgagggccccccaggccctgagggccctgctggcctgcccggccccccaggcaccatgggccccaccggccaggtgggggaccctggagagcggggccccccaggccggcccggcctgcctggagcagatggcctgcccggccccccaggcaccatgctgatgctgcccttccgctttggaggcggcggagatgctggcagcaagggccccatggtgtctgcccaggagagccaggcccaggccatcctgcagcaggcccggctggccctgcggggccctgctggccccatgggcctgaccggccggcccggccctgtgggccccccaggcagcggcggcctgaagggggagcctggagatgtgggcccccagggcccccggggcgtgcagggccccccaggccctgctgggaagccaggccggcggggccgggccggcagtgatggagcccggggcatgcctggccagacaggccccaagggggaccggggctttgatggcctggccggcctgcctggagagaagggccacagaggagaccccggccccagcggccccccaggccccccaggagatgatggagagagaggagatgatggagaggtgggcccccggggcctgcctggagagcccggcccccggggcctgctgggccccaagggccccccaggccccccaggccccccaggagtgacaggcatggatggccagcccggccccaagggaaatgtgggcccccagggcgagcccggccccccaggccagcagggcaaccctggggcccagggcctgcccggcccccagggcgccatcggccccccaggagagaagggccccctgggcaagccaggcctgcccggcatgcctggagcagatggccccccaggccaccctgggaaggagggccccccaggagagaagggcggccagggccccccaggcccccagggccccatcggctacccaggcccccggggcgtgaagggagcagatggcatccggggcctgaagggcaccaagggggagaagggggaggatggcttccctggcttcaagggggacatgggcatcaagggggacagaggagaaattggccccccaggccccagaggagaagatggccctgagggccccaagggccggggcggccccaacggggaccccggccccctgggccccccaggagagaagggcaagctgggcgtgcccggcctgcccggctacccaggccggcagggccccaagggcagcatcggcttccctggcttccctggggccaacggggagaagggcggccggggcaccccaggcaagccaggcccccggggccagaggggccccaccggccccagaggagagcggggcccccggggcatcaccgggaagccaggccccaagggcaacagcggaggagatggccctgctggccccccaggagagcggggccccaacggcccccagggccccaccggcttccctggccccaagggccccccaggccccccaggcaaggatggcctgcccggccaccctggccagagaggagagaccggcttccagggcaagacaggccccccaggccccccaggagtggtgggcccccagggccccactggagagaccggccccatgggagagcggggccaccctggccccccaggccccccaggagagcagggcctgcccggcctggccggcaaggagggcaccaagggggaccccggccctgctggcctgcccgggaaggatggccccccaggcctgcggggcttccctggggaccggggcctgcccggccctgtgggcgccctgggcctgaagggaaatgaaggacctcctggccccccaggccctgctggcagccctggagagcggggccctgctggagctgctggccccatcggcatccctggccggcccggcccccagggccccccaggccctgctggggagaagggggcccctggagagaagggcccccagggccctgctggaagagatggcctgcagggccctgtgggcctgcccggccctgctggccctgtgggccccccaggagaagatggagacaagggggagattggagagcccggccagaagggcagcaagggggacaagggggagcagggccccccaggccccaccggcccccagggccccatcggccagcccggccccagcggggctgatggagagcccggcccccggggccagcagggcctgtttggccagaagggagatgagggcccccggggcttccctggccccccaggccctgtgggcctgcagggcctgcccggccccccaggagagaagggggagactggagatgtgggccagatgggccccccaggccccccaggcccccggggccccagcggggcccctggagcagatggcccccagggccccccaggcggcatcggcaaccctggagctgtgggggagaagggggagcctggagaggccggggagcccggcctgcccggggagggcggccccccaggccccaagggggagcggggggagaagggggagagcggccccagcggggccgccggccccccaggccccaagggccccccaggagatgatggccccaagggcagccctggccctgtgggcttccctggggaccccggccccccaggagagcccggccctgctggccaggacggccccccaggggacaagggagatgatggagagcccggccagacaggcagccctggccccaccggggagcccggccccagcggccccccaggcaagaggggccccccaggccctgctggccctgagggccggcagggcgagaagggggccaagggggaggccggcctggagggccccccaggcaagacaggccccatcggcccccagggcgcccctgggaagccaggcccagatggcctgcggggcatccctggccctgtgggggagcagggcctgcccggcagccctggcccagatggccccccaggccccatgggccccccaggcctgcccggcctgaagggggacagcggccccaagggggagaagggccaccctggcctcatcggcctgattggccccccaggagagcagggcgagaagggggaccggggcctgcccggcccccagggcagcagcggccccaagggggagcagggcatcaccggccccagcggccccatcggccccccaggccccccaggcctgcccggccccccaggccccaagggggccaagggcagcagcggccccaccggccccaagggggaggccggccaccctggccccccaggccccccaggccccccaggagaggtgatccagcccctgcccatccaggccagcaggaccaggagaaatattgatgccagccagctgctggatgatggaaatggagaaaattatgtggactatgcagatggcatggaggagatcttcggcagcctgaacagcctgaagctggagattgagcagatgaagaggcccctgggcacccagcagaacccagcccggacctgcaaggacctgcagctgtgccacccagacttcccagatggagagtactgggtggaccccaaccagggctgcagccgggacagcttcaaggtgtactgcaacttcaccgctgggggcagcacctgtgtgtttcctgacaagaagtctgagggcgcccgcatcacctcctggcccaaggagaaccctggctcctggttcagcgagttcaagaggggcaagctgctgtcctatgtggatgctgagggcaaccctgtgggcgtggtgcagatgaccttcctgcggctgctgagcgccagcgcccaccagaatgtgacctaccactgctaccagagcgtggcctggcaggatgctgccaccggcagctatgacaaggccctgcgcttcctgggcagcaatgatgaggagatgtcctatgacaacaacccctacatccgggccctggtggatggctgtgccaccaagaagggctaccagaagacagtgctggagattgacacccccaaggtggagcaggtgcccatcgtggacatcatgtttaatgactttggagaggccagccagaagtttggatttgaggtgggccctgcctgcttcatgggctag

SEQ ID NO: 1407 - DNA, 8468 bp, Artificial Sequence
  derived and/or modified sequence
ggaaaaaagtgctccgcgccgaaggcgaggtccgcactctccgtccccgcggctggcgcaggacctcactcgagcggagcgcccacggggagcgggtcgcggggcggcggcggcgaggaggaggcgagaaggagttggaggaggaggaggaggaggcgagggcgagctagcccagcggggtcccggccgccccgcgggccaaagtcgagccctcccgcccgtgggcgagcgcgccagccgccccttccagaacagccgccgccacaaagaagaacggggggtgccgaggtccccatgacctcctaaagtggtgcggtccctgctgagtgcgctgcccgggccgtgacccgcgcccctgtgcgtccccgcgcgcctccgagcgcccctgtgcgccccggcccgcgccccgccggcatggacgtccatacccgctggaaagcgcgcagcgcgctccgcccgggcgccccgctgctgcccccgctgctgctgctgctgctgtgggcgccgcctccgagccgcgcagctcagccagcagatctcctgaaggttctagattttcacaacttgcctgatggaataacaaagacaacaggcttttgcgccacgcggcgatcttccaaaggcccggatgtcgcttacagagtcaccaaagacgcgcagctcagcgcacccaccaagcagctgtaccctgcgtctgcatttcccgaggacttctccatcctaacaactgtgaaagccaagaaaggcagccaggccttcctggtctccatctacaacgagcagggtatccagcagattgggctggagctgggccgctctcccgtcttcctctacgaggaccacacggggaagcctggcccggaagactaccccctcttccggggcatcaacctgtcagatggcaagtggcacagaattgctctcagcgtccacaagaaaaatgtcaccttgatcctcgactgtaaaaagaagaccaccaaattcctcgaccgcagcgaccaccccatgatcgacatcaatggcatcatcgtgtttggcacccggatcctggatgaggaggtgtttgagggtgacatccagcagctgctctttgtctcggaccaccgggcagcttatgattactgtgagcactacagccctgactgtgacaccgcagtacctgacaccccacagtcgcaggaccccaatccagatgaatattacacggaaggagacggcgagggtgagacctattactacgaatacccctactacgaagaccccgaagacctagggaaggagcccacccccagcaagaagcccgtggaagctgccaaagaaaccacagaggtccccgaggagctgaccccgacccccacggaagctgctcccatgcctgaaaccagtgaaggggctgggaaggaagaggacgtcggcatcggggactatgactacgtgcccagtgaggactactacacgccctcaccgtatgatgacctcacctatggcgagggggaggagaaccccgaccagcccacagacccaggcgctggggccgaaattcccaccagcaccgccgacacctccaactcctccaatccagctccgcctccaggggaaggtgcggatgacttggagggggagttcactgaggaaacgatccggaaccttgacgagaactactacgacccctactacgaccccaccagctccccgtcggagatcgggccgggaatgccggcgaaccaggataccatctatgaagggattggaggacctcggggcgagaaaggccaaaagggagaaccagcgattatcgagccgggcatgctcatcgagggcccgcctggcccagaaggccccgcgggtcttcccggacctccaggaaccatgggtcccactggccaagtcggggaccctggagaaaggggcccccctggacgcccaggccttcctggggccgatggcctgcccggtcctccaggaaccatgctcatgctgcccttccggtttggaggtggcggcgatgcgggctccaaaggccccatggtctcagcccaggagtcccaggcgcaagccattctccagcaggccaggttggcactgaggggaccagctggcccgatgggtctcacagggagacctggccctgtgggtccccctgggagcggaggtttgaagggcgagccgggagacgtggggcctcagggtcctcgaggtgtgcaaggcccgcctggtccggccgggaagcccggaagacggggtcgggctgggagtgatggagccagaggaatgcctggacaaactggccccaagggtgaccggggtttcgacggcctggctgggttgccaggcgagaagggccacaggggtgaccctggtccttccggcccaccaggacctccgggagacgatggagaaaggggtgacgacggagaagttgggcccagggggctgcctggggagcccgggccacgtggtctgcttgggccgaaggggcccccaggtcctcccggacctcccggtgtcacgggtatggacggccagccggggccaaaaggaaatgtgggtccccagggagagcctggccccccaggacagcagggtaatccaggcgcccagggtcttccaggcccccagggtgcaattggtcctccaggagaaaagggtcccttggggaaaccaggccttccaggaatgcccggtgctgacggacccccgggacaccctggcaaagaaggccctccaggagagaaaggaggtcagggtccacctggcccccagggtccgattggctacccaggtcctcgaggagtcaagggggccgatggcatccgtggtctgaagggcacaaagggcgagaagggtgaagacggctttcctgggtttaaaggagacatgggcatcaagggtgatcggggggagatcggcccacccggtcccaggggagaagatggccctgaaggcccaaagggtcgcggaggtcccaatggtgaccccggtcctctgggaccccctggggagaagggaaaactcggagtcccagggttaccagggtatccaggaagacaaggaccaaagggctctattggattccctggatttcctggcgccaatggagagaagggcggcagggggacccctggaaagccaggaccgcgggggcagcgaggcccaacgggtccgaggggtgaaagaggcccccggggcatcactgggaagcctggccccaagggcaactccggaggtgacggcccagctggccctcctggtgaacggggacccaatggaccccaaggacccacaggatttcctggaccaaagggcccccctggccctccaggcaaggatggactcccaggacaccctggacagagaggcgagactggtttccaaggcaagaccggccctccaggcccccccggcgtggtcggccctcagggtcccacgggagaaacgggcccaatgggtgagcgtggccaccctgggccccctggaccccccggtgaacaggggcttccgggccttgctggaaaagaagggacgaagggtgacccaggccctgcaggcctccctgggaaagatggccctccaggattacgtggtttccctggggaccgagggcttcctggtccagtgggagctcttggactgaaaggcaatgaagggccccctggcccaccaggccctgcgggatctccaggggagagaggtccagctggagccgctgggcccatcggaattccagggagacctgggccccagggacccccagggccggcaggagagaaaggggctcctggcgagaaaggcccacaaggcccagctggccgagacggtctccaggggcctgtggggctcccgggtccagctggccctgtgggtccccctggagaagacggagataagggagagatcggggagccggggcagaaaggaagcaagggggacaaaggagaacagggtcctcctgggcctacaggtcctcaaggccccatcggacagccaggcccctctggagctgacggcgagccggggcctcggggccagcagggccttttcgggcagaaaggtgatgaaggtcccagaggctttcctggaccccctgggccagtggggctgcagggtttgccaggacctccaggcgagaagggtgagacaggagacgtgggccagatgggccccccgggtccccctggcccccgaggaccctccggagctccaggtgctgatggcccacaaggtcccccaggtggaataggaaaccctggtgcagtgggagagaagggcgagcctggcgaagcaggtgagcctggccttccgggagaaggcggccccccgggacccaaaggagaaaggggagagaagggcgagtcaggcccttcaggtgctgccggaccccctggacccaaaggccctcccggagatgatggtcccaaaggcagccctggcccagtgggttttcctggagatcctggcccccccggagagcctggccccgcgggtcaagatggtccccctggtgacaaaggagatgatggtgaacccgggcagacgggatcccccggccctactggtgaaccaggtccatcggggcctccaggaaaaaggggtcccccaggccccgcaggccccgaaggcagacagggagagaaaggggccaagggagaagccggcttggaaggccctcctgggaagactggccccatcggcccccagggggcccctgggaagcccggaccggatggccttcgagggatccctggccctgtgggagaacaaggtctcccaggatccccaggcccggacggtccccccggccccatgggtcccccaggacttcccggcctcaaaggagattctggtcccaaaggtgaaaagggtcatccaggcctgatcgggctcatcggtcctccgggtgaacagggtgagaagggcgaccgtggtctccctggcccccagggctcctccggtcctaagggagaacagggtatcactggtccttctggcccgattgggcctcctgggccccctggcctgccgggtccgcctggtccaaaaggtgctaagggctcctcgggtccaactggcccgaagggtgaggcaggccacccaggacccccaggccccccgggccccccgggagaggtcatccagcccctgccaatccaggcatccaggacgcggcggaacatcgacgccagccagctgctggacgacgggaatggcgagaactacgtggactacgcggacggcatggaagagatcttcggctctctcaactctctgaagctggagattgagcagatgaaacggcccctgggcacgcagcagaaccccgcccgcacctgcaaggacctgcagctctgccaccccgacttcccagatggtgaatactgggtcgatcctaaccaaggatgctccagggattccttcaaggtttactgcaacttcacagccggggggtcgacatgcgtcttccctgacaagaagtccgaaggggccagaatcacttcttggcccaaagaaaacccgggctcctggttcagtgaattcaagcgtgggaaactgctctcctatgtggacgccgagggcaaccctgtgggtgtggtacagatgaccttcctgcggctgctgagcgcctctgcccaccagaacgtcacctaccactgctaccagtcagtggcctggcaggacgcagccacgggcagctacgacaaggccctccgcttcctgggctccaacgacgaggagatgtcctatgacaacaacccctacatccgcgccctggtggacggctgtgctaccaagaaaggctaccagaagacggttctggagatcgacacccccaaagtggagcaggtgcccatcgtggacatcatgttcaatgacttcggtgaagcgtcacagaaatttggatttgaagtggggccggcttgcttcatgggctaggagccgccgagcccgggctcccgagagcaacctcgtgacctcagcatgccattcgttcgtgagtgtcccgtgcacgtcctgaccctggacagtgaaggcttctccctcccctcccacctgacttcatctacgcctcggcaccacggggtgtgggaccccagcccggagagaacagagggaaggagccgcgcccccacctggagctgaatcacatgacctagctgcaccccagcgcctgggcccgccccacgctctgtccacacccacgcgccccgggagcggggccatgcctccagccccccagctcgcccgacccatcctgttcgtgaataggtctcaggggttgggggagggactgccagatttggacactatatttttttctaaattcaacttgaagatgtgtatttcccctgaccttcaaaaaatgttccaaggtaagcctcgtaaaggtcatcccaccatcaccaaagcctccgtttttaacaacctccaacacgatccatttagaggccaaatgtcattctgcaggtgccttcccgatggattaaaggtgcttatgtttttgtgagttttaagtaaatatttgtattgtattgttataaatgttaagtgtgcctggctttcaatcatgcacggaaacccagtctcagtcccacggacagaatgggcgaggcatggattctgggttgcagtaccgttctgattagaaataggaagtctccccacccccgccctggccaagaacgtgcaataaattggaagtttgccccggggcagcaagaatttatgctgccattgaaaagcaggtaccagtgccccttttcagacagtttttgattcgctctagactttttttttttttaatagggaaaaaatttgataattttcttttttctacatgcacttaagactaaaacacaggtttggattaattttatttgcttcctttttccgcttttcttcccgcagagcctgatgggagaatgtccagggcagggaaaccacattttttgtaggtgataactcaatgaaaattggtgcttattttttacacttctctcttgtggctctcttgtggtgctatctatctgttttaaggtctccttgaaggcgcactggggaccctggccatgcctcgttctccctgctttctttatcctgttattgcctccacagtctgttgccaaggactctaagatcaatgcacgtcactttcctttccactgggcaggatagccaagcacactccctcctgcgctctcccgccccggtgcgtccactcccgagggctgttatgaggactgggttgtgcctacttgatttgaaaacacacacaagcaataaaaagcctcttcctgcattgtctgtggtgtgaccatagcagattatatttggttcctgaatgtttgtggtgctaatttctgtgtttgttccaagccgttcagtcatgccatgcgctgcctcggtagatggagtaatgtacaatgaactccatgagtctctccagggctgcctgcagcacgtcttttccaagtagcctatttggattcccatctcaaatgtcctggatgcgagcgtcagcggctccagagctcggggcgggtgaggtcccctttggggaaccctttcctggccatcgaggtcggggggctgccgtctgtgggcaggaggacccgaggggcagccaggaaaggcgatctcttcactgtgaaaagttgcccgggtgcagcgccttttccttctaccatgggaaatgcaggctgggcccttggggtgagcctgcggggctctggtgctgtccccgacccccaccaccaccagaatgcagttccagcttaggaagccacaaacaagccacccaggaggaacaaaacaccgccagcgtggattttccaaatttccctggaaagtaagtctcgctcttgccaaagaaaagtctggcttggagagtctctggagcccaggatgccagcatgtgccaatgactgtcaccttcatctcttcaaaagaaaagccatagccgaggactgtcccgcgacccccgtggactgcgtctaggtcatgtgattctgttttcatttctcatcccatccaatttgtccttttctcctgtcattttcttcctctgtggtcccttcaaagttgttataatttgtactgaacttcaaaatgtgtcccgttctccccagaccactctagccacagtatattgcaataaaattacttcttatatttgcagaaattcttttggtgtaattttattttttcctctcaatatatataattggacaaacgctggcaaaaagaaaaaaatggtaagcaaaaaacccaagataaagtttcgaggacatcaggccttttgaaatacaatgtcaaatgacacattgtacggtttcaaaaaatccgctagacatgtcataagttttaactgtaatgcccaggaaaggatatcttaaaatattctaaacttgtgtaacaaaggaataattaactgtaatagtttttcaataaatcgagttgggtgtttccaccgt

SEQ ID NO: 1408 - DNA, 5517 bp, Artificial Sequence
  derived and/or modified sequence
atggacgtgcacacccggtggaaggcccggagcgccctgcggcccggcgcccccctcctgcccccgctgcttctactcttgctgtgggccccgccaccatctcgcgccgctcagcccgctgacctactgaaagtgcttgattttcataacttgccggatggtatcacaaagacaactggcttctgcgccacgcgaagatcttcaaagggccctgatgtcgcctaccgcgtgacgaaggatgcccagctgtctgctcctacaaagcaactgtacccagccagcgccttccctgaggacttctcaatattgaccaccgtgaaggccaaaaaaggctctcaggcctttctcgtgtcaatttacaatgaacaaggtattcagcagataggcctggaactcggacgttctccagtcttcctctatgaggatcacaccggcaagcctggccctgaagactatccgttattccgcggtattaacctgtccgacggtaaatggcataggatcgccctgtctgtgcataagaaaaatgtgacactgatactagactgcaagaagaagacaactaaattcttagaccgctccgaccaccctatgatcgacatcaatgggatcatcgtgttcggaactcgcatcctcgacgaggaggtctttgaaggggacattcagcagcttttgtttgtgtctgaccatagggctgcatacgactattgcgaacactattccccggattgcgatactgcagtgcccgatacacctcagagccaagacccaaatcccgatgagtactataccgagggtgacggtgagggagagacttattattacgagtacccctactacgaggacccggaggacctgggcaaggagcctacccctagcaaaaagcctgtggaagccgccaaagaaacaaccgaggtcccagaggagctgaccccgacccccacagaggcagctccaatgcctgaaacttccgagggcgctgggaaggaagaggatgtaggcattggagactacgattatgttccgagcgaagactattacacaccaagcccttacgatgaccttacatacggtgaaggtgaggagaaccctgaccagcctactgatcctggagccggcgctgaaattcctacctccactgccgacacatcaaacagcagtaatcctgctccccctccgggagaaggagcagatgaccttgagggggaattcacagaagagaccattcggaacctcgacgagaactactatgatccatactatgatcctacctcatcccccagtgagatcggtcctggcatgcccgccaaccaagacacaatttatgaaggaattggcgggcctcgcggggaaaaaggacagaagggcgaaccagcgattattgaaccagggatgctgatagagggcccccccggaccagagggaccagcgggattgcccgggcccccgggaaccatgggtccaaccgggcaggtcggagaccctggtgagcggggtccgcccgggcgaccgggactacccggggccgacgggttgccaggtccaccagggactatgctgatgctcccttttaggtttggggggggtggcgacgctggcagtaagggacccatggtatctgcacaggagagccaggcccaggccatcttgcagcaagcaaggctcgccctgagggggccagcaggccctatgggtctcacaggccgacctggacctgtcggtccaccagggtccggcggcctgaaaggggaaccaggcgatgtgggcccccaaggtcctaggggagtccaagggccccctggcccagccggaaaacctgggcggcgaggcagagctggatccgatggtgcccgcgggatgccaggccagaccggaccaaagggagaccgcggcttcgatggattagcaggcctaccaggagagaaaggacataggggagatccagggccatctggacctcctggtcctcctggcgacgacggtgagcgtggcgatgacggggaggttggcccaagggggttgcccggagaacccgggccccggggactattgggacccaagggcccccctggcccccccggaccacctggcgtgacggggatggacgggcagccgggccctaaaggaaatgtgggaccccagggcgagccaggcccacctggccagcagggaaaccctggggcgcaagggttaccaggaccccagggagcgatagggccacccggggaaaaggggcccctcggaaaacctgggcttcccgggatgccaggcgccgatggcccacctggccaccccggcaaggaaggaccacctggagaaaagggaggacaagggcccccgggcccccagggacccatcggatacccggggccaagaggagttaagggagcagatgggatcagaggcttaaagggcacaaagggagaaaaaggcgaagatggttttccagggtttaaaggggatatgggcattaaaggcgatcgcggagaaatcgggcccccagggcccagaggggaggatgggcctgaggggcctaagggcagaggtggcccaaatggggacccgggccctctgggtccgcccggcgagaaggggaagctgggcgtgccgggacttcctggctatcccggcaggcagggacccaagggcagcattggctttcctggcttccctggcgcaaatggcgagaagggaggaagggggactcccggaaagcccggacctagagggcaacggggaccaactggtccaaggggagagaggggcccccgtggcatcacaggcaaacccgggcctaaaggcaattccgggggcgatgggcctgccggcccacccggcgaaaggggccccaacggaccccagggacctacgggctttcctggacctaaggggcctcccgggccgcctgggaaagacgggctgcctggacatcctgggcagcggggcgagactggttttcagggaaagacgggccctccagggcctccaggagtggtgggcccacaaggccctacaggcgagacagggccaatgggtgaacgggggcatcctgggccccccggtccccctggcgagcagggacttccaggacttgccggaaaggagggtaccaagggggatcccggcccagcagggctgcccgggaaagacgggccccctggattgaggggcttccccggagaccgagggctgccagggcccgtcggagccctgggtctgaagggaaacgaaggaccccctgggcctccaggcccggctggaagtcctggggaaagaggtcctgccggagcggccgggccgatcgggattcccggccggccaggcccccagggccctccaggtcccgccggtgaaaagggggcccctggagaaaagggaccgcaggggccagccggaagggacggactgcaaggtcctgtaggtctacccgggccagccggacctgtaggtccgccgggcgaagatggggacaagggcgaaatcggggaacctgggcaaaaaggctccaagggcgacaagggcgagcaaggccctcctggaccaacaggccctcagggccctataggacagcccggaccaagtggcgcagacggagaacccggtcctcgggggcaacagggcctttttgggcagaagggggatgagggccctcggggattccccgggcctcctgggcccgtgggtctgcagggtttaccggggcctccgggtgaaaagggtgaaaccggagatgtgggacaaatgggccccccgggccctccaggtccccgcggtccgtctggggcccctggggcagacggtccccagggacccccgggaggaatcgggaatcctggcgccgtgggcgaaaagggggagcctggagaggccggcgaacccggcctgccaggagagggtggcccacccggcccaaaaggcgagcgcggagagaaaggagagagcgggccgtctggcgcagccggaccccccggccctaaggggcctcccggcgacgatggccccaaaggtagcccagggcctgtgggatttcctggtgacccaggccctccgggtgaaccaggtccagctgggcaagatggaccaccaggcgacaagggggatgacggcgaacccggccagaccgggagtcccggacccacaggagaaccgggaccatcaggccctccaggcaagcgcggaccccctgggcctgccggtcctgagggcaggcagggagagaagggcgccaagggcgaagctgggctcgaaggcccgcccgggaagactggtcccatcgggccccagggagcccccggcaagcctggccctgacggactccgcgggatccccggccccgttggggagcagggacttcccgggtctcctggccccgatggccctcccggaccaatggggccacctggcttgcctggcctaaaaggagattccggccctaaaggcgaaaaggggcacccgggattaatcgggctcatcggccctcctggagagcagggcgagaagggggatcgaggcctcccaggaccccaagggtcatccgggcccaaaggggagcaaggtatcactggcccctccggcccaatcggaccccctggccctcctggtctgcctggtcctccgggacccaaaggtgccaaaggcagttccggcccaaccggacctaagggggaggccgggcatcctggaccacccggacctcccggtcctcccggggaagtaattcagcccttacctattcaagcctcccgaactaggaggaacatcgacgctagccagttactagacgacggaaatggagagaattatgttgactacgctgacggcatggaggaaatcttcggctctctcaacagcttgaagctggagattgagcagatgaaaagaccactgggcacacagcaaaacccagctaggacttgtaaagatttgcagctgtgccaccccgactttccggacggggaatattgggtggatcccaatcaggggtgtagtagggatagcttcaaggtgtattgcaactttacggccggcggcagcacttgcgtctttcccgacaaaaagtcagagggcgcacggattacttcctggccgaaggagaaccctggtagctggttctccgagttcaaacgcggaaagctcctctcgtacgtcgatgccgagggaaatcccgtgggtgtggtgcagatgaccttcctacggctcttatccgcttccgctcaccagaacgttacctaccattgctatcagagtgtggcttggcaggacgccgccacaggttcttatgacaaagctttgaggtttctgggctcaaatgatgaggagatgtcttatgataataacccttatattcgtgccctggtggatggctgcgcaacaaaaaaaggctaccagaagaccgtcttagaaatagacaccccgaaagtggagcaagtgcctatcgtcgatataatgtttaacgacttcggggaagctagtcagaagtttgggttcgaggtcgggcccgcctgcttcatgggttag

SEQ ID NO: 1409 - DNA, 5517 bp, Artificial Sequence
  derived and/or modified sequence
atggatgtccatacccgctggaaggcgagatccgctcttaggcctggagcgccacttctgccaccattgctgctactgctattgtgggctccgcctcctagcagagctgcccaacctgcagaccttctgaaggtgttggactttcacaatctccccgatgggattacaaaaactacaggattttgtgcgacacgtcggagctccaagggtccagacgtggcctaccgagtgactaaggacgcacagttgagcgcacccacgaaacaactctacccggcatcagcgtttcctgaggatttctctatcctgacaaccgtcaaggctaagaagggatcccaagccttcctggtatcaatatataatgagcagggtatccaacagataggtctggagctcgggaggagccctgtttttctgtatgaagaccatactggaaaaccaggcccagaagactatccccttttccggggtatcaatttgtctgacggcaagtggcaccgcattgcgctcagcgtgcataaaaaaaacgtgacattgatcctagattgtaaaaagaaaacgaccaaattcttggatcggtcggatcacccaatgatcgacatcaacggcattattgtgtttggtacccgtattctggatgaggaggttttcgaaggtgacatccagcagctcctatttgtatcggatcacagggcagcttatgactattgcgaacactattcacccgactgtgacacagcggtcccggacactccccagagccaagaccccaatcccgacgagtattacactgaaggcgacggcgaaggagaaacttactactacgagtatccttattacgaagacccagaggatttagggaaagaacccacaccctccaagaagcccgtcgaggccgcaaaggagaccacggaggtgcctgaggaattgacccccacacccactgaggcggctcctatgcccgaaactagcgagggtgcaggaaaggaggaagacgtggggataggtgactacgactacgtcccctctgaagattactacaccccatccccctacgatgacctgacttatggagagggtgaggagaaccccgatcagccaacagatccaggggctggagcagagatccccaccagcacagccgacacatccaacagcagcaatccggctcctccgccaggcgagggggctgatgatcttgaaggcgagttcaccgaggaaacaatcaggaatctcgacgagaactactacgatccttattatgaccccacatccagcccgagcgaaattggccctggaatgcccgctaatcaagacaccatctatgaggggattgggggtcccagaggcgaaaagggccaaaagggtgagccagcaataatcgaacctgggatgctgatagagggtcctcccggaccggaaggacctgcgggtcttccaggcccacctggtaccatgggaccaactggccaggtgggggaccccggagaacgcggaccccctggccgtcctgggttgcctggcgcagatggccttcctggcccaccaggcaccatgctgatgctgccattcagattcggaggcggtggcgacgcaggatcaaaaggcccaatggtgtcagcccaggagtcacaggctcaagccatcctgcagcaagcaagacttgccttgcggggacccgcaggacctatgggattgaccggacgaccagggcctgtggggccaccaggctcggggggtttgaagggagaacctggggacgttggaccgcagggcccacgaggtgtgcagggacctccaggtccagccggaaagccaggaagaagaggtcgggcaggttctgacggagcgaggggcatgcccggacaaactggacctaagggcgatcggggatttgatggactggccggtctgcctggtgagaagggtcacagaggagatcctggtccctctggtccccctggaccacctggagatgatggcgagcgcggagacgacggcgaggtgggccctaggggccttcctggcgagccaggcccaagaggtttactggggcctaagggaccccctgggccaccgggtcctcctggagttacaggaatggacgggcaacctggtcctaaggggaacgtgggaccccagggggagcctggaccacctggacagcaggggaatcctggagcccaggggctgccaggtccacagggagccatcggcccacccggagaaaagggaccgttagggaaacccggactgcccggaatgccgggtgcagacggccctcccggacacccgggtaaagaaggacccccaggagaaaaggggggtcaaggaccccctgggcctcagggacccatcggatatcctggaccaagaggcgtcaagggcgcagatggtattaggggtctgaaggggactaaaggagagaaaggcgaagatgggttccctgggttcaaaggggacatgggtataaaaggagaccgtggcgaaatcgggccacccggaccacggggagaggacggaccagaggggccaaagggtcgaggagggccaaacggcgatcctggtccactgggaccccctggcgagaagggaaagctgggagttcccggattgcccggatatccgggaaggcagggcccaaagggcagcataggcttcccaggatttccaggagccaacggtgagaagggcggtcgtggaaccccaggaaaacccggaccccgtggccaacgaggaccgaccgggccacgaggggagcgagggcctcgcggaatcactggtaagcccggtcctaagggcaattcggggggtgacggccctgccggaccgccaggggagagaggcccaaatggaccccaaggccctaccggctttcctggccctaaaggccctcccggtcctccaggcaaagatgggttgccgggtcaccctggccaacgtggagaaaccggctttcagggaaagaccggaccaccagggccacccggtgtggtggggccacagggacctaccggcgagacaggtccgatgggcgagcgaggccatccagggccacccggtccacctggggaacagggcctgcctgggttggccggaaaagagggaacaaaaggagacccagggccagctggcttacccggtaaggatggccctcctgggctgagaggtttcccgggtgaccgtgggctgcctggacctgtcggggctttgggcctcaagggcaacgaaggccctccaggaccccctggcccagcgggttcaccaggggaacgcggacccgcaggggctgcaggccctatcggcatcccaggtagacctggacctcaaggacccccaggaccggcaggggaaaagggcgctcctggcgagaaaggcccacagggaccagctgggcgtgatgggctccaggggcctgtcggacttcccggtccggcaggcccagttggaccccctggcgaagatggagacaagggagaaataggagaaccaggacagaaaggctcaaaaggggacaaaggtgagcagggtcctcccggacctacgggcccacaggggcctattggccagccaggtccatccggggctgatggagagccaggccctcgtggacagcaggggctgtttgggcaaaagggcgacgagggacccagagggtttccgggtccgccaggtccagtcggtctacaaggactcccaggcccacctggcgaaaaaggggaaactggagatgtaggacagatgggcccacctgggcctcccggacccaggggtccatctggcgctccaggcgctgacgggcctcaggggccacccggtggcattggcaatcccggagctgtcggagaaaaaggcgagccgggagaagccggtgagccagggctccccggtgaagggggtcctccaggcccaaagggcgagcggggtgagaaaggggagtccggaccttcgggcgctgctgggccaccaggacctaaggggcctccgggtgatgatggaccaaagggaagtccaggtcccgtgggtttcccaggagaccctggtccacccggtgaacccggaccagcaggacaagacggaccgcctggtgataagggggacgatggcgaacctgggcagactggatcaccaggtcccaccggagagcctgggccttctggaccgcctgggaaaaggggcccacccggtccagctgggccagaaggcaggcagggggagaaaggtgccaaaggcgaagcaggattggaaggacccccaggcaagaccggaccgatcgggcctcagggagccccaggtaagcccggacctgatggcttgaggggaatcccgggacccgtgggagagcagggcctgcctggaagccctggccctgatgggccacctggccctatgggaccccctgggcttcccggtttgaaaggggactcaggacccaagggtgagaaagggcaccccggtttgatcggactgatcggccctccaggagaacaaggagagaagggggaccgcggtctgccaggtccccaagggtcttcggggccaaagggcgagcagggcattaccggaccttctggccctattggacccccaggtccgcctggcctgccaggacccccaggccctaagggtgctaagggctcatcaggacctaccggccctaagggcgaagccggtcacccagggccacctggcccaccaggaccccctggggaggtgatccaacccttacctatccaggctagcaggactcggaggaacatagacgccagtcaattgctggacgatgggaacggagagaattatgttgactatgccgatggtatggaagaaattttcggatctctaaacagcttgaaattggagattgaacagatgaagagaccgttaggaacccaacaaaatcccgctagaacatgcaaagacctgcagctgtgccatccagacttcccggacggggagtattgggtcgatcccaaccagggatgctctagagacagctttaaagtatattgcaattttactgcgggtggttctacctgtgtgtttcctgacaaaaagagcgagggagcgagaataacatcctggcccaaagagaacccagggagctggttctccgagttcaagcgtggaaaattactcagttacgtagacgccgagggcaatcctgttggggttgtgcaaatgacctttctgcgtttactgtccgccagcgcacaccaaaacgtgacctaccattgctaccagtctgtggcttggcaggatgcagccaccggatcatatgataaggctcttcgatttctcgggtctaacgacgaggaaatgagctatgataataatccctacattcgcgcactggtcgatgggtgtgccacaaagaagggctaccagaaaaccgtgctggaaatcgatacaccaaaggtcgaacaggtcccgatcgtggatatcatgttcaacgactttggagaggcctcccagaagttcggattcgaggttgggcctgcctgctttatgggctac

SEQ ID NO: 1410 - DNA, 5517 bp, Artificial Sequence
  derived and/or modified sequence
atggacgtgcatacgcggtggaaagcccggagcgccttgagaccaggggctcctttgttgccgccactcctgctgcttcttctgtgggctccacctcctagtcgcgccgcacagcccgcagacctgctcaaagtcttggattttcacaacctccccgatggaatcacgaaaactacagggttttgtgcaacccgacgtagcagtaagggccccgacgtcgcctatcgggttacaaaagatgctcagctatccgcccccaccaaacagctctaccccgccagtgcgttccctgaagacttctcaatcctgaccacggtaaaagcaaaaaaggggagccaggcctttctggtctctatttataatgagcagggtattcagcaaataggattggagttggggagatcccctgtcttcttatacgaagaccatacaggcaaacccggccccgaggattacccgctcttcagaggcatcaatttatccgatggaaaatggcaccgcatcgccctgtctgtccataagaaaaacgtgaccctcattctcgactgtaagaaaaagactactaaattcctcgaccggagcgaccacccaatgatagatattaatggtataatcgtgttcggtacccgcatcctggatgaggaggtgttcgagggggacatccaacagctgctcttcgttagtgatcaccgggccgcatacgattattgcgaacactattcgcccgactgtgatacagccgtccctgacactccccaatcccaagaccctaaccccgatgaatattatacggagggtgacggtgagggtgaaacatactactatgagtacccatactacgaagacccagaggatcttggcaaggagccaacaccgtctaaaaaaccagtcgaagccgccaaagagaccacagaggtcccagaggaacttacacctacccctaccgaagccgcccccatgcccgaaaccagtgagggtgctgggaaagaagaggacgttggaatcggagattacgactatgtccccagcgaagactactatacccccagcccttacgacgacctcacttacggagaaggagaagagaatcctgatcaacccacagaccccggagctggagccgaaatccccacttccacagctgacacttctaattctagtaacccagcacctcctcccggagaaggggccgatgaccttgagggcgagttcacggaagagaccattcggaatttggacgaaaactactacgacccttactacgatcccaccagctctccttctgaaattgggcctggcatgccagccaatcaagacaccatatacgaggggattggagggccgcgtggggagaaaggacaaaaaggggaacctgcgattattgagcccggaatgctgatcgagggccccccaggaccagaaggacccgcagggctccctggcccacccggtaccatggggcccacaggtcaggtgggcgatcctggggagcgcggcccaccaggtaggcctggcctcccgggagctgacggcctgccgggccccccaggcacgatgctcatgctgcctttccggttcggggggggaggggatgctggctccaaaggtcctatggtaagtgcccaggaatctcaggcgcaagctatcctccagcaggccagattagccttgcggggccccgcaggacccatggggctaacaggcaggcccggccccgtcggccccccaggatcaggtgggttgaaaggtgagcccggggatgtggggccacagggccctcgaggagtccaggggcctcccggtccagccggtaaaccaggcagacggggaagggccggttccgatggtgcacgcgggatgcccggccaaacagggccgaaaggagaccggggatttgatggtctggcaggcctcccgggcgaaaagggccaccggggggaccccggcccatcaggccctccgggcccacctggggatgatggtgagcgtggggatgatggggaagttggtccaagaggcttgcctggagaacccggacccagagggttactggggcccaaagggccccctggtcctcctggtccacctggggtaactggcatggacggccagccgggacctaagggaaatgtaggaccacagggagagccaggccctccaggacaacagggtaatcctggggcgcaagggctgcctggtccacagggcgccattggaccgccaggggaaaagggccctttgggcaaaccgggactacccggaatgccaggagcagacggtcctcccggacatcctggcaaggaggggccaccaggcgaaaagggcggccaggggcctcccggaccccagggccccattggatatcccggccctcgtggggttaagggggccgacggcatccggggcttgaaaggtactaagggggagaaaggagaggatggctttcctggatttaaaggcgatatgggcatcaagggggacaggggcgagatcggaccacctgggccaaggggtgaggacggccccgagggacctaaaggacgaggcggcccaaacggtgacccaggtccattggggcccccaggcgagaaggggaaactgggggtccccgggctgccagggtaccctggccgacaggggcctaagggcagcattgggttcccagggttccctggagccaacggggagaaaggagggaggggcactcccggcaaaccagggccaagaggacaacgggggcctaccgggcctcgtggagaaagaggaccccgcggcataacaggaaagccaggaccaaaagggaacagcggaggggatggccccgctggacctcccggcgagcgcggtccgaacggccctcagggtcctaccggttttcccggaccgaagggaccgccgggcccccccggtaaagacggactgccaggacacccaggacagcgaggtgaaacaggcttccaaggcaagaccgggccgccaggaccgcccggagtagtcgggccccagggccctacaggggaaacgggtcccatgggggaaaggggacatcctggaccccccggacctcctggggagcagggactacctggactggctgggaaggagggaactaagggagatccgggacccgcaggactgcctggcaaggacgggccgcccgggctgagaggatttcccggagatcgcgggttgcccggacctgtcggcgcgctgggccttaaggggaatgaaggcccccccggccctcccggccccgccggatcacccggggaacgcgggccagcaggtgccgccgggcctataggcatcccgggccggcctggaccccagggtccccccgggccagcgggcgaaaaaggagcaccaggagagaaggggccgcagggacctgccggccgcgatggccttcagggaccggtgggtctcccgggccccgccgggcctgtgggaccacccggggaggacggtgataaaggcgaaatcggggagcccggccagaaaggaagcaaaggcgataaaggggaacagggcccacctgggcccacagggccacaaggacctatcggccagcctggcccgagcggggcagacggagagccaggcccccggggccagcaggggctcttcggccagaagggagacgaggggcctagaggcttccccgggccccctggacccgtgggacttcaaggacttcctggaccccccggggaaaaaggggagactggtgacgttggacagatgggacctccggggcctcccggaccgcgcgggccatccggcgcaccgggggcggatggaccacagggaccccccggtgggataggcaaccccggtgcagtcggcgagaagggtgaaccaggtgaagcaggcgaacctgggcttccgggcgaaggaggcccccctggcccgaaaggcgaaagaggagaaaagggagaatctggcccctccggtgcagccggaccccccggccctaaaggaccacccggagacgacggccccaagggcagccctgggcccgtgggcttcccgggcgacccaggccctccaggggagcctggaccagccgggcaggacggacctcccggtgataagggtgacgacggggagcctggtcagactggaagccctggacccacaggtgaacccggccccagcggtccccccggtaaaagagggccccccgggccggccggacccgagggaaggcaaggggagaagggtgctaagggtgaagctggcctggaggggccccccgggaaaacgggaccaatcggcccacagggagcacctggcaaacctggaccagacggcctgcgaggcatccccggccctgttggggaacagggactgccaggtagtccgggtccagacgggccacctgggcccatggggccgccgggattgcccggtctcaagggtgattcgggaccaaaaggcgagaagggtcaccccggactgattggcctcatcggccctcccggcgagcaaggagaaaaaggtgatagagggctgcctggtccccagggcagctctggcccaaagggggaacagggaattaccggacctagtggccctattggacctccaggcccaccaggcctccccggtccacctggaccaaagggagccaaaggatcgagcggaccaaccggcccgaagggtgaagccggacatccaggcccacccggccccccgggcccccctggcgaagtcatccagcctctgccaattcaggcttcgcgtacccgccgtaacatcgacgctagtcagctcctggatgacggtaatggagagaattatgtggactacgccgacggaatggaggagatattcgggagcttaaatagtttaaagctcgaaattgagcagatgaagcgcccattgggtacccagcaaaatccagcaagaacatgcaaggatttacagctgtgccatccagattttcccgacggtgaatattgggtggatcccaaccagggatgctcacgggactctttcaaggtatattgtaacttcacagccggcggtagcacatgcgtgttccccgataagaaatctgagggagccagaattaccagctggcccaaggaaaatcccggaagctggttttcagaattcaaaagaggcaagcttttatcttacgtggatgccgagggtaatcccgtcggagtggtgcaaatgacgttcctacggctcctatcggcaagcgcccaccagaacgtgacataccactgctatcaatctgtggcctggcaggatgctgcaaccggctcttatgacaaggctttacggttcctaggcagtaatgacgaagagatgtcttacgataacaacccatacatcagagcactggtggacggctgcgcaaccaagaaggggtatcagaagaccgttttagagatcgacaccccaaaagtcgagcaggtgcctatcgttgacattatgttcaatgactttggtgaagcctcccagaaattcggctttgaggtcggcccagcgtgttttatgggctag

SEQ ID NO: 1411 - DNA, 5517 bp, Artificial Sequence
  derived and/or modified sequence
atggacgtgcatactagatggaaggccaggtccgcactaaggcctggggcccctttgctgccgccactcctgcttttactcctttgggctcccccaccaagtagggcagcacagccagccgacctactgaaagtcctcgatttccacaacctacccgatggcatcaccaagactacaggcttttgtgctacgaggaggtcttcaaagggacctgatgtcgcatatagggtgactaaagatgcccaactctccgcaccaactaaacaactgtaccctgcatctgcctttcctgaggacttttccatcttgaccacagtgaaagctaagaaaggctcccaggcattcttggtctctatatataatgaacagggcattcagcagatcggcctggagctcggacggagtccagtcttcctctatgaagatcataccggcaagcccggacctgaagactatcctctctttcgaggcatcaatttatccgacggaaaatggcatagaatcgcactgagcgtgcacaaaaagaacgtgacactgattctggactgcaagaagaaaactactaaattcctggaccgaagtgaccacccaatgatcgacatcaatggcattattgtgttcggaacacggattttggacgaagaagtttttgagggggatattcaacaactgctgtttgtttccgatcaccgggcggcatatgattattgcgagcattacagccccgactgtgacaccgcggttcccgacacaccccaatcacaggatcccaatccagacgagtactacacggaaggggacggcgagggagaaacttattactacgaatacccttattacgaagacccggaagatctaggcaaagaaccaaccccatcaaaaaaacccgtcgaggcagctaaagagaccacagaggtcccagaggaacttacacctacccctaccgaagccgcccccatgcccgaaaccagtgagggtgctgggaaagaagaggacgttggaatcggagattacgactatgtccccagcgaagactactatacccccagcccttacgacgacctcacttacggagaaggagaagagaatcctgatcaacccacagaccccggagctggagccgaaatccccacttccacagctgacacttctaattctagtaacccagcacctcctcccggagaaggggccgatgaccttgagggcgaattcacggaagagaccatccggaaccttgacgagaattactatgatccatactatgacccaacttcatcacctagcgagatcggcccagggatgcctgcaaaccaggatacaatttacgaagggatcggtggcccccgcggagaaaagggacagaaaggggagcctgctatcattgaaccaggaatgcttatagagggcccgcccggacctgaaggacctgcaggtctccccggtcccccaggcacaatgggtcccacgggccaggtaggagatccaggcgagagagggccgcctggtcgacctggtcttcctggagctgacggtctgcccggcccccctggtacaatgttgatgctgcctttcaggttcggcggaggaggagatgccggcagtaagggcccaatggtatcagcgcaggagagtcaggcccaagcaatactgcagcaggctagactcgcactccgaggcccagcaggtcccatgggattgacagggcgcccaggcccagtgggtccccctggtagtggaggattaaagggcgaacctggtgatgtggggccacaaggacctcggggtgtgcaaggcccccctggaccggctggcaaacccgggagacgcggtagggctgggtcagacggagcacgaggaatgccaggacagacaggacccaaaggcgatcgaggtttcgacgggctcgcaggtctgccaggggagaaagggcatagaggcgatcccggcccgagcggcccaccaggacctcctggggacgatggcgagagaggtgatgatggcgaagtcgggccccggggactgccgggcgaaccaggacctagaggtctgcttggacccaaaggccctcctggtccacctggaccacccggggtgacaggaatggacggccagcctggcccaaaagggaatgttggaccacagggggaaccaggtcctcccgggcaacaaggcaaccccggcgctcagggcctgccagggcctcagggcgcaataggcccccctggagaaaaaggccccctaggaaaacctggcctccctggtatgccaggcgccgacggccccccaggacaccccggaaaagaaggccccccaggtgagaaaggtggacaggggcctcccgggccacagggaccaataggctaccccggaccaaggggcgtgaagggagccgacggaatacgtggtttaaaaggcactaaaggagagaagggcgaagatggattccctggctttaagggcgatatgggcattaaaggggacaggggggaaataggaccgcctggacctagaggcgaggatggacccgaggggcctaagggacgcggtggtcccaacggagatcccggacctctcggccctcctggcgagaaaggaaaactgggcgtgcctggacttcccggataccccggaagacagggacctaaaggatcaatcggcttcccaggttttccaggggcaaatggggagaagggcggacgcggcactcccggcaaaccagggccaagaggacaacgggggcctaccgggcctcgtggagaaagaggaccccgcggcataacaggaaagccaggaccaaaagggaacagcggaggggatggccccgctggacctcccggcgagcgcggtccgaacggccctcagggtcctaccggttttcccggaccgaagggaccgccgggcccccccggtaaagacggactgccaggacacccaggacagcgaggtgaaacaggcttccaaggcaagaccgggccgccaggaccgcccggagtagtcgggccacagggaccgacaggtgagacaggtcctatgggagagagggggcaccccgggcctcctggaccgccaggagagcagggattacccggtttggccggcaaggaaggcacaaaaggggaccctggtccagcaggattgcctggtaaagacggtccccctggcttaagaggcttcccgggcgacaggggactgccgggccccgttggtgctctgggactcaaggggaacgagggtccaccgggtccccctggaccggccggatccccaggcgagcgaggacctgctggcgccgccggaccaatagggattcccggcagacccggaccacagggcccccctggacctgccggcgaaaagggcgctcctggcgagaagggaccacaggggcctgcaggaagggatgggttgcaggggccggtgggtctgcctggcccagccgggcccgttggccccccaggcgaggacggagataagggcgaaatcggagaacccggccaaaaaggctccaagggagataagggtgagcaaggtccgcctgggcctaccgggcctcaggggccaatcggacagcctggaccatctggagcggatggcgaaccagggcccagggggcagcaaggtttgtttggacagaaaggagatgaaggcccacgcggatttcctggacctccgggtcccgttggactgcagggcttgcccggccctcccggcgagaagggtgagaccggggacgtcggccaaatgggcccccctggccctcccggaccacgaggcccttccggggcgccaggcgctgatggccctcaaggaccaccaggcgggattggcaaccccggcgcagttggggaaaagggagaacctggcgaagctggagaacccgggctaccgggcgagggtggcccccccggtcccaagggagaaagaggggagaagggagaatctggtcctagtggtgccgcaggtccccccggtccaaaaggcccgcctggcgacgacggaccaaaaggatctcctggtcctgtgggctttcccggagatccaggcccacccggcgaacccggacccgccgggcaggatggccccccaggtgataaaggcgatgatggagaaccaggacaaaccgggtcaccaggccccactggcgaacctggcccttcagggcctcccggaaaacgtggcccccctggcccagcaggtcctgaagggcggcaaggtgaaaagggagccaagggcgaagcaggcttggagggccctccgggtaaaacaggccctattggccctcagggtgcgcctggaaagcctggccctgatgggctcagaggaattcccggtcccgtaggcgagcagggtttgccagggagtcctggacccgatgggccacccggaccaatgggacctccaggactgcccggactgaagggcgatagtggaccaaagggtgagaagggacatcccgggctgattggcctgatcggacctccaggagagcagggtgagaaaggcgatcgtggcttgccggggcctcaaggatcttccggacccaaaggggagcagggtatcaccggtccaagcggacctatcggacctcccggaccaccaggccttcctggcccacccggaccaaagggtgctaaggggagtagcggacctacaggccccaagggagaagcaggccatcccggcccacctggccctccaggccctcctggcgaggtaatccagccactcccaattcaagcttcgagaacacggcgtaatatagacgcctcccagctgctggatgacggcaatggcgagaactacgtagactatgcggatggcatggaagaaatattcggatcactaaactccctgaaactggagatagaacagatgaaacggcctctcggtactcagcagaatccagcacgcacatgcaaagacctccagctttgccatccagatttcccagatggagagtactgggttgatcctaaccagggctgctcaagggactcttttaaggtgtactgcaatttcactgccgggggttcaacttgtgtgtttcccgacaaaaaaagtgaaggcgccagaattacaagctggccaaaggagaatcctggctcctggttttccgagttcaaaagagggaagctgctctcgtacgtagacgcagaaggcaatccggttggcgttgttcagatgaccttccttcgactcttgtcagccagcgcccaccagaatgtcacttaccactgctaccagtctgttgcctggcaggatgccgccaccgggagttacgataaagccctgcggttcttaggttcaaatgatgaagaaatgtcctatgataacaatccatacataagagcgctcgtcgacggctgtgcaacaaaaaaaggttaccaaaaaaccgtacttgagatcgacacaccaaaggttgaacaagtaccaatcgtggacattatgtttaatgacttcggagaggcgtcacagaaatttggatttgaagtcgggccagcctgtttcatggggtag

SEQ ID NO: 1412 - DNA, 276 bp, Artificial Sequence
  derived and/or modified sequence
atggtgtgctacctgtactgggagaccttccccagcatcagccacctgctgaagatcaccctgagcgccagagactgccacgtgtgcggcctgaacctgttcatcttcatggaccccgtggagaaccaggccctgcaccccgtgatcatggccctgatcctgatgcccagcctgcactgcttcggcaacatcctgatcctgctgttcctgaagagccccgcccagctgttctgcagaatgagcgtggacctggccctgctgttcccccacaagtag

SEQ ID NO: 1413 - DNA, 441 bp, Artificial Sequence
  derived and/or modified sequence
cctggacctccagggcgcccaggtaaacctggctttcccaagccagggggtccgggagggcctgctatcccgggcgcacccggacggcccttcgtccctggaatacctggctggcccggagccccagccgctcccggatttcctatgccgagcgggccgcgaagccctggcggcccgtgggggcccggaggccccattggcccaatcagtcctggcccggggataccgggcgggcccggtggcccccgagggccgggacgccctgccggtccaacctctccatttggcccttacggccctttgagccctgggtttcctggatccccagggacccccggcttccccaccgcggacggaccgggaggacccggcaatccgggctctccctggtcccctggccttccctacccccgcggacccgccggtccaggcggaccgtag

SEQ ID NO: 1414 - RNA, 5517 nt, Artificial Sequence
  derived and/or modified sequence
auggacgugcauacgcgguggaaagcccggagcgccuugagaccaggggcuccuuuguugccgccacuccugcugcuucuucugugggcuccaccuccuagucgcgccgcacagcccgcagaccugcucaaagucuuggauuuucacaaccuccccgauggaaucacgaaaacuacaggguuuugugcaacccgacguagcaguaagggccccgacgucgccuaucggguuacaaaagaugcucagcuauccgcccccaccaaacagcucuaccccgccagugcguucccugaagacuucucaauccugaccacgguaaaagcaaaaaaggggagccaggccuuucuggucucuauuuauaaugagcaggguauucagcaaauaggauuggaguuggggagauccccugucuucuuauacgaagaccauacaggcaaacccggccccgaggauuacccgcucuucagaggcaucaauuuauccgauggaaaauggcaccgcaucgcccugucuguccauaagaaaaacgugacccucauucucgacuguaagaaaaagacuacuaaauuccucgaccggagcgaccacccaaugauagauauuaaugguauaaucguguucgguacccgcauccuggaugaggagguguucgagggggacauccaacagcugcucuucguuagugaucaccgggccgcauacgauuauugcgaacacuauucgcccgacugugauacagccgucccugacacuccccaaucccaagacccuaaccccgaugaauauuauacggagggugacggugagggugaaacauacuacuaugaguacccauacuacgaagacccagaggaucuuggcaaggagccaacaccgucuaaaaaaccagucgaagccgccaaagagaccacagaggucccagaggaacuuacaccuaccccuaccgaagccgcccccaugcccgaaaccagugagggugcugggaaagaagaggacguuggaaucggagauuacgacuauguccccagcgaagacuacuauacccccagcccuuacgacgaccucacuuacggagaaggagaagagaauccugaucaacccacagaccccggagcuggagccgaaauccccacuuccacagcugacacuucuaauucuaguaacccagcaccuccucccggagaaggggccgaugaccuugagggcgaguucacggaagagaccauucggaauuuggacgaaaacuacuacgacccuuacuacgaucccaccagcucuccuucugaaauugggccuggcaugccagccaaucaagacaccauauacgaggggauuggagggccgcguggggagaaaggacaaaaaggggaaccugcgauuauugagcccggaaugcugaucgagggccccccaggaccagaaggacccgcagggcucccuggcccacccgguaccauggggcccacaggucaggugggcgauccuggggagcgcggcccaccagguaggccuggccucccgggagcugacggccugccgggccccccaggcacgaugcucaugcugccuuuccgguucggggggggaggggaugcuggcuccaaagguccuaugguaagugcccaggaaucucaggcgcaagcuauccuccagcaggccagauuagccuugcggggccccgcaggacccauggggcuaacaggcaggcccggccccgucggccccccaggaucagguggguugaaaggugagcccggggauguggggccacagggcccucgaggaguccaggggccucccgguccagccgguaaaccaggcagacggggaagggccgguuccgauggugcacgcgggaugcccggccaaacagggccgaaaggagaccggggauuugauggucuggcaggccucccgggcgaaaagggccaccggggggaccccggcccaucaggcccuccgggcccaccuggggaugauggugagcguggggaugauggggaaguugguccaagaggcuugccuggagaacccggacccagaggguuacuggggcccaaagggcccccugguccuccugguccaccugggguaacuggcauggacggccagccgggaccuaagggaaauguaggaccacagggagagccaggcccuccaggacaacaggguaauccuggggcgcaagggcugccugguccacagggcgccauuggaccgccaggggaaaagggcccuuugggcaaaccgggacuacccggaaugccaggagcagacgguccucccggacauccuggcaaggaggggccaccaggcgaaaagggcggccaggggccucccggaccccagggccccauuggauaucccggcccucgugggguuaagggggccgacggcauccggggcuugaaagguacuaagggggagaaaggagaggauggcuuuccuggauuuaaaggcgauaugggcaucaagggggacaggggcgagaucggaccaccugggccaaggggugaggacggccccgagggaccuaaaggacgaggcggcccaaacggugacccagguccauuggggcccccaggcgagaaggggaaacuggggguccccgggcugccaggguacccuggccgacaggggccuaagggcagcauuggguucccaggguucccuggagccaacggggagaaaggagggaggggcacucccggcaaaccagggccaagaggacaacgggggccuaccgggccucguggagaaagaggaccccgcggcauaacaggaaagccaggaccaaaagggaacagcggaggggauggccccgcuggaccucccggcgagcgcgguccgaacggcccucaggguccuaccgguuuucccggaccgaagggaccgccgggcccccccgguaaagacggacugccaggacacccaggacagcgaggugaaacaggcuuccaaggcaagaccgggccgccaggaccgcccggaguagucgggccccagggcccuacaggggaaacgggucccaugggggaaaggggacauccuggaccccccggaccuccuggggagcagggacuaccuggacuggcugggaaggagggaacuaagggagauccgggacccgcaggacugccuggcaaggacgggccgcccgggcugagaggauuucccggagaucgcggguugcccggaccugucggcgcgcugggccuuaaggggaaugaaggcccccccggcccucccggccccgccggaucacccggggaacgcgggccagcaggugccgccgggccuauaggcaucccgggccggccuggaccccaggguccccccgggccagcgggcgaaaaaggagcaccaggagagaaggggccgcagggaccugccggccgcgauggccuucagggaccggugggucucccgggccccgccgggccugugggaccacccggggaggacggugauaaaggcgaaaucggggagcccggccagaaaggaagcaaaggcgauaaaggggaacagggcccaccugggcccacagggccacaaggaccuaucggccagccuggcccgagcggggcagacggagagccaggcccccggggccagcaggggcucuucggccagaagggagacgaggggccuagaggcuuccccgggcccccuggacccgugggacuucaaggacuuccuggaccccccggggaaaaaggggagacuggugacguuggacagaugggaccuccggggccucccggaccgcgcgggccauccggcgcaccgggggcggauggaccacagggaccccccggugggauaggcaaccccggugcagucggcgagaagggugaaccaggugaagcaggcgaaccugggcuuccgggcgaaggaggccccccuggcccgaaaggcgaaagaggagaaaagggagaaucuggccccuccggugcagccggaccccccggcccuaaaggaccacccggagacgacggccccaagggcagcccugggcccgugggcuucccgggcgacccaggcccuccaggggagccuggaccagccgggcaggacggaccucccggugauaagggugacgacggggagccuggucagacuggaagcccuggacccacaggugaacccggccccagcgguccccccgguaaaagagggccccccgggccggccggacccgagggaaggcaaggggagaagggugcuaagggugaagcuggccuggaggggccccccgggaaaacgggaccaaucggcccacagggagcaccuggcaaaccuggaccagacggccugcgaggcauccccggcccuguuggggaacagggacugccagguaguccggguccagacgggccaccugggcccauggggccgccgggauugcccggucucaagggugauucgggaccaaaaggcgagaagggucaccccggacugauuggccucaucggcccucccggcgagcaaggagaaaaaggugauagagggcugccugguccccagggcagcucuggcccaaagggggaacagggaauuaccggaccuaguggcccuauuggaccuccaggcccaccaggccuccccgguccaccuggaccaaagggagccaaaggaucgagcggaccaaccggcccgaagggugaagccggacauccaggcccacccggccccccgggccccccuggcgaagucauccagccucugccaauucaggcuucgcguacccgccguaacaucgacgcuagucagcuccuggaugacgguaauggagagaauuauguggacuacgccgacggaauggaggagauauucgggagcuuaaauaguuuaaagcucgaaauugagcagaugaagcgcccauuggguacccagcaaaauccagcaagaacaugcaaggauuuacagcugugccauccagauuuucccgacggugaauauuggguggaucccaaccagggaugcucacgggacucuuucaagguauauuguaacuucacagccggcgguagcacaugcguguuccccgauaagaaaucugagggagccagaauuaccagcuggcccaaggaaaaucccggaagcugguuuucagaauucaaaagaggcaagcuuuuaucuuacguggaugccgaggguaaucccgucggaguggugcaaaugacguuccuacggcuccuaucggcaagcgcccaccagaacgugacauaccacugcuaucaaucuguggccuggcaggaugcugcaaccggcucuuaugacaaggcuuuacgguuccuaggcaguaaugacgaagagaugucuuacgauaacaacccauacaucagagcacugguggacggcugcgcaaccaagaagggguaucagaagaccguuuuagagaucgacaccccaaaagucgagcaggugccuaucguugacauuauguucaaugacuuuggugaagccucccagaaauucggcuuugaggucggcccagcguguuuuaugggcuag

SEQ ID NO: 1415 - RNA, 5517 nt, Artificial Sequence
  derived and/or modified sequence
auggacgugcauacuagauggaaggccagguccgcacuaaggccuggggccccuuugcugccgccacuccugcuuuuacuccuuugggcucccccaccaaguagggcagcacagccagccgaccuacugaaaguccucgauuuccacaaccuacccgauggcaucaccaagacuacaggcuuuugugcuacgaggaggucuucaaagggaccugaugucgcauauagggugacuaaagaugcccaacucuccgcaccaacuaaacaacuguacccugcaucugccuuuccugaggacuuuuccaucuugaccacagugaaagcuaagaaaggcucccaggcauucuuggucucuauauauaaugaacagggcauucagcagaucggccuggagcucggacggaguccagucuuccucuaugaagaucauaccggcaagcccggaccugaagacuauccucucuuucgaggcaucaauuuauccgacggaaaauggcauagaaucgcacugagcgugcacaaaaagaacgugacacugauucuggacugcaagaagaaaacuacuaaauuccuggaccgaagugaccacccaaugaucgacaucaauggcauuauuguguucggaacacggauuuuggacgaagaaguuuuugagggggauauucaacaacugcuguuuguuuccgaucaccgggcggcauaugauuauugcgagcauuacagccccgacugugacaccgcgguucccgacacaccccaaucacaggaucccaauccagacgaguacuacacggaaggggacggcgagggagaaacuuauuacuacgaauacccuuauuacgaagacccggaagaucuaggcaaagaaccaaccccaucaaaaaaacccgucgaggcagcuaaagagaccacagaggucccagaggaacuuacaccuaccccuaccgaagccgcccccaugcccgaaaccagugagggugcugggaaagaagaggacguuggaaucggagauuacgacuauguccccagcgaagacuacuauacccccagcccuuacgacgaccucacuuacggagaaggagaagagaauccugaucaacccacagaccccggagcuggagccgaaauccccacuuccacagcugacacuucuaauucuaguaacccagcaccuccucccggagaaggggccgaugaccuugagggcgaauucacggaagagaccauccggaaccuugacgagaauuacuaugauccauacuaugacccaacuucaucaccuagcgagaucggcccagggaugccugcaaaccaggauacaauuuacgaagggaucgguggcccccgcggagaaaagggacagaaaggggagccugcuaucauugaaccaggaaugcuuauagagggcccgcccggaccugaaggaccugcaggucuccccggucccccaggcacaaugggucccacgggccagguaggagauccaggcgagagagggccgccuggucgaccuggucuuccuggagcugacggucugcccggccccccugguacaauguugaugcugccuuucagguucggcggaggaggagaugccggcaguaagggcccaaugguaucagcgcaggagagucaggcccaagcaauacugcagcaggcuagacucgcacuccgaggcccagcaggucccaugggauugacagggcgcccaggcccagugggucccccugguaguggaggauuaaagggcgaaccuggugauguggggccacaaggaccucggggugugcaaggccccccuggaccggcuggcaaacccgggagacgcgguagggcugggucagacggagcacgaggaaugccaggacagacaggacccaaaggcgaucgagguuucgacgggcucgcaggucugccaggggagaaagggcauagaggcgaucccggcccgagcggcccaccaggaccuccuggggacgauggcgagagaggugaugauggcgaagucgggccccggggacugccgggcgaaccaggaccuagaggucugcuuggacccaaaggcccuccugguccaccuggaccacccggggugacaggaauggacggccagccuggcccaaaagggaauguuggaccacagggggaaccagguccucccgggcaacaaggcaaccccggcgcucagggccugccagggccucagggcgcaauaggccccccuggagaaaaaggcccccuaggaaaaccuggccucccugguaugccaggcgccgacggccccccaggacaccccggaaaagaaggccccccaggugagaaagguggacaggggccucccgggccacagggaccaauaggcuaccccggaccaaggggcgugaagggagccgacggaauacgugguuuaaaaggcacuaaaggagagaagggcgaagauggauucccuggcuuuaagggcgauaugggcauuaaaggggacaggggggaaauaggaccgccuggaccuagaggcgaggauggacccgaggggccuaagggacgcgguggucccaacggagaucccggaccucucggcccuccuggcgagaaaggaaaacugggcgugccuggacuucccggauaccccggaagacagggaccuaaaggaucaaucggcuucccagguuuuccaggggcaaauggggagaagggcggacgcggcacucccggcaaaccagggccaagaggacaacgggggccuaccgggccucguggagaaagaggaccccgcggcauaacaggaaagccaggaccaaaagggaacagcggaggggauggccccgcuggaccucccggcgagcgcgguccgaacggcccucaggguccuaccgguuuucccggaccgaagggaccgccgggcccccccgguaaagacggacugccaggacacccaggacagcgaggugaaacaggcuuccaaggcaagaccgggccgccaggaccgcccggaguagucgggccacagggaccgacaggugagacagguccuaugggagagagggggcaccccgggccuccuggaccgccaggagagcagggauuacccgguuuggccggcaaggaaggcacaaaaggggacccugguccagcaggauugccugguaaagacggucccccuggcuuaagaggcuucccgggcgacaggggacugccgggccccguuggugcucugggacucaaggggaacgaggguccaccgggucccccuggaccggccggauccccaggcgagcgaggaccugcuggcgccgccggaccaauagggauucccggcagacccggaccacagggccccccuggaccugccggcgaaaagggcgcuccuggcgagaagggaccacaggggccugcaggaagggauggguugcaggggccggugggucugccuggcccagccgggcccguuggccccccaggcgaggacggagauaagggcgaaaucggagaacccggccaaaaaggcuccaagggagauaagggugagcaagguccgccugggccuaccgggccucaggggccaaucggacagccuggaccaucuggagcggauggcgaaccagggcccagggggcagcaagguuuguuuggacagaaaggagaugaaggcccacgcggauuuccuggaccuccgggucccguuggacugcagggcuugcccggcccucccggcgagaagggugagaccggggacgucggccaaaugggccccccuggcccucccggaccacgaggcccuuccggggcgccaggcgcugauggcccucaaggaccaccaggcgggauuggcaaccccggcgcaguuggggaaaagggagaaccuggcgaagcuggagaacccgggcuaccgggcgaggguggcccccccggucccaagggagaaagaggggagaagggagaaucugguccuaguggugccgcagguccccccgguccaaaaggcccgccuggcgacgacggaccaaaaggaucuccugguccugugggcuuucccggagauccaggcccacccggcgaacccggacccgccgggcaggauggccccccaggugauaaaggcgaugauggagaaccaggacaaaccgggucaccaggccccacuggcgaaccuggcccuucagggccucccggaaaacguggccccccuggcccagcagguccugaagggcggcaaggugaaaagggagccaagggcgaagcaggcuuggagggcccuccggguaaaacaggcccuauuggcccucagggugcgccuggaaagccuggcccugaugggcucagaggaauucccggucccguaggcgagcaggguuugccagggaguccuggacccgaugggccacccggaccaaugggaccuccaggacugcccggacugaagggcgauaguggaccaaagggugagaagggacaucccgggcugauuggccugaucggaccuccaggagagcagggugagaaaggcgaucguggcuugccggggccucaaggaucuuccggacccaaaggggagcaggguaucaccgguccaagcggaccuaucggaccucccggaccaccaggccuuccuggcccacccggaccaaagggugcuaaggggaguagcggaccuacaggccccaagggagaagcaggccaucccggcccaccuggcccuccaggcccuccuggcgagguaauccagccacucccaauucaagcuucgagaacacggcguaauauagacgccucccagcugcuggaugacggcaauggcgagaacuacguagacuaugcggauggcauggaagaaauauucggaucacuaaacucccugaaacuggagauagaacagaugaaacggccucucgguacucagcagaauccagcacgcacaugcaaagaccuccagcuuugccauccagauuucccagauggagaguacuggguugauccuaaccagggcugcucaagggacucuuuuaagguguacugcaauuucacugccggggguucaacuuguguguuucccgacaaaaaaagugaaggcgccagaauuacaagcuggccaaaggagaauccuggcuccugguuuuccgaguucaaaagagggaagcugcucucguacguagacgcagaaggcaauccgguuggcguuguucagaugaccuuccuucgacucuugucagccagcgcccaccagaaugucacuuaccacugcuaccagucuguugccuggcaggaugccgccaccgggaguuacgauaaagcccugcgguucuuagguucaaaugaugaagaaauguccuaugauaacaauccauacauaagagcgcucgucgacggcugugcaacaaaaaaagguuaccaaaaaaccguacuugagaucgacacaccaaagguugaacaaguaccaaucguggacauuauguuuaaugacuucggagaggcgucacagaaauuuggauuugaagucgggccagccuguuucaugggguag

SEQ ID NO: 1416 - protein, 2944 aa, Artificial Sequence
  derived and/or modified sequence
MTLRLLVAALCAGILAEAPRVRAQHRERVTCTRLYAADIVFLLDGSSSIGRSNFREVRSFLEGLVLPFSGAASAQGVRFATVQYSDDPRTEFGLDALGSGGDVIRAIRELSYKGGNTRTGAAILHVADHVFLPQLARPGVPKVCILITDGKSQDLVDTAAQRLKGQGVKLFAVGIKNADPEELKRVASQPTSDFFFFVNDFSILRTLLPLVSRRVCTTAGGVPVTRPPDDSTSAPRDLVLSEPSSQSLRVQWTAASGPVTGYKVQYTPLTGLGQPLPSERQEVNVPAGETSVRLRGLRPLTEYQVTVIALYANSIGEAVSGTARTTALEGPELTIQNTTAHSLLVAWRSVPGATGYRVTWRVLSGGPTQQQELGPGQGSVLLRDLEPGTDYEVTVSTLFGRSVGPATSLMARTDASVEQTLRPVILGPTSILLSWNLVPEARGYRLEWRRETGLEPPQKVVLPSDVTRYQLDGLQPGTEYRLTLYTLLEGHEVATPATVVPTGPELPVSPVTDLQATELPGQRVRVSWSPVPGATQYRIIVRSTQGVERTLVLPGSQTAFDLDDVQAGLSYTVRVSARVGPREGSASVLTVRREPETPLAVPGLRVVVSDATRVRVAWGPVPGASGFRISWSTGSGPESSQTLPPDSTATDITGLQPGTTYQVAVSVLRGREEGPAAVIVARTDPLGPVRTVHVTQASSSSVTITWTRVPGATGYRVSWHSAHGPEKSQLVSGEATVAELDGLEPDTEYTVHVRAHVAGVDGPPASVVVRTAPEPVGRVSRLQILNASSDVLRITWVGVTGATAYRLAWGRSEGGPMRHQILPGNTDSAEIRGLEGGVSYSVRVTALVGDREGTPVSIVVTTPPEAPPALGTLHVVQRGEHSLRLRWEPVPRAQGFLLHWQPEGGQEQSRVLGPELSSYHLDGLEPATQYRVRLSVLGPAGEGPSAEVTARTESPRVPSIELRVVDTSIDSVTLAWTPVSRASSYILSWRPLRGPGQEVPGSPQTLPGISSSQRVTGLEPGVSYIFSLTPVLDGVRGPEASVTQTPVCPRGLADVVFLPHATQDNAHRAEATRRVLERLVLALGPLGPQAVQVGLLSYSHRPSPLFPLNGSHDLGIILQRIRDMPYMDPSGNNLGTAVVTAHRYMLAPDAPGRRQHVPGVMVLLVDEPLRGDIFSPIREAQASGLNVVMLGMAGADPEQLRRLAPGMDSVQTFFAVDDGPSLDQAVSGLATALCQASFTTQPRPEPCPVYCPKGQKGEPGEMGLRGQVGPPGDPGLPGRTGAPGPQGPPGSATAKGERGFPGADGRPGSPGRAGNPGTPGAPGLKGSPGLPGPRGDPGERGPRGPKGEPGAPGQVIGGEGPGLPGRKGDPGPSGPPGPRGPLGDPGPRGPPGLPGTAMKGDKGDRGERGPPGPGEGGIAPGEPGLPGLPGSPGPQGPVGPPGKKGEKGDSEDGAPGLPGQPGSPGEQGPRGPPGAIGPKGDRGFPGPLGEAGEKGERGPPGPAGSRGLPGVAGRPGAKGPEGPPGPTGRQGEKGEPGRPGDPAVVGPAVAGPKGEKGDVGPAGPRGATGVQGERGPPGLVLPGDPGPKGDPGDRGPIGLTGRAGPPGDSGPPGEKGDPGRPGPPGPVGPRGRDGEVGEKGDEGPPGDPGLPGKAGERGLRGAPGVRGPVGEKGDQGDPGEDGRNGSPGSSGPKGDRGEPGPPGPPGRLVDTGPGAREKGEPGDRGQEGPRGPKGDPGLPGAPGERGIEGFRGPPGPQGDPGVRGPAGEKGDRGPPGLDGRSGLDGKPGAAGPSGPNGAAGKAGDPGRDGLPGLRGEQGLPGPSGPPGLPGKPGEDGKPGLNGKNGEPGDPGEDGRKGEKGDSGASGREGRDGPKGERGAPGILGPQGPPGLPGPVGPPGQGFPGVPGGTGPKGDRGETGSKGEQGLPGERGLRGEPGSVPNVDRLLETAGIKASALREIVETWDESSGSFLPVPERRRGPKGDSGEQGPPGKEGPIGFPGERGLKGDRGDPGPQGPPGLALGERGPPGPSGLAGEPGKPGIPGLPGRAGGVGEAGRPGERGERGEKGERGEQGRDGPPGLPGTPGPPGPPGPKVSVDEPGPGLSGEQGPPGLKGAKGEPGSNGDQGPKGDRGVPGIKGDRGEPGPRGQDGNPGLPGERGMAGPEGKPGLQGPRGPPGPVGGHGDPGPPGAPGLAGPAGPQGPSGLKGEPGETGPPGRGLTGPTGAVGLPGPPGPSGLVGPQGSPGLPGQVGETGKPGAPGRDGASGKDGDRGSPGVPGSPGLPGPVGPKGEPGPTGAPGQAVVGLPGAKGEKGAPGGLAGDLVGEPGAKGDRGLPGPRGEKGEAGRAGEPGDPGEDGQKGAPGPKGFKGDPGVGVPGSPGPPGPPGVKGDLGLPGLPGAPGVVGFPGQTGPRGEMGQPGPSGERGLAGPPGREGIPGPLGPPGPPGSVGPPGASGLKGDKGDPGVGLPGPRGERGEPGIRGEDGRPGQEGPRGLTGPPGSRGERGEKGDVGSAGLKGDKGDSAVILGPPGPRGAKGDMGERGPRGLDGDKGPRGDNGDPGDKGSKGEPGDKGSAGLPGLRGLLGPQGQPGAAGIPGDPGSPGKDGVPGIRGEKGDVGFMGPRGLKGERGVKGACGLDGEKGDKGEAGPPGRPGLAGHKGEMGEPGVPGQSGAPGKEGLIGPKGDRGFDGQPGPKGDQGEKGERGTPGIGGFPGPSGNDGSAGPPGPPGSVGPRGPEGLQGQKGERGPPGERVVGAPGVPGAPGERGEQGRPGPAGPRGEKGEAALTEDDIRGFVRQEMSQHCACQGQFIASGSRPLPSYAADTAGSQLHAVPVLRVSHAEEEERVPPEDDEYSEYSEYSVEEYQDPEAPWDSDDPCSLPLDEGSCTAYTLRWYHRAVTGSTEACHPFVYGGCGGNANRFGTREACERRCPPRVVQSQGTGTAQD

SEQ ID NO: 1417 - protein, 2912 aa, Artificial Sequence
  derived and/or modified sequence
MTLRLLVAALCAGILAEAPRVRAQHRERVTCTRLYAADIVFLLDGSSSIGRSNFREVRSFLEGLVLPFSGAASAQGVRFATVQYSDDPRTEFGLDALGSGGDVIRAIRELSYKGGNTRTGAAILHVADHVFLPQLARPGVPKVCILITDGKSQDLVDTAAQRLKGQGVKLFAVGIKNADPEELKRVASQPTSDFFFFVNDFSILRTLLPLVSRRVCTTAGGVPVTRPPDDSTSAPRDLVLSEPSSQSLRVQWTAASGPVTGYKVQYTPLTGLGQPLPSERQEVNVPAGETSVRLRGLRPLTEYQVTVIALYANSIGEAVSGTARTTALEGPELTIQNTTAHSLLVAWRSVPGATGYRVTWRVLSGGPTQQQELGPGQGSVLLRDLEPGTDYEVTVSTLFGRSVGPATSLMARTDASVEQTLRPVILGPTSILLSWNLVPEARGYRLEWRRETGLEPPQKVVLPSDVTRYQLDGLQPGTEYRLTLYTLLEGHEVATPATVVPTGPELPVSPVTDLQATELPGQRVRVSWSPVPGATQYRIIVRSTQGVERTLVLPGSQTAFDLDDVQAGLSYTVRVSARVGPREGSASVLTVRREPETPLAVPGLRVVVSDATRVRVAWGPVPGASGFRISWSTGSGPESSQTLPPDSTATDITGLQPGTTYQVAVSVLRGREEGPAAVIVARTDPLGPVRTVHVTQASSSSVTITWTRVPGATGYRVSWHSAHGPEKSQLVSGEATVAELDGLEPDTEYTVHVRAHVAGVDGPPASVVVRTAPEPVGRVSRLQILNASSDVLRITWVGVTGATAYRLAWGRSEGGPMRHQILPGNTDSAEIRGLEGGVSYSVRVTALVGDREGTPVSIVVTTPPEAPPALGTLHVVQRGEHSLRLRWEPVPRAQGFLLHWQPEGGQEQSRVLGPELSSYHLDGLEPATQYRVRLSVLGPAGEGPSAEVTARTESPRVPSIELRVVDTSIDSVTLAWTPVSRASSYILSWRPLRGPGQEVPGSPQTLPGISSSQRVTGLEPGVSYIFSLTPVLDGVRGPEASVTQTPVCPRGLADVVFLPHATQDNAHRAEATRRVLERLVLALGPLGPQAVQVGLLSYSHRPSPLFPLNGSHDLGIILQRIRDMPYMDPSGNNLGTAVVTAHRYMLAPDAPGRRQHVPGVMVLLVDEPLRGDIFSPIREAQASGLNVVMLGMAGADPEQLRRLAPGMDSVQTFFAVDDGPSLDQAVSGLATALCQASFTTQPRPEPCPVYCPKGQKGEPGEMGLRGQVGPPGDPGLPGRTGAPGPQGPPGSATAKGERGFPGADGRPGSPGRAGNPGTPGAPGLKGSPGLPGPRGDPGERGPRGPKGEPGAPGQVIGGEGPGLPGRKGDPGPSGPPGPRGPLGDPGPRGPPGLPGTAMKGDKGDRGERGPPGPGEGGIAPGEPGLPGLPGSPGPQGPVGPPGKKGEKGDSEDGAPGLPGQPGSPGEQGPRGPPGAIGPKGDRGFPGPLGEAGEKGERGPPGPAGSRGLPGVAGRPGAKGPEGPPGPTGRQGEKGEPGRPGDPAVVGPAVAGPKGEKGDVGPAGPRGATGVQGERGPPGLVLPGDPGPKGDPGDRGPIGLTGRAGPPGDSGPPGEKGDPGRPGPPGPVGPRGRDGEVGEKGDEGPPGDPGLPGKAGERGLRGAPGVRGPVGEKGDQGDPGEDGRNGSPGSSGPKGDRGEPGPPGPPGRLVDTGPGAREKGEPGDRGQEGPRGPKGDPGLPGAPGERGIEGFRGPPGPQGDPGVRGPAGEKGDRGPPGLDGRSGLDGKPGAAGPSGPNGAAGKAGDPGRDGLPGLRGEQGLPGPSGPPGLPGKPGEDGKPGLNGKNGEPGDPGEDGRKGEKGDSGASGREGFPGVPGGTGPKGDRGETGSKGEQGLPGERGLRGEPGSVPNVDRLLETAGIKASALREIVETWDESSGSFLPVPERRRGPKGDSGEQGPPGKEGPIGFPGERGLKGDRGDPGPQGPPGLALGERGPPGPSGLAGEPGKPGIPGLPGRAGGVGEAGRPGERGERGEKGERGEQGRDGPPGLPGTPGPPGPPGPKVSVDEPGPGLSGEQGPPGLKGAKGEPGSNGDQGPKGDRGVPGIKGDRGEPGPRGQDGNPGLPGERGMAGPEGKPGLQGPRGPPGPVGGHGDPGPPGAPGLAGPAGPQGPSGLKGEPGETGPPGRGLTGPTGAVGLPGPPGPSGLVGPQGSPGLPGQVGETGKPGAPGRDGASGKDGDRGSPGVPGSPGLPGPVGPKGEPGPTGAPGQAVVGLPGAKGEKGAPGGLAGDLVGEPGAKGDRGLPGPRGEKGEAGRAGEPGDPGEDGQKGAPGPKGFKGDPGVGVPGSPGPPGPPGVKGDLGLPGLPGAPGVVGFPGQTGPRGEMGQPGPSGERGLAGPPGREGIPGPLGPPGPPGSVGPPGASGLKGDKGDPGVGLPGPRGERGEPGIRGEDGRPGQEGPRGLTGPPGSRGERGEKGDVGSAGLKGDKGDSAVILGPPGPRGAKGDMGERGPRGLDGDKGPRGDNGDPGDKGSKGEPGDKGSAGLPGLRGLLGPQGQPGAAGIPGDPGSPGKDGVPGIRGEKGDVGFMGPRGLKGERGVKGACGLDGEKGDKGEAGPPGRPGLAGHKGEMGEPGVPGQSGAPGKEGLIGPKGDRGFDGQPGPKGDQGEKGERGTPGIGGFPGPSGNDGSAGPPGPPGSVGPRGPEGLQGQKGERGPPGERVVGAPGVPGAPGERGEQGRPGPAGPRGEKGEAALTEDDIRGFVRQEMSQHCACQGQFIASGSRPLPSYAADTAGSQLHAVPVLRVSHAEEEERVPPEDDEYSEYSEYSVEEYQDPEAPWDSDDPCSLPLDEGSCTAYTLRWYHRAVTGSTEACHPFVYGGCGGNANRFGTREACERRCPPRVVQSQGTGTAQD

SEQ ID NO: 1418 - DNA, 9003 bp, Artificial Sequence
  derived and/or modified sequence
gggaaataagagagaaaagaagagtaagaagaaatataagagccaccatgacgcttcggttgttggtagcagccctctgcgcgggaattctcgctgaggcacctcgggtgagagcgcagcatagagagcgagtaacatgtactcgactgtacgcggcagatatcgtgtttttgttggacggttcgtcctcgattggtcggtcgaactttcgggaagtgaggtcgttcttggaaggactcgtacttcccttttccggggctgcctcggcgcagggggtgcgctttgcgaccgtccagtattcagacgatcccagaaccgagtttggtctggacgcgctgggatcaggtggtgacgtaatccgagccattcgcgagctgtcatacaaaggcggaaatacgagaaccggtgcggcgatccttcacgtcgctgaccacgtattcctgccgcagctcgcaagacccggagtaccgaaagtgtgtatcctgatcacggatgggaaatcccaggaccttgtggacacggctgcacagcggttgaaaggccagggtgtgaagctcttcgcggtcggtatcaaaaacgcagacccagaagagcttaagcgggtggcatcccaaccgacatcggacttcttctttttcgtcaacgacttctcgattcttcggactctgctcccgcttgtgagccgaagggtatgtacgacagccggtggtgtccctgtgacacgaccgcctgatgacagcacgagcgcccctagggacctggtgctttcggaaccctcatcacagtcactgagagtccaatggactgcggcatcgggtccggtaaccgggtataaggtacagtacactccgttgaccggtctggggcagccccttccgtcggaacgccaagaagtcaacgtgccagcaggcgaaacttcagtgaggctgcgagggctccgacctctcacggaatatcaggtgaccgtgatcgcgctgtatgcaaactccatcggagaggccgtatcagggacagctcggacgaccgctcttgaaggacccgaactcacgatccagaatacaacagcgcactcacttcttgtggcatggcgctcggtccccggagccacagggtacagagtgacatggagagtactgtcgggaggtccgacgcagcaacaggagctcggtccagggcagggatcagtattgcttcgcgatttggagcccggtacggactatgaggtaacggtatcaacacttttcggaagatccgtaggacccgccacgtcattgatggcgcgaacggacgccagcgtcgagcagactttgcgcccagtaatcttgggaccaacctcaatcctgctcagctggaatcttgtgccggaagctcgagggtatcggctcgaatggcgaagagagactggattggaaccgccacaaaaggtcgtattgccctcggacgtgacaaggtaccagttggatggacttcagcctgggactgagtaccggctgaccctctacacactgttggaagggcacgaagtagccactcccgcgacggtggtgcccaccggaccggagctgccggtgagcccagtcacagatctccaggcgacggaactccctggtcagagagtgcgagtctcatggtcaccggtgccgggagccacgcagtacagaatcattgtccgatcgacccaaggcgtcgagcgaacccttgtgcttcccggatcgcagactgccttcgatctggacgacgtgcaagcaggactgagctatacggtcagagtgtcagcgagagtcggaccccgcgagggatcagcgtccgtgctgactgtcagaagggagcccgaaacgccgctcgcggtgcctggccttagagtcgtagtgtcggatgcgacgagggtgcgagtcgcgtggggtccagtgcctggggcgtcgggttttcggatctcgtggtcgacggggagcggtcccgaatcctcgcagactctcccacccgatagcacagcgacagatatcacagggctccaacccggaacgacgtatcaagtcgcagtcagcgtgttgagaggtagagaggaaggccctgcagcggtcatcgtagcgcgcacggacccacttggaccagtcagaacagtacacgtaactcaagcatcgtcctcgtccgtaactatcacgtggacaagggtaccaggtgcgacaggatacagagtgtcgtggcactcggcacacggtccagagaaatcgcagctcgtgtccggagaagctacggtcgcggaactggacggccttgaacccgataccgagtacacagtgcatgtcagagctcacgtggccggagtcgatgggccaccggcgtcggtggtcgtgcgcacagcaccagagccggtgggacgcgtgtcccggctgcagattcttaatgccagctcggatgtcttgcgcatcacatgggtcggcgtaacgggtgcgacggcgtatcggttggcgtggggaaggtcagagggcggaccgatgcggcaccaaattctccctggaaacacagattcggccgaaatcagaggactcgagggaggcgtaagctactccgtccgcgtaacagctttggtgggggatagagaaggtactcccgtgtcaatcgtcgtgactacaccccctgaagctccgcctgcgttgggaactttgcatgtcgtacaacgcggggagcacagccttcggctgcgatgggagcccgtgccaagagcccaggggtttctcttgcattggcagccggagggaggacaagaacagtcaagagtcctcggcccagagctcagctcctatcatttggacggactcgagccggcgacgcaataccgcgtaaggttgtccgtcttggggcctgccggggaaggaccgtccgcggaggtcacagccagaacggaatcgccgagagtaccctcgattgagctgcgagtagtggacacgtccattgattcggtcactttggcctggacaccggtatcacgcgcctcaagctacatcctgtcatggcgaccgcttcgcggacccggacaggaagtgccaggatcacctcagacgctccccggaatcagctcgtcgcagcgcgtcacgggtctggagcctggagtctcatacatctttagcctcacacccgtacttgatggcgtcagaggacccgaggcatcggtgacccagacaccagtgtgccctagaggactggcggacgtggtgtttctgccacacgcgacacaagacaatgcgcaccgggctgaagctacgcgaagggtgctcgaaagactggtgcttgcgctcggacctcttggaccccaggcagtacaagtggggttgctctcatactcccacagaccttcgccgttgttcccgcttaatgggtcgcatgatctcggaatcatcttgcagagaatccgcgatatgccctatatggatccaagcggaaacaacctcgggacagcggtagtcacggcgcaccggtacatgttggcgcctgatgctccaggccgaaggcagcatgtgccgggtgtcatggtgctgctggtcgacgagccgctgaggggagacattttctcacccattagagaggcccaagccagcgggttgaatgtggtcatgctcggtatggctggagcagatcccgagcagctccgacgactggcacccggaatggattcggtgcagacgtttttcgccgtcgacgatggaccctcattggaccaggccgtgagcggactcgcaacggcattgtgtcaggcgtcgttcacgacgcaacctagaccggaaccgtgtccggtgtattgtcccaagggacagaagggggaacctggcgagatgggtctgagaggtcaggtgggtccgcctggcgacccgggtttgcctggccgcacgggagcgcctgggccacaaggaccgcctgggtccgcaacagccaaaggggaaagaggctttcccggagcggatggacggccagggtcgcccggaagggcgggtaaccccggtacacccggtgcacccgggctcaaaggctcgcccggacttcctggtcccagaggcgatccaggcgaacgcggtccgagaggaccgaagggtgagccaggagcgccaggacaggtcatcgggggtgaagggcctgggctgccaggacgcaagggcgacccgggtccgtcaggtccgcctgggcccagagggcctctcggtgatcccggtcctcggggaccaccggggttgcccggaacggcgatgaaaggcgacaagggagataggggcgaaagggggccgcccggaccaggagagggtggaatcgcgccaggggaacccggactgccgggactgcctggatcccccggaccgcagggaccagtcggaccgcctgggaagaaaggggagaaaggtgatagcgaggacggtgctcctggtttgcccggacagccgggttcaccgggagaacagggtcccagaggtccaccgggagccattgggcccaagggggacaggggttttcccggacccttgggcgaggcaggggagaagggcgagcgaggaccacccggccccgccggatcccgaggtctgccaggggtcgcgggaaggcctggtgcgaaggggcctgaaggaccaccgggacccacgggaaggcagggcgagaagggcgaaccaggtcgaccgggggacccagctgtcgtagggcctgcggtagcgggaccaaaaggcgagaaaggggacgtaggtccagcaggaccacgaggcgctacgggggtacagggagagcgaggccctcccggtctggtcttgccaggcgaccccggacccaagggagatccgggtgacaggggaccaattggacttacgggtagagcgggtccacccggcgactcaggccctccaggggaaaagggggatcccgggaggcctggtccccctgggccggtaggaccccgagggagagatggagaggtgggtgagaagggagatgaaggtccacctggtgatccggggctccccggtaaagctggggagagggggctgcgcggagcacctggcgtacgcggtcccgtgggggaaaagggggatcagggcgaccccggtgaggacgggagaaacgggtcacccggttcatcagggccgaagggcgacaggggtgagccgggaccgccaggtccaccggggaggttggtagatacaggccctggagcgagagagaaaggcgagccgggagaccgagggcaggaaggtccgagagggcctaaaggggatcctgggcttcctggtgcccctggagaaagagggattgagggtttccgcggaccgccgggaccccagggtgatccgggagtgcggggaccggctggagaaaaaggcgatagaggcccacccggtcttgatggtaggtcgggtttggatgggaagccgggagcggcaggaccgtcgggaccgaacggtgcggctgggaaggcgggagatcctggtcgcgacgggttgcctgggctcagaggcgagcagggactcccgggaccatccggaccacctggtctgcccggaaaacccggagaagatggaaaaccgggacttaatggaaagaatggtgaaccaggggaccctggtgaagacggtaggaaaggggagaaaggtgactccggtgcaagcggacgagagggacgcgatggtccgaaaggggaacgcggagcccccggtattctgggtcctcaaggtccccctgggttgccgggtccagtgggtccacctgggcagggtttccctggcgtcccgggtgggacagggcccaagggcgaccgcggtgaaactggaagcaagggagaacaagggctgccgggagagagaggacttcggggagagccgggatcggtacccaatgtagaccggctgctggaaacggcagggattaaggctagcgcccttagagagatcgtagaaacttgggacgagtcaagcggatcgtttttgccagtacccgagcgcagacggggtcccaagggtgactcaggcgaacagggaccaccaggaaaagaagggcccattgggtttccgggggagcgaggtctgaagggcgatcgaggtgaccccggtcctcagggaccgccaggacttgcgctgggtgagcgcggtccccctggaccgtcagggctggcaggtgaaccaggaaagcccggaatccctggcctgcccggtcgagcgggtggtgtcggtgaagcggggagacctggtgagcggggtgagaggggcgaaaaaggagagcgcggtgagcaaggacgggacggaccaccgggattgcccggcacgccagggccacccggacctccgggacctaaggtgtccgtggatgagcctggaccgggactctcgggagagcagggcccacctggcttgaagggggccaaaggtgaaccgggatcgaacggagaccaaggtcccaaaggcgaccggggtgtgcccggcattaagggagataggggcgaacctgggcctcgaggtcaggacggtaacccagggctgcccggagagagagggatggcagggccggaagggaagcctggcttgcaaggacccaggggtcctcccggaccggtcggaggtcatggagatcctggtcctccgggtgcgccaggcttggctggacctgccggaccccaagggccctcgggactgaaaggtgagcccggagaaacaggcccacccggtcggggattgacaggtccgactggcgcagtcggactgccagggccaccaggtccgtccggactggtgggaccacaggggagcccaggacttcctggccaggtcggggaaactggtaagcctggggctccaggacgcgacggcgcatcgggcaaagatggagatcgcggctcacccggtgtcccgggttcaccaggactgcccggacccgtgggaccgaagggtgagcctgggcctacgggggcgccgggacaggctgtggtgggtcttccgggagcgaagggggagaagggggcacccggtgggctcgcgggtgatcttgtgggtgagcccggagcaaagggagacagaggattgccgggaccacggggtgaaaagggagaagcaggtcgcgctggggagcctggtgaccccggagaggacggacagaaaggggcacctggtcctaagggcttcaagggagacccgggagtgggggtccctggatcacccggtccccctggaccaccaggggtcaaaggagatcttggactccctggactccctggagcaccgggagtagtaggattccccggacagaccggaccacgcggagaaatgggacagcctggtccgtcgggggaaaggggcttggccggaccgccaggcagagaaggcatccccggtccactgggaccccctggtccgccaggatcggtcggaccaccaggcgctagcggccttaagggtgataaaggagaccccggtgtaggattgccaggccctagaggcgaaagaggggagccgggaatcaggggcgaggatgggcgaccgggtcaagaaggccctagggggctgaccggtccgcctggttcgaggggagaacgcggagagaagggtgacgtggggtcggcaggacttaagggggataagggggactccgcggtgattctggggccacctggccccaggggagcaaaaggggatatgggcgagagaggtccccgaggtctggatggagacaagggacctcgcggagataacggagatcccggagataaggggtcgaaaggagaaccgggagataaagggtccgcgggactgcctggactcagggggcttctcgggcctcaggggcagccaggtgcggcaggtatcccaggggaccccggaagccctggtaaggatggggtacccggtatccgaggtgaaaaaggggacgtgggcttcatgggaccacgagggctgaagggtgaaaggggtgtcaaaggggcgtgcggattggacggggaaaagggggacaagggggaagcgggtccgccaggaaggccgggattggcgggacacaagggtgagatgggggagcccggagtcccgggtcagtcaggagcccctggaaaggaaggattgattggtccaaagggagacaggggcttcgatggacaaccaggacccaaaggcgaccaaggagagaaaggagagaggggaacgcctggtattggaggattcccgggtccctcgggaaacgatggaagcgcagggccacccggaccccctggtagcgtggggcctcggggacccgaaggccttcaaggtcaaaaaggtgaaagaggaccccctggtgagagagtggtgggagcgcctggggtgcccggagctcccggagaacggggagaacaaggacgccctggcccagcgggtcctcgaggggaaaaaggtgaagcggcactcacggaggatgacatcagggggtttgtgaggcaggagatgtcccaacactgcgcgtgtcaaggacagttcatcgctagcggttccaggccacttccctcgtacgccgcagacacggcagggtcacaactccatgccgtccctgtcttgcgggtcagccatgctgaagaagaagaaagagtaccacccgaagacgacgagtacagcgagtattccgagtattcggtcgaagagtatcaagatcccgaagcgccttgggactccgacgatccctgttcgctccccttggacgaaggatcgtgcacggcttatacacttaggtggtaccacagagcggtgaccggatcgacagaggcgtgccaccccttcgtctacggtggttgcggtggtaacgcgaacagatttggaacgcgcgaagcgtgtgagcgcagatgtccgcctcgagtggtgcagtcgcaggggacgggtaccgcccaggattgataagctgccttctgcggggcttgccttctggccatgcccttcttctctcccttgcacctgtacctcttggtctttgaataaagcctgagtaggaaggcggccgctcgagcatgcatctaga

SEQ ID NO: 1419 - DNA, 8835 bp, Artificial Sequence
  derived and/or modified sequence
atgaccctgagactgctggtggccgccctgtgcgccggcatcctggccgaggcccccagagtgagagcccagcacagagagagagtgacctgcaccagactgtacgccgccgacatcgtgttcctgctggacggcagcagcagcatcggcagaagcaacttcagagaggtgagaagcttcctggagggcctggtgctgcccttcagcggcgccgccagcgcccagggcgtgagattcgccaccgtgcagtacagcgacgaccccagaaccgagttcggcctggacgccctgggcagcggcggcgacgtgatcagagccatcagagagctgagctacaagggcggcaacaccagaaccggcgccgccatcctgcacgtggccgaccacgtgttcctgccccagctggccagacccggcgtgcccaaggtgtgcatcctgatcaccgacggcaagagccaggacctggtggacaccgccgcccagagactgaagggccagggcgtgaagctgttcgccgtgggcatcaagaacgccgaccccgaggagctgaagagagtggccagccagcccaccagcgacttcttcttcttcgtgaacgacttcagcatcctgagaaccctgctgcccctggtgagcagaagagtgtgcaccaccgccggcggcgtgcccgtgaccagaccccccgacgacagcaccagcgcccccagagacctggtgctgagcgagcccagcagccagagcctgagagtgcagtggaccgccgccagcggccccgtgaccggctacaaggtgcagtacacccccctgaccggcctgggccagcccctgcccagcgagagacaggaggtgaacgtgcccgccggcgagaccagcgtgagactgagaggcctgagacccctgaccgagtaccaggtgaccgtgatcgccctgtacgccaacagcatcggcgaggccgtgagcggcaccgccagaaccaccgccctggagggccccgagctgaccatccagaacaccaccgcccacagcctgctggtggcctggagaagcgtgcccggcgccaccggctacagagtgacctggagagtgctgagcggcggccccacccagcagcaggagctgggccccggccagggcagcgtgctgctgagagacctggagcccggcaccgactacgaggtgaccgtgagcaccctgttcggcagaagcgtgggccccgccaccagcctgatggccagaaccgacgccagcgtggagcagaccctgagacccgtgatcctgggccccaccagcatcctgctgagctggaacctggtgcccgaggccagaggctacagactggagtggagaagagagaccggcctggagcccccccagaaggtggtgctgcccagcgacgtgaccagataccagctggacggcctgcagcccggcaccgagtacagactgaccctgtacaccctgctggagggccacgaggtggccacccccgccaccgtggtgcccaccggccccgagctgcccgtgagccccgtgaccgacctgcaggccaccgagctgcccggccagagagtgagagtgagctggagccccgtgcccggcgccacccagtacagaatcatcgtgagaagcacccagggcgtggagagaaccctggtgctgcccggcagccagaccgccttcgacctggacgacgtgcaggccggcctgagctacaccgtgagagtgagcgccagagtgggccccagagagggcagcgccagcgtgctgaccgtgagaagagagcccgagacccccctggccgtgcccggcctgagagtggtggtgagcgacgccaccagagtgagagtggcctggggccccgtgcccggcgccagcggcttcagaatcagctggagcaccggcagcggccccgagagcagccagaccctgccccccgacagcaccgccaccgacatcaccggcctgcagcccggcaccacctaccaggtggccgtgagcgtgctgagaggcagagaggagggccccgccgccgtgatcgtggccagaaccgaccccctgggccccgtgagaaccgtgcacgtgacccaggccagcagcagcagcgtgaccatcacctggaccagagtgcccggcgccaccggctacagagtgagctggcacagcgcccacggccccgagaagagccagctggtgagcggcgaggccaccgtggccgagctggacggcctggagcccgacaccgagtacaccgtgcacgtgagagcccacgtggccggcgtggacggcccccccgccagcgtggtggtgagaaccgcccccgagcccgtgggcagagtgagcagactgcagatcctgaacgccagcagcgacgtgctgagaatcacctgggtgggcgtgaccggcgccaccgcctacagactggcctggggcagaagcgagggcggccccatgagacaccagatcctgcccggcaacaccgacagcgccgagatcagaggcctggagggcggcgtgagctacagcgtgagagtgaccgccctggtgggcgacagagagggcacccccgtgagcatcgtggtgaccaccccccccgaggccccccccgccctgggcaccctgcacgtggtgcagagaggcgagcacagcctgagactgagatgggagcccgtgcccagagcccagggcttcctgctgcactggcagcccgagggcggccaggagcagagcagagtgctgggccccgagctgagcagctaccacctggacggcctggagcccgccacccagtacagagtgagactgagcgtgctgggccccgccggcgagggccccagcgccgaggtgaccgccagaaccgagagccccagagtgcccagcatcgagctgagagtggtggacaccagcatcgacagcgtgaccctggcctggacccccgtgagcagagccagcagctacatcctgagctggagacccctgagaggccccggccaggaggtgcccggcagcccccagaccctgcccggcatcagcagcagccagagagtgaccggcctggagcccggcgtgagctacatcttcagcctgacccccgtgctggacggcgtgagaggccccgaggccagcgtgacccagacccccgtgtgccccagaggcctggccgacgtggtgttcctgccccacgccacccaggacaacgcccacagagccgaggccaccagaagagtgctggagagactggtgctggccctgggccccctgggcccccaggccgtgcaggtgggcctgctgagctacagccacagacccagccccctgttccccctgaacggcagccacgacctgggcatcatcctgcagagaatcagagacatgccctacatggaccccagcggcaacaacctgggcaccgccgtggtgaccgcccacagatacatgctggcccccgacgcccccggcagaagacagcacgtgcccggcgtgatggtgctgctggtggacgagcccctgagaggcgacatcttcagccccatcagagaggcccaggccagcggcctgaacgtggtgatgctgggcatggccggcgccgaccccgagcagctgagaagactggcccccggcatggacagcgtgcagaccttcttcgccgtggacgacggccccagcctggaccaggccgtgagcggcctggccaccgccctgtgccaggccagcttcaccacccagcccagacccgagccctgccccgtgtactgccccaagggccagaagggcgagcccggcgagatgggcctgagaggccaggtgggcccccccggcgaccccggcctgcccggcagaaccggcgcccccggcccccagggcccccccggcagcgccaccgccaagggcgagagaggcttccccggcgccgacggcagacccggcagccccggcagagccggcaaccccggcacccccggcgcccccggcctgaagggcagccccggcctgcccggccccagaggcgaccccggcgagagaggccccagaggccccaagggcgagcccggcgcccccggccaggtgatcggcggcgagggccccggcctgcccggcagaaagggcgaccccggccccagcggcccccccggccccagaggccccctgggcgaccccggccccagaggcccccccggcctgcccggcaccgccatgaagggcgacaagggcgacagaggcgagagaggcccccccggccccggcgagggcggcatcgcccccggcgagcccggcctgcccggcctgcccggcagccccggcccccagggccccgtgggcccccccggcaagaagggcgagaagggcgacagcgaggacggcgcccccggcctgcccggccagcccggcagccccggcgagcagggccccagaggcccccccggcgccatcggccccaagggcgacagaggcttccccggccccctgggcgaggccggcgagaagggcgagagaggcccccccggccccgccggcagcagaggcctgcccggcgtggccggcagacccggcgccaagggccccgagggcccccccggccccaccggcagacagggcgagaagggcgagcccggcagacccggcgaccccgccgtggtgggccccgccgtggccggccccaagggcgagaagggcgacgtgggccccgccggccccagaggcgccaccggcgtgcagggcgagagaggcccccccggcctggtgctgcccggcgaccccggccccaagggcgaccccggcgacagaggccccatcggcctgaccggcagagccggcccccccggcgacagcggcccccccggcgagaagggcgaccccggcagacccggcccccccggccccgtgggccccagaggcagagacggcgaggtgggcgagaagggcgacgagggcccccccggcgaccccggcctgcccggcaaggccggcgagagaggcctgagaggcgcccccggcgtgagaggccccgtgggcgagaagggcgaccagggcgaccccggcgaggacggcagaaacggcagccccggcagcagcggccccaagggcgacagaggcgagcccggcccccccggcccccccggcagactggtggacaccggccccggcgccagagagaagggcgagcccggcgacagaggccaggagggccccagaggccccaagggcgaccccggcctgcccggcgcccccggcgagagaggcatcgagggcttcagaggcccccccggcccccagggcgaccccggcgtgagaggccccgccggcgagaagggcgacagaggcccccccggcctggacggcagaagcggcctggacggcaagcccggcgccgccggccccagcggccccaacggcgccgccggcaaggccggcgaccccggcagagacggcctgcccggcctgagaggcgagcagggcctgcccggccccagcggcccccccggcctgcccggcaagcccggcgaggacggcaagcccggcctgaacggcaagaacggcgagcccggcgaccccggcgaggacggcagaaagggcgagaagggcgacagcggcgccagcggcagagagggcagagacggccccaagggcgagagaggcgcccccggcatcctgggcccccagggcccccccggcctgcccggccccgtgggcccccccggccagggcttccccggcgtgcccggcggcaccggccccaagggcgacagaggcgagaccggcagcaagggcgagcagggcctgcccggcgagagaggcctgagaggcgagcccggcagcgtgcccaacgtggacagactgctggagaccgccggcatcaaggccagcgccctgagagagatcgtggagacctgggacgagagcagcggcagcttcctgcccgtgcccgagagaagaagaggccccaagggcgacagcggcgagcagggcccccccggcaaggagggccccatcggcttccccggcgagagaggcctgaagggcgacagaggcgaccccggcccccagggcccccccggcctggccctgggcgagagaggcccccccggccccagcggcctggccggcgagcccggcaagcccggcatccccggcctgcccggcagagccggcggcgtgggcgaggccggcagacccggcgagagaggcgagagaggcgagaagggcgagagaggcgagcagggcagagacggcccccccggcctgcccggcacccccggcccccccggcccccccggccccaaggtgagcgtggacgagcccggccccggcctgagcggcgagcagggcccccccggcctgaagggcgccaagggcgagcccggcagcaacggcgaccagggccccaagggcgacagaggcgtgcccggcatcaagggcgacagaggcgagcccggccccagaggccaggacggcaaccccggcctgcccggcgagagaggcatggccggccccgagggcaagcccggcctgcagggccccagaggcccccccggccccgtgggcggccacggcgaccccggcccccccggcgcccccggcctggccggccccgccggcccccagggccccagcggcctgaagggcgagcccggcgagaccggcccccccggcagaggcctgaccggccccaccggcgccgtgggcctgcccggcccccccggccccagcggcctggtgggcccccagggcagccccggcctgcccggccaggtgggcgagaccggcaagcccggcgcccccggcagagacggcgccagcggcaaggacggcgacagaggcagccccggcgtgcccggcagccccggcctgcccggccccgtgggccccaagggcgagcccggccccaccggcgcccccggccaggccgtggtgggcctgcccggcgccaagggcgagaagggcgcccccggcggcctggccggcgacctggtgggcgagcccggcgccaagggcgacagaggcctgcccggccccagaggcgagaagggcgaggccggcagagccggcgagcccggcgaccccggcgaggacggccagaagggcgcccccggccccaagggcttcaagggcgaccccggcgtgggcgtgcccggcagccccggcccccccggcccccccggcgtgaagggcgacctgggcctgcccggcctgcccggcgcccccggcgtggtgggcttccccggccagaccggccccagaggcgagatgggccagcccggccccagcggcgagagaggcctggccggcccccccggcagagagggcatccccggccccctgggcccccccggcccccccggcagcgtgggcccccccggcgccagcggcctgaagggcgacaagggcgaccccggcgtgggcctgcccggccccagaggcgagagaggcgagcccggcatcagaggcgaggacggcagacccggccaggagggccccagaggcctgaccggcccccccggcagcagaggcgagagaggcgagaagggcgacgtgggcagcgccggcctgaagggcgacaagggcgacagcgccgtgatcctgggcccccccggccccagaggcgccaagggcgacatgggcgagagaggccccagaggcctggacggcgacaagggccccagaggcgacaacggcgaccccggcgacaagggcagcaagggcgagcccggcgacaagggcagcgccggcctgcccggcctgagaggcctgctgggcccccagggccagcccggcgccgccggcatccccggcgaccccggcagccccggcaaggacggcgtgcccggcatcagaggcgagaagggcgacgtgggcttcatgggccccagaggcctgaagggcgagagaggcgtgaagggcgcctgcggcctggacggcgagaagggcgacaagggcgaggccggcccccccggcagacccggcctggccggccacaagggcgagatgggcgagcccggcgtgcccggccagagcggcgcccccggcaaggagggcctgatcggccccaagggcgacagaggcttcgacggccagcccggccccaagggcgaccagggcgagaagggcgagagaggcacccccggcatcggcggcttccccggccccagcggcaacgacggcagcgccggcccccccggcccccccggcagcgtgggccccagaggccccgagggcctgcagggccagaagggcgagagaggcccccccggcgagagagtggtgggcgcccccggcgtgcccggcgcccccggcgagagaggcgagcagggcagacccggccccgccggccccagaggcgagaagggcgaggccgccctgaccgaggacgacatcagaggcttcgtgagacaggagatgagccagcactgcgcctgccagggccagttcatcgccagcggcagcagacccctgcccagctacgccgccgacaccgccggcagccagctgcacgccgtgcccgtgctgagagtgagccacgccgaggaggaggagagagtgccccccgaggacgacgagtacagcgagtacagcgagtacagcgtggaggagtaccaggaccccgaggccccctgggacagcgacgacccctgcagcctgcccctggacgagggcagctgcaccgcctacaccctgagatggtaccacagagccgtgaccggcagcaccgaggcctgccaccccttcgtgtacggcggctgcggcggcaacgccaacagattcggcaccagagaggcctgcgagagaagatgcccccccagagtggtgcagagccagggcaccggcaccgcccaggactag

SEQ ID NO: 1420 - DNA, 8739 bp, Artificial Sequence
  derived and/or modified sequence
atgaccctgagactgctggtggccgccctgtgcgccggcatcctggccgaggcccccagagtgagagcccagcacagagagagagtgacctgcaccagactgtacgccgccgacatcgtgttcctgctggacggcagcagcagcatcggcagaagcaacttcagagaggtgagaagcttcctggagggcctggtgctgcccttcagcggcgccgccagcgcccagggcgtgagattcgccaccgtgcagtacagcgacgaccccagaaccgagttcggcctggacgccctgggcagcggcggcgacgtgatcagagccatcagagagctgagctacaagggcggcaacaccagaaccggcgccgccatcctgcacgtggccgaccacgtgttcctgccccagctggccagacccggcgtgcccaaggtgtgcatcctgatcaccgacggcaagagccaggacctggtggacaccgccgcccagagactgaagggccagggcgtgaagctgttcgccgtgggcatcaagaacgccgaccccgaggagctgaagagagtggccagccagcccaccagcgacttcttcttcttcgtgaacgacttcagcatcctgagaaccctgctgcccctggtgagcagaagagtgtgcaccaccgccggcggcgtgcccgtgaccagaccccccgacgacagcaccagcgcccccagagacctggtgctgagcgagcccagcagccagagcctgagagtgcagtggaccgccgccagcggccccgtgaccggctacaaggtgcagtacacccccctgaccggcctgggccagcccctgcccagcgagagacaggaggtgaacgtgcccgccggcgagaccagcgtgagactgagaggcctgagacccctgaccgagtaccaggtgaccgtgatcgccctgtacgccaacagcatcggcgaggccgtgagcggcaccgccagaaccaccgccctggagggccccgagctgaccatccagaacaccaccgcccacagcctgctggtggcctggagaagcgtgcccggcgccaccggctacagagtgacctggagagtgctgagcggcggccccacccagcagcaggagctgggccccggccagggcagcgtgctgctgagagacctggagcccggcaccgactacgaggtgaccgtgagcaccctgttcggcagaagcgtgggccccgccaccagcctgatggccagaaccgacgccagcgtggagcagaccctgagacccgtgatcctgggccccaccagcatcctgctgagctggaacctggtgcccgaggccagaggctacagactggagtggagaagagagaccggcctggagcccccccagaaggtggtgctgcccagcgacgtgaccagataccagctggacggcctgcagcccggcaccgagtacagactgaccctgtacaccctgctggagggccacgaggtggccacccccgccaccgtggtgcccaccggccccgagctgcccgtgagccccgtgaccgacctgcaggccaccgagctgcccggccagagagtgagagtgagctggagccccgtgcccggcgccacccagtacagaatcatcgtgagaagcacccagggcgtggagagaaccctggtgctgcccggcagccagaccgccttcgacctggacgacgtgcaggccggcctgagctacaccgtgagagtgagcgccagagtgggccccagagagggcagcgccagcgtgctgaccgtgagaagagagcccgagacccccctggccgtgcccggcctgagagtggtggtgagcgacgccaccagagtgagagtggcctggggccccgtgcccggcgccagcggcttcagaatcagctggagcaccggcagcggccccgagagcagccagaccctgccccccgacagcaccgccaccgacatcaccggcctgcagcccggcaccacctaccaggtggccgtgagcgtgctgagaggcagagaggagggccccgccgccgtgatcgtggccagaaccgaccccctgggccccgtgagaaccgtgcacgtgacccaggccagcagcagcagcgtgaccatcacctggaccagagtgcccggcgccaccggctacagagtgagctggcacagcgcccacggccccgagaagagccagctggtgagcggcgaggccaccgtggccgagctggacggcctggagcccgacaccgagtacaccgtgcacgtgagagcccacgtggccggcgtggacggcccccccgccagcgtggtggtgagaaccgcccccgagcccgtgggcagagtgagcagactgcagatcctgaacgccagcagcgacgtgctgagaatcacctgggtgggcgtgaccggcgccaccgcctacagactggcctggggcagaagcgagggcggccccatgagacaccagatcctgcccggcaacaccgacagcgccgagatcagaggcctggagggcggcgtgagctacagcgtgagagtgaccgccctggtgggcgacagagagggcacccccgtgagcatcgtggtgaccaccccccccgaggccccccccgccctgggcaccctgcacgtggtgcagagaggcgagcacagcctgagactgagatgggagcccgtgcccagagcccagggcttcctgctgcactggcagcccgagggcggccaggagcagagcagagtgctgggccccgagctgagcagctaccacctggacggcctggagcccgccacccagtacagagtgagactgagcgtgctgggccccgccggcgagggccccagcgccgaggtgaccgccagaaccgagagccccagagtgcccagcatcgagctgagagtggtggacaccagcatcgacagcgtgaccctggcctggacccccgtgagcagagccagcagctacatcctgagctggagacccctgagaggccccggccaggaggtgcccggcagcccccagaccctgcccggcatcagcagcagccagagagtgaccggcctggagcccggcgtgagctacatcttcagcctgacccccgtgctggacggcgtgagaggccccgaggccagcgtgacccagacccccgtgtgccccagaggcctggccgacgtggtgttcctgccccacgccacccaggacaacgcccacagagccgaggccaccagaagagtgctggagagactggtgctggccctgggccccctgggcccccaggccgtgcaggtgggcctgctgagctacagccacagacccagccccctgttccccctgaacggcagccacgacctgggcatcatcctgcagagaatcagagacatgccctacatggaccccagcggcaacaacctgggcaccgccgtggtgaccgcccacagatacatgctggcccccgacgcccccggcagaagacagcacgtgcccggcgtgatggtgctgctggtggacgagcccctgagaggcgacatcttcagccccatcagagaggcccaggccagcggcctgaacgtggtgatgctgggcatggccggcgccgaccccgagcagctgagaagactggcccccggcatggacagcgtgcagaccttcttcgccgtggacgacggccccagcctggaccaggccgtgagcggcctggccaccgccctgtgccaggccagcttcaccacccagcccagacccgagccctgccccgtgtactgccccaagggccagaagggcgagcccggcgagatgggcctgagaggccaggtgggcccccccggcgaccccggcctgcccggcagaaccggcgcccccggcccccagggcccccccggcagcgccaccgccaagggcgagagaggcttccccggcgccgacggcagacccggcagccccggcagagccggcaaccccggcacccccggcgcccccggcctgaagggcagccccggcctgcccggccccagaggcgaccccggcgagagaggccccagaggccccaagggcgagcccggcgcccccggccaggtgatcggcggcgagggccccggcctgcccggcagaaagggcgaccccggccccagcggcccccccggccccagaggccccctgggcgaccccggccccagaggcccccccggcctgcccggcaccgccatgaagggcgacaagggcgacagaggcgagagaggcccccccggccccggcgagggcggcatcgcccccggcgagcccggcctgcccggcctgcccggcagccccggcccccagggccccgtgggcccccccggcaagaagggcgagaagggcgacagcgaggacggcgcccccggcctgcccggccagcccggcagccccggcgagcagggccccagaggcccccccggcgccatcggccccaagggcgacagaggcttccccggccccctgggcgaggccggcgagaagggcgagagaggcccccccggccccgccggcagcagaggcctgcccggcgtggccggcagacccggcgccaagggccccgagggcccccccggccccaccggcagacagggcgagaagggcgagcccggcagacccggcgaccccgccgtggtgggccccgccgtggccggccccaagggcgagaagggcgacgtgggccccgccggccccagaggcgccaccggcgtgcagggcgagagaggcccccccggcctggtgctgcccggcgaccccggccccaagggcgaccccggcgacagaggccccatcggcctgaccggcagagccggcccccccggcgacagcggcccccccggcgagaagggcgaccccggcagacccggcccccccggccccgtgggccccagaggcagagacggcgaggtgggcgagaagggcgacgagggcccccccggcgaccccggcctgcccggcaaggccggcgagagaggcctgagaggcgcccccggcgtgagaggccccgtgggcgagaagggcgaccagggcgaccccggcgaggacggcagaaacggcagccccggcagcagcggccccaagggcgacagaggcgagcccggcccccccggcccccccggcagactggtggacaccggccccggcgccagagagaagggcgagcccggcgacagaggccaggagggccccagaggccccaagggcgaccccggcctgcccggcgcccccggcgagagaggcatcgagggcttcagaggcccccccggcccccagggcgaccccggcgtgagaggccccgccggcgagaagggcgacagaggcccccccggcctggacggcagaagcggcctggacggcaagcccggcgccgccggccccagcggccccaacggcgccgccggcaaggccggcgaccccggcagagacggcctgcccggcctgagaggcgagcagggcctgcccggccccagcggcccccccggcctgcccggcaagcccggcgaggacggcaagcccggcctgaacggcaagaacggcgagcccggcgaccccggcgaggacggcagaaagggcgagaagggcgacagcggcgccagcggcagagagggcttccccggcgtgcccggcggcaccggccccaagggcgacagaggcgagaccggcagcaagggcgagcagggcctgcccggcgagagaggcctgagaggcgagcccggcagcgtgcccaacgtggacagactgctggagaccgccggcatcaaggccagcgccctgagagagatcgtggagacctgggacgagagcagcggcagcttcctgcccgtgcccgagagaagaagaggccccaagggcgacagcggcgagcagggcccccccggcaaggagggccccatcggcttccccggcgagagaggcctgaagggcgacagaggcgaccccggcccccagggcccccccggcctggccctgggcgagagaggcccccccggccccagcggcctggccggcgagcccggcaagcccggcatccccggcctgcccggcagagccggcggcgtgggcgaggccggcagacccggcgagagaggcgagagaggcgagaagggcgagagaggcgagcagggcagagacggcccccccggcctgcccggcacccccggcccccccggcccccccggccccaaggtgagcgtggacgagcccggccccggcctgagcggcgagcagggcccccccggcctgaagggcgccaagggcgagcccggcagcaacggcgaccagggccccaagggcgacagaggcgtgcccggcatcaagggcgacagaggcgagcccggccccagaggccaggacggcaaccccggcctgcccggcgagagaggcatggccggccccgagggcaagcccggcctgcagggccccagaggcccccccggccccgtgggcggccacggcgaccccggcccccccggcgcccccggcctggccggccccgccggcccccagggccccagcggcctgaagggcgagcccggcgagaccggcccccccggcagaggcctgaccggccccaccggcgccgtgggcctgcccggcccccccggccccagcggcctggtgggcccccagggcagccccggcctgcccggccaggtgggcgagaccggcaagcccggcgcccccggcagagacggcgccagcggcaaggacggcgacagaggcagccccggcgtgcccggcagccccggcctgcccggccccgtgggccccaagggcgagcccggccccaccggcgcccccggccaggccgtggtgggcctgcccggcgccaagggcgagaagggcgcccccggcggcctggccggcgacctggtgggcgagcccggcgccaagggcgacagaggcctgcccggccccagaggcgagaagggcgaggccggcagagccggcgagcccggcgaccccggcgaggacggccagaagggcgcccccggccccaagggcttcaagggcgaccccggcgtgggcgtgcccggcagccccggcccccccggcccccccggcgtgaagggcgacctgggcctgcccggcctgcccggcgcccccggcgtggtgggcttccccggccagaccggccccagaggcgagatgggccagcccggccccagcggcgagagaggcctggccggcccccccggcagagagggcatccccggccccctgggcccccccggcccccccggcagcgtgggcccccccggcgccagcggcctgaagggcgacaagggcgaccccggcgtgggcctgcccggccccagaggcgagagaggcgagcccggcatcagaggcgaggacggcagacccggccaggagggccccagaggcctgaccggcccccccggcagcagaggcgagagaggcgagaagggcgacgtgggcagcgccggcctgaagggcgacaagggcgacagcgccgtgatcctgggcccccccggccccagaggcgccaagggcgacatgggcgagagaggccccagaggcctggacggcgacaagggccccagaggcgacaacggcgaccccggcgacaagggcagcaagggcgagcccggcgacaagggcagcgccggcctgcccggcctgagaggcctgctgggcccccagggccagcccggcgccgccggcatccccggcgaccccggcagccccggcaaggacggcgtgcccggcatcagaggcgagaagggcgacgtgggcttcatgggccccagaggcctgaagggcgagagaggcgtgaagggcgcctgcggcctggacggcgagaagggcgacaagggcgaggccggcccccccggcagacccggcctggccggccacaagggcgagatgggcgagcccggcgtgcccggccagagcggcgcccccggcaaggagggcctgatcggccccaagggcgacagaggcttcgacggccagcccggccccaagggcgaccagggcgagaagggcgagagaggcacccccggcatcggcggcttccccggccccagcggcaacgacggcagcgccggcccccccggcccccccggcagcgtgggccccagaggccccgagggcctgcagggccagaagggcgagagaggcccccccggcgagagagtggtgggcgcccccggcgtgcccggcgcccccggcgagagaggcgagcagggcagacccggccccgccggccccagaggcgagaagggcgaggccgccctgaccgaggacgacatcagaggcttcgtgagacaggagatgagccagcactgcgcctgccagggccagttcatcgccagcggcagcagacccctgcccagctacgccgccgacaccgccggcagccagctgcacgccgtgcccgtgctgagagtgagccacgccgaggaggaggagagagtgccccccgaggacgacgagtacagcgagtacagcgagtacagcgtggaggagtaccaggaccccgaggccccctgggacagcgacgacccctgcagcctgcccctggacgagggcagctgcaccgcctacaccctgagatggtaccacagagccgtgaccggcagcaccgaggcctgccaccccttcgtgtacggcggctgcggcggcaacgccaacagattcggcaccagagaggcctgcgagagaagatgcccccccagagtggtgcagagccagggcaccggcaccgcccaggactag

SEQ ID NO: 1421 - DNA, 8835 bp, Artificial Sequence
  derived and/or modified sequence
atgactctgcgcttgctggttgccgctttgtgcgcaggaatcctggcggaagctcccagagtccgcgctcagcaccgggagcgcgtaacgtgcacccggttgtacgccgccgacatcgttttcttgttggacgggtcttcatctataggccggtccaatttcagggaggtccgcagttttctcgagggtctggtgctcccttttagtggggcggcctcagcgcaaggggttagatttgcaacggtccagtattctgatgatcctcgcaccgaatttggactcgacgccttggggtctggcggtgatgtcatccgcgcaataagggagctttcatataagggaggaaacacacgcacaggagctgcaattctccacgttgccgatcacgtgtttctccctcagctcgctagaccgggggttcctaaagtctgtattctgattaccgacggtaaaagtcaggaccttgtggacacagctgcccagaggctcaaaggccagggagtgaagctgtttgcagtgggcatcaagaatgcagatcccgaggagctcaagcgtgtcgcaagtcagccaacgagcgattttttcttcttcgtgaatgatttcagcatcctccgtactctgctccccttggtgagtcggagggtgtgtaccactgcaggaggcgtgcctgtgactagaccacccgatgattctacctcagctcccagggatctggtactatctgagccctcctcccagtcattaagggttcaatggacagctgcctccgggccagtcaccggatacaaggtacagtacacacctcttaccggactgggacagccgctgccttctgaaaggcaggaagttaacgttccagccggggagacctcagtgagattgcgtggcctgcggccattaacagagtatcaggtaactgtgatcgccctttatgctaattccataggtgaggctgtgtctggaaccgctagaacaacagctctggagggcccagaacttacaatccagaatactaccgcccacagtctgctagtcgcctggcgttctgtcccaggggcaacaggttaccgggtgacatggcgtgtcctaagcggggggccgacccagcagcaggagctcggccctgggcagggcagcgtcctgctgcgcgacttggagcctggcaccgactacgaggtcactgtgagcactctgtttggccggagcgttggccccgccacatctcttatggcaaggactgacgccagtgtagaacagacgctgcggccagttatactcggacctacctccattctgctctcctggaatctcgtgcctgaggcacgaggctatcggctggagtggaggcgggagacggggctcgagccacctcaaaaggtagtcctccccagcgacgtgaccagataccaactggatgggctccagcctggcacggagtacagactgacgctgtacaccctgctcgagggacatgaagtggccacaccagctacagttgtaccaacagggcctgagctcccagtctcccctgtaactgacctgcaggcaactgagctaccgggtcagagggtccgcgtatcctggtcacccgtgcccggcgccacgcagtatcgcattatagtgagatctactcagggagtggaacgaaccctggtactccctggctcccaaaccgcttttgatctggacgacgtgcaggctggtctgtcgtacactgttagggtctctgcccgcgttggaccacgggaagggtctgccagcgtgcttaccgttcggcgagaacctgaaacgccattggctgtccccggtctgagagtggttgtatctgatgccacgagggttcgcgttgcctggggacccgtgcccggcgctagtggcttcagaatttcatggtccacaggctcaggaccggagagcagtcagacgcttccgcctgatagcacggcaacggatatcaccggccttcagccaggcaccacctaccaagtggcggtctcagtgctgcggggccgagaagagggacctgccgccgtgatcgttgcccgtacggaccccctggggccagtccggacagtccatgtgactcaggcgtcctcttcatcggtgacaatcacctggacacgcgtgcccggcgccacaggatacagggttagctggcactccgcgcacggacctgaaaagtcccaattggtgtctggcgaggcaacagtggctgaactcgatgggcttgagccagacaccgagtacacggtgcacgtcagagctcatgttgctggcgtggacggacctcccgcatccgtggtggtgcggactgctccagagccagtgggaagagtgtctagactgcagatacttaacgcctcaagtgatgttctacgtataacttgggtgggggtcaccggagccactgcctaccgcctagcctggggtaggtcggagggagggcccatgcgccaccagattttgcctgggaacactgatagcgctgaaatccgcggactggaaggtggagttagctatagtgtccgggtgacagctctcgttggtgacagggaaggtacccccgtctcaattgtggtgacaaccccaccagaagcccctcctgctcttggtactctacacgtcgtgcagaggggcgagcattctcttagactcaggtgggagcccgtccctcgcgcccaggggtttcttctacactggcaaccagagggcgggcaagagcagagtcgggtgttgggcccagagttgagctcttaccacctggacggcctggaacccgccactcagtacagagtacgcctgtcggtattgggacctgcaggagagggacctagcgccgaagtgactgcgaggactgaatcacctcgcgtgccctctatagagttgcgcgtcgtggacactagcatcgatagtgtcactctggcatggactcccgttagtcgagcttctagctatatactttcctggagacctctgagggggcccggtcaggaggtgcctggctccccccaaacacttccgggtatctcctcatcgcagagagtcacagggctcgagcctggagtgagttacatcttcagcctcacaccggttctggacggcgtacgcggacctgaggcctctgttacccaaacaccagtttgcccccggggactcgctgacgtagtgttcctcccccatgccacgcaggacaatgctcatagagccgaagccacgcgacgggtcctggaacggctcgtgttggcattaggtccgctcggcccccaggccgtacaggtgggcctgttaagttattctcaccgtcccagtccactctttcctctcaacggctcacatgaccttggcattattctgcagcgaatccgtgatatgccctatatggatccgtccggcaacaatctaggtacagcagtagtcacagcgcacagatacatgctggcacccgacgcgcctggccggcgccagcacgtccccggcgtgatggtgttgcttgtggatgagccactgcgcggggacatctttagtcccatccgagaggcccaggctagtgggctgaatgtggtaatgttgggaatggctggggctgacccagaacaactgaggagacttgcaccaggcatggactccgtccagacattcttcgccgtggatgacgggccgtcactagatcaggctgtgtctggcctggctactgccctatgtcaagcatccttcactacccagccgcgacctgagccttgcccagtttattgccctaaaggccagaaaggggagccaggcgagatgggcctgcgaggccaggttggtccgcctggcgatcccgggctgccgggacgaaccggcgcccctggaccgcagggaccgccaggtagcgccactgctaaaggcgagcgcggttttccgggggctgatgggagacctggctcccccgggagggctggcaatcctggtacaccaggggctcctgggctgaaggggtctccgggccttcccgggcctagaggcgaccccggcgaacgcggcccacgcgggcctaaaggtgagccaggagcccccggacaggtaattgggggtgaaggtcccggattgcccggccgtaaaggggaccccggtccaagtggaccccccggccctagaggccccctcggggaccccggccccagaggcccgcccggcctcccaggcacagcaatgaagggcgataagggcgatagaggcgaacggggacccccaggacctggggaaggtggcatcgctcctggcgaacccggtttgccaggcctacccggctctcccgggccccaagggcctgtgggaccccctggcaaaaagggcgagaagggagacagcgaggatggagcacccggattgccaggtcagccaggttccccaggagagcaagggccacggggccccccaggagccatcggtcctaagggcgaccggggattccctggcccgttgggggaggccggtgagaagggagaaagggggccaccaggaccagctggttccaggggactccccggggtggccgggcggcctggggccaagggccccgaagggcctcctggaccaaccggccgccaaggtgaaaaaggggaacctgggagacctggggaccctgcagtggtgggacctgccgtagccggccccaagggagagaagggagacgtcggaccagccggaccccgaggggctacaggcgtgcagggcgaacgcggcccgcctggccttgttctgcccggcgaccctggccctaaaggggatccaggcgatcgagggcccatcggattgaccggaagagctggcccacctggtgactccggcccccccggagaaaagggtgatcccggaaggccaggcccccctggtccggtggggccccgaggtcgtgatggagaggtaggcgaaaagggggatgaaggccctcccggtgaccccggcttgccaggcaaggccggtgaacgtggccttaggggcgctcctggcgtgcgcgggcctgttggggaaaagggagaccagggcgatccaggtgaggatggcaggaatggaagccccgggagtagcgggcccaaaggggacagaggggagccagggcccccaggcccacctggacgactggtggacaccggtccgggcgccagggaaaagggggagcccggcgataggggccaggagggtccacgcggtccaaagggagatccggggctccccggtgccccaggcgaaagggggattgaaggattccgaggcccccccggccctcagggtgaccccggcgtgcgcggccctgctggagaaaaaggcgaccgggggccccctgggcttgatggaagaagcggtctggatggcaagcccggtgccgcaggaccttccggtcctaatggggctgctggtaaagctggagacccaggacgcgacgggctgcctggcttacgtggagaacagggcctgcctgggccaagcgggccccctggccttcccggcaaacccggagaagacgggaaaccaggcttaaatggcaaaaacggcgaacccggagacccaggtgaggacggccggaaaggcgagaaaggtgactccggagcttctggcagggaagggcgagatggccccaagggggagcggggggctcctggcattttagggcctcaagggcctcccggccttcctggccccgtcggcccgcccggccagggatttcctggagtacctggagggactggaccaaagggggatagaggtgaaacaggtagcaagggggaacagggcctcccaggagagcgggggctgcggggggaacccgggtctgtgcctaatgtggaccgccttctggaaacagcgggtattaaggctagcgctctcagggaaatagtagagacatgggatgaaagtagcggcagtttcctcccagtgcccgagcggcgcaggggacctaaaggagactcaggggaacaaggaccgcctggcaaagaggggccaatcggctttccaggtgaacggggcttaaagggcgacaggggcgaccccgggccccagggccccccggggttggctctgggtgagcggggcccccccggcccttccggacttgcaggagagcccgggaaacccggtatcccagggttgccgggtagagcagggggcgtgggggaggccggaagaccaggtgaaaggggagagcgaggagagaaaggagaacgcggggaacagggcagagatggcccgcctgggctccccgggacaccgggaccacctggccctccagggccgaaggtaagtgtggacgaacccggccccggcttgtccggtgagcaaggcccacccggactgaagggtgctaagggggagcctggtagcaacggcgatcaggggccgaaaggagacagaggcgtgcctggcattaagggggaccgcggagaaccggggccacgtgggcaggacggcaatcctgggctacctggcgagcggggtatggccgggcctgaagggaagccaggcctgcaagggccgagaggccctccgggacctgttggtggacacggagaccctggacccccaggcgcccctggactcgcaggacccgcaggcccacaaggcccttcaggattaaagggagaacctggagagaccggaccccccggccgtggactcacaggccccacaggtgctgtgggattaccaggacccccaggtccatcaggtctggttggaccccagggttctcctggactgccaggccaagtcggggagaccggcaagcctggtgcccctggtcgtgatggcgcgtctggcaaggatggcgacagaggcagtcccggcgtgccaggatccccaggcctgcccggacctgtggggcctaaaggggaacctggccctactggggctcctgggcaggctgtagtgggcttgccaggcgccaaaggcgaaaaaggtgcccccggcgggctggctggcgacctggtgggggagcctggagcgaagggtgacagaggtttaccaggccccagaggggagaagggcgaagctggaagagctggtgagcccggcgacccaggagaagatggtcagaaaggcgccccagggccaaaggggttcaaaggggacccaggggtgggcgtgccggggtcacctggacctccagggcctcctggggtgaaaggcgacctgggacttccaggtctgcccggagcgcccggggtggtcgggttccccggacaaacgggccctagaggtgagatgggacagcccggaccatctggtgaacgcgggttggcggggcccccgggaagggaaggcatccctgggcctcttggacctcccggccccccggggagcgtcggcccgcccggcgcgtccggcctgaagggagataagggtgacccaggggttgggctacctggccctcggggggaacgtggcgaacctggaatccgcggtgaggatggccgtccgggccaggaaggcccgagaggcctcactgggcctccaggtagccggggagaaaggggagagaaaggtgacgtcggctcagccgggcttaagggggataagggcgactctgcagttattctgggacctccaggccctaggggcgccaagggagacatgggggagcgtggccctcggggcctggatggcgacaaggggcctcgaggggataatggcgaccctggagacaaaggtagtaagggggagccaggcgataaagggtcagcgggcctcccggggctgcgcgggcttctgggtccgcagggacagcctggggcggccgggattcccggggaccccggcagccccggcaaggacggtgttccagggattaggggtgagaagggagacgtggggttcatgggaccacgtggactaaagggtgaacgtggcgtgaaaggcgcatgcggtctggatggcgaaaaaggtgataaaggtgaggctggcccccctggccggcccggattagccggccataagggagagatgggggaacctggcgtcccaggacagagcggcgcacctggtaaggaggggttgatcggcccaaaaggagatcgtggcttcgacggtcagccaggaccaaagggagaccaaggggagaaaggggaacgcggtactccagggataggaggctttcccggcccttctgggaatgacgggtcggcagggcctcctggtcctcctgggtcggttgggcctcggggccctgaggggctgcagggccaaaaaggcgaaaggggtccacccggcgaacgagttgttggcgcacctggggtcccaggtgccccaggagagcgaggagaacagggacgacctggaccagctgggccaaggggggaaaaaggagaggctgccttgacggaagacgacatacgcggttttgttaggcaagaaatgagtcaacattgtgcctgccagggacagtttattgcttcaggcagcagacccttgccctcctatgctgcggacaccgcagggtcccaattgcatgcggtccctgtgctgcgcgtgagtcatgcggaagaagaagagcgcgttccacccgaggacgatgaatattctgaatactccgagtactctgtggaagaataccaagaccctgaggccccttgggactccgatgacccatgttcgttacctctggacgaaggctcctgcactgcatacactctccgctggtatcatagagcagttactggatctacagaggcctgccacccattcgtgtacggcggctgcggaggcaacgctaacaggtttggaacccgcgaggcctgcgaaagacgctgtcccccgcgtgtggtacagtcccaaggcactggaaccgcccaggattag

SEQ ID NO: 1422 - DNA, 8739 bp, Artificial Sequence
  derived and/or modified sequence
atgaccttgaggttgctcgtggcagcactgtgcgcagggatcctggcggaggcacctcgcgtaagggctcagcatagggaacgcgttacttgcacaaggctctacgcagctgatatcgtcttcctgctcgatggcagctcttcaattggcagatccaacttcagggaagtccggtccttcctggaggggctggtcttgccgttttccggcgcagcttctgcccagggggttcgtttcgctaccgtccagtattccgacgatccacggaccgagtttggtttagacgccctgggctctggaggggacgtcattcgcgccatcagagaactatcatataaaggtggaaacacgagaacaggggctgctatcctccacgtggctgaccacgtctttctccctcagttggcacgcccgggagtgccaaaagtgtgtattctgatcacagacggcaagtcgcaggacctcgtagacactgccgctcagcgcttgaaaggccaaggcgttaaactgtttgccgttggtattaaaaatgctgaccctgaagagctgaagcgcgttgcctcccagcccacttctgacttctttttttttgtgaatgacttcagtatcctccgcaccttgcttccactcgtttccagaagggtctgcaccacagcggggggcgttcccgtgacccggcctccggatgacagcacatcagccccaagggatctggtgctgtctgagccttctagccaaagcctaagagtgcagtggacagctgcatctgggcccgtgaccggatataaggtgcagtacacaccgctgaccggcctgggacaacccctgccctcagagaggcaagaggtcaatgtgcccgccggggagacaagcgtccgactacgaggcctccgccccttgaccgaatatcaagtgacagttattgcactttacgcaaactcaatcggcgaggctgtttccgggacagctaggaccaccgcactggaagggcccgagctcactattcagaatacgacagcacactccctgctggtcgcgtggaggtccgtaccaggcgccaccggctacagagtgacatggagggtgctaagcggcgggcctacacagcaacaggagctcggtccaggacagggctccgttctgcttagggacctggagcccggaaccgactacgaggtgaccgtcagcaccctctttggtcggtccgtggggcccgctacaagcttgatggccagaacagacgcttccgtagaacagaccctgcgaccagtgattcttggccccaccagtattctactctcttggaatctcgtacccgaggctcgggggtatcggttagagtggagaagagaaaccgggctggagcctcctcagaaggtagtgctcccctcagacgtcaccagatatcagctggacggcctgcagccagggactgagtatcgactgacactttacacactcttggaggggcacgaagtggccacccccgccaccgtggttcctactggtccggagctgccagtgtctcctgttaccgatctgcaagcaacagagttgcccgggcagagggtaagagtgtcctggagccccgtgcccggtgccacccagtaccgtatcattgtaagatcgacccagggtgttgagaggactctcgtccttcctggatctcagaccgcctttgacctcgatgacgtgcaggcagggctatcttatacggtcagagtgtccgcaagagtgggtccccgggagggctctgcctcggtgctaacagttaggcgcgagccagagactccgctggccgtgcctgggttgcgcgtcgtggtctcagatgccactagggtgagagtcgcttggggccccgtccctggtgcatccggatttcgaatatcttggtctacaggctcgggccccgagtcatctcagaccttgccccctgattctacagcaacagacattactgggttacaacctggcaccacttatcaagtggctgtgagtgtcctacgcggaagggaagaaggcccagcggcagtgatagttgccaggacagacccactcggaccggtgcggacagttcatgtgactcaagctagctccagcagtgtcaccatcacttggacccgggttcccggcgctactggttatcgggtctcgtggcacagtgcccacggtccagagaaatctcagctggtgagtggggaagccacagtggccgagcttgacggtcttgaacccgacaccgaatacactgttcacgtgcgcgcacacgtggctggagtagatggacccccagccagtgtggtggtccgtacagcacctgagccggtcggacgggtgtcacggctccagatccttaacgccagcagcgatgtgctcagaatcacatgggtgggcgtcaccggcgccaccgcctatcgcctcgcttgggggaggagtgaaggggggcccatgcggcaccagatactccctggcaataccgattccgcagagatccgcggcctcgagggcggcgtctcctacagcgtgcgtgttaccgccctcgtgggcgaccgcgaaggaaccccagtctcaattgtagtaactactcctcccgaagccccaccggcgctgggcacgcttcacgtcgtccagcggggggagcacagcttgagactcaggtgggagcccgttcctagagcccaggggtttttactccactggcagcctgagggcgggcaggagcagtctcgagtgttgggccctgaactctcctcctatcatttagacggcctggaaccagcgacgcagtatagagtgcgattgtctgtgctgggccctgctggcgagggcccgagcgcggaagttacggctcgaacagagagtcccagagtgccaagtatcgaactcagggtcgtggacacctctattgactcggtgaccctagcatggacacctgtgtctagggcttcctcctatattctgtcctggcgaccgcttagaggaccaggccaagaagtgccgggttccccccagacactgcccggtatttcaagcagtcaacgagtcaccggtctagagcctggcgtctcctacatcttcagtcttacccctgtcttggacggtgtgaggggaccagaggcttccgtaacccagacccctgtgtgcccacgaggattggcggatgtggtgttcctgcctcacgccactcaagacaatgcacatcgggctgaggctaccagacgcgtcttagagaggcttgtactggccttgggtcccctgggaccgcaggccgtgcaagtaggacttcttagctatagccaccgtcccagtccactatttcccctgaatggatcacatgacctaggtattatactgcagcgcattcgggacatgccctatatggacccatcgggcaacaacttaggcacagccgtggttactgcccatcgctacatgttagcgccagacgcgcccggacgcagacaacacgtccccggcgtcatggtgcttttagtggacgaaccactgagaggggacatattctcccctatccgggaggcacaggcctctggtcttaatgtggtgatgttggggatggctggcgccgaccccgaacagctccgaaggctggccccaggcatggactcagtgcagaccttttttgcagtcgatgatggtccatccctggaccaggctgtgtctggactcgctaccgcactttgccaggcgtcctttactacccagcccagacccgagccttgccccgtctactgccctaaaggacaaaaaggggaacctggcgaaatgggtcttcgtggtcaagttggcccccccggcgaccccggtctccccggtcggactggcgcccccgggccgcagggacctccggggtccgcgaccgccaagggcgagcgcggtttccctggagccgatgggcgccctggctcacctggccgcgctggaaatccaggtacccctggggccccaggcctgaaaggttcaccaggattaccaggacctcgcggggatcccggcgagcgcggccctaggggcccgaaaggcgagccaggagctcctggtcaggtcatcggcggcgaggggcccgggctcccgggacggaagggagaccccggcccgtctggccctccaggcccacgggggccactcggtgaccccggcccgcgaggaccgccgggcctgcctggcactgccatgaaaggcgataagggagataggggggaacgaggacctccaggcccaggtgagggtgggattgctcctggtgaaccaggactgcctgggctgcccggtagtcccgggcctcagggccccgtgggtccacccggaaaaaagggggagaaaggggattcagaggatggggcacccggacttccggggcagcctggcagccccggcgagcaggggcctagggggcccccaggtgccattgggccgaagggtgatagagggttccctggtccactgggcgaagcgggagaaaaaggcgaacgggggcctcccggccctgccggatcccgaggtcttcccggggtcgcgggacgacccggtgctaaggggccggagggacccccaggcccgacgggccgacaaggtgaaaagggtgagcccggtaggccgggggatcccgccgtcgtggggcccgcagtcgcgggtcctaaaggtgaaaaaggggatgtgggacccgcgggaccacggggcgccacaggtgtgcagggagagcgcggaccgcctggcttagtgctgccaggggacccggggcctaaaggagatccaggcgaccgcgggcccattggtctcaccggaagagcaggtcccccaggcgatagcgggccgccaggggaaaagggagaccctggccggcccggcccccccggcccagtcggaccgagaggccgagatggcgaagtgggtgagaaaggagacgaagggccaccaggcgatcctggactgccaggaaaagccggagaaaggggcctacggggcgcacccggtgtgagagggcccgtcggagaaaaaggcgaccagggcgacccgggcgaagacggaagaaacggtagtccaggatcatctggtcccaagggagaccgcggcgaaccagggccaccaggtccacctggccggctcgttgatacggggccaggagctagggagaaaggcgaacctggggatagggggcaggagggacctcggggcccgaagggcgatccaggtctgcccggcgctcctggagagcgcggaattgaaggatttcgagggccgccaggcccccagggtgacccgggcgtaaggggccctgctggcgagaagggggaccggggcccacctggccttgacggcaggtcgggtctggatggaaagcctggtgctgccggccccagtggcccaaacggagctgccgggaaggcgggagacccgggaagggatggactgccaggcctgaggggcgagcaggggttgcccggcccatccggacctccgggcctcccaggaaagcctggggaggatggaaaacccgggcttaatggcaagaatggagaacctggcgaccctggggaagatggtcggaagggtgagaaaggtgatagcggcgcttcgggcagggaaggattcccgggggtaccaggcggcacgggacccaaaggcgaccggggggaaacaggatccaagggcgagcaggggctgcccggtgagaggggcctgaggggggaaccgggctcagtgcccaacgttgacagactgttggagaccgcagggatcaaggccagtgctttgcgggagatcgttgaaacttgggatgaatcctctggaagcttccttcctgtgccagagaggcgccgaggtcctaagggcgacagtggcgaacaggggccacccgggaaggagggtcccattggctttcctggggaaagaggcctaaagggcgatcgtggcgaccccggccctcagggcccgcccggcctggccctaggggaacggggacctccaggtcctagtgggctagccggtgagccgggcaaaccaggaatccccgggctgcctggccgggcaggtggagtgggagaggccggacgcccaggcgagcgaggagaacgaggcgaaaagggtgagagaggcgagcaggggagagacggcccacctggcctgcctggtacacccgggcctcccggcccccccggccctaaagtatccgtggacgaacccggacctggcttaagcggcgagcaaggacccccagggctgaagggtgccaagggggaacctggcagtaatggagaccagggccccaagggcgatcgcggagtgccgggcattaagggagatagaggggaaccaggccctcggggacaggatggtaatccaggtttacccggcgaacggggcatggctgggccagagggcaagcctgggctgcaggggccacgcggcccccccgggccagtgggcgggcacggagacccaggcccgcccggagcccccggcctggcaggtcccgctggccctcaggggcccagcgggctgaagggagaacccggcgagactggcccccctggcaggggtctgactggaccaacgggcgccgtgggcctgcccggacccccggggccctctggccttgtgggccctcaggggtcacccgggctccccggacaggtcggagaaaccggaaaacctggtgcgcctggccgggatggtgcctcaggtaaagatggtgataggggaagccccggcgttcccgggagccccgggctgccaggcccagtgggtccgaaaggggagcccggtcccacaggcgctccaggccaggccgtggtgggcctgccaggcgccaaaggtgaaaagggcgccccaggaggcctagcgggcgacttggtcggagaaccaggcgccaaaggcgatcggggcctgccagggccgcggggcgagaagggtgaagccggtcgggccggagagccaggagaccccggtgaagatggccagaagggcgcgccaggacccaagggattcaagggcgatcccggcgttggtgtcccaggctctccaggtcctcccgggccacccggcgtgaaaggagacctcggtcttccaggtctgccaggtgcccccggcgttgtcggcttcccagggcagaccggcccgcgcggcgaaatgggtcaacctgggcctagtggggagagaggcctcgctggcccaccaggtagggaaggcattcctggaccactcggcccacccggaccacctggctctgtgggtccccccggcgctagcggcttaaagggcgacaaaggcgacccgggcgtcggccttcccggcccccgcggcgagaggggcgagccagggatccgaggcgaagatggccggccagggcaggaagggccgcggggtcttacgggaccacccgggagcagaggagaacggggagagaaaggcgatgtggggagtgccgggctgaaaggagacaagggagactccgctgtgatcctggggcctcctggaccccgcggcgctaagggggatatgggggagaggggaccacgggggctcgatggggataagggccctcggggagacaacggggatcccggagataagggttccaagggtgaacccggcgataaaggcagtgctgggcttccaggtctgcgcgggcttttagggcctcaaggccaacctggcgcggcgggaattcccggagacccaggctccccagggaaggatggagttcctggcattagaggagagaagggcgatgtgggctttatgggtcctcgcggactcaagggggagcggggggtgaagggcgcctgtggactggacggggaaaagggcgacaagggagaagccggccccccagggcgaccaggcctcgccggacataagggggagatgggggagcccggtgtgcccggtcaatcaggcgctcctggtaaggaagggttaattggccctaaaggcgacagaggctttgatggtcaacctgggcccaagggagatcagggcgaaaaaggcgaacgcggcaccccaggaatcgggggtttcccaggcccatccggtaacgatggcagtgccggacctcctggcccacctggtagcgtcggcccccgaggccccgagggactgcagggccagaagggtgaacggggccccccaggtgaaagggttgttggcgcaccaggggttcctggcgctcctggcgagcgcggggaacagggcaggcccgggcctgctggtccccggggagagaagggggaagctgctcttacggaggatgacatccgtggttttgtgcgacaggaaatgtctcaacactgtgcctgccagggccagtttatcgcctccggatctcggccactcccatcctacgcagcagatactgcgggttcccagttacacgccgttcctgtgctgagagtctcccacgccgaagaagaagagcgcgtgcctccagaggacgacgagtactccgagtacagcgagtactctgtggaggagtatcaagaccccgaggccccatgggacagtgatgacccctgttccctccccctggacgagggctcttgcacagcctataccctcagatggtatcaccgggcagtgactggcagtaccgaggcctgtcatccgtttgtgtatggaggctgcgggggcaacgcaaatcgctttggaacccgtgaggcctgcgagaggcggtgtcctccccgcgtcgttcagtctcaaggcaccggtactgctcaggactag

SEQ ID NO: 1423 - DNA, 9073 bp, Artificial Sequence
  derived and/or modified sequence
gatgacgctgcggcttctggtggccgcgctctgcgccgggatcctggcagaggcgccccgagtgcgagcccagcacagggagagagtgacctgcacgcgcctttacgccgctgacattgtgttcttactggatggctcctcatccattggccgcagcaatttccgcgaggtccgcagctttctcgaagggctggtgctgcctttctctggagcagccagtgcacagggtgtgcgctttgccacagtgcagtacagcgatgacccacggacagagttcggcctggatgcacttggctctgggggtgatgtgatccgcgccatccgtgagcttagctacaaggggggcaacactcgcacaggggctgcaattctccatgtggctgaccatgtcttcctgccccagctggcccgacctggtgtccccaaggtctgcatcctgatcacagacgggaagtcccaggacctggtggacacagctgcccaaaggctgaaggggcagggggtcaagctatttgctgtggggatcaagaatgctgaccctgaggagctgaagcgagttgcctcacagcccaccagtgacttcttcttcttcgtcaatgacttcagcatcttgaggacactactgcccctcgtttcccggagagtgtgcacgactgctggtggcgtgcctgtgacccgacctccggatgactcgacctctgctccacgagacctggtgctgtctgagccaagcagccaatccttgagagtacagtggacagcggccagtggccctgtgactggctacaaggtccagtacactcctctgacggggctgggacagccactgccgagtgagcggcaggaggtgaacgtcccagctggtgagaccagtgtgcggctgcggggtctccggccactgaccgagtaccaagtgactgtgattgccctctacgccaacagcatcggggaggctgtgagcgggacagctcggaccactgccctagaagggccggaactgaccatccagaataccacagcccacagcctcctggtggcctggcggagtgtgccaggtgccactggctaccgtgtgacatggcgggtcctcagtggtgggcccacacagcagcaggagctgggccctgggcagggttcagtgttgctgcgtgacttggagcctggcacggactatgaggtgaccgtgagcaccctatttggccgcagtgtggggcccgccacttccctgatggctcgcactgacgcttctgttgagcagaccctgcgcccggtcatcctgggccccacatccatcctcctttcctggaacttggtgcctgaggcccgtggctaccggttggaatggcggcgtgagactggcttggagccaccgcagaaggtggtactgccctctgatgtgacccgctaccagttggatgggctgcagccgggcactgagtaccgcctcacactctacactctgctggagggccacgaggtggccacccctgcaaccgtggttcccactggaccagagctgcctgtgagccctgtaacagacctgcaagccaccgagctgcccgggcagcgggtgcgagtgtcctggagcccagtccctggtgccacccagtaccgcatcattgtgcgcagcacccagggggttgagcggaccctggtgcttcctgggagtcagacagcattcgacttggatgacgttcaggctgggcttagctacactgtgcgggtgtctgctcgagtgggtccccgtgagggcagtgccagtgtcctcactgtccgccgggagccggaaactccacttgctgttccagggctgcgggttgtggtgtcagatgcaacgcgagtgagggtggcctggggacccgtccctggagccagtggatttcggattagctggagcacaggcagtggtccggagtccagccagacactgcccccagactctactgccacagacatcacagggctgcagcctggaaccacctaccaggtggctgtgtcggtactgcgaggcagagaggagggccctgctgcagtcatcgtggctcgaacggacccactgggcccagtgaggacggtccatgtgactcaggccagcagctcatctgtcaccattacctggaccagggttcctggcgccacaggatacagggtttcctggcactcagcccacggcccagagaaatcccagttggtttctggggaggccacggtggctgagctggatggactggagccagatactgagtatacggtgcatgtgagggcccatgtggctggcgtggatgggccccctgcctctgtggttgtgaggactgcccctgagcctgtgggtcgtgtgtcgaggctgcagatcctcaatgcttccagcgacgttctacggatcacctgggtaggggtcactggagccacagcttacagactggcctggggccggagtgaaggcggccccatgaggcaccagatactcccaggaaacacagactctgcagagatccggggtctcgaaggtggagtcagctactcagtgcgagtgactgcacttgtcggggaccgcgagggcacacctgtctccattgttgtcactacgccgcctgaggctccgccagccctggggacgcttcacgtggtgcagcgcggggagcactcgctgaggctgcgctgggagccggtgcccagagcgcagggcttccttctgcactggcaacctgagggtggccaggaacagtcccgggtcctggggcccgagctcagcagctatcacctggacgggctggagccagcgacacagtaccgcgtgaggctgagtgtcctagggccagctggagaagggccctctgcagaggtgactgcgcgcactgagtcacctcgtgttccaagcattgaactacgtgtggtggacacctcgatcgactcggtgactttggcctggactccagtgtccagggcatccagctacatcctatcctggcggccactcagaggccctggccaggaagtgcctgggtccccgcagacacttccagggatctcaagctcccagcgggtgacagggctagagcctggcgtctcttacatcttctccctgacgcctgtcctggatggtgtgcggggtcctgaggcatctgtcacacagacgccagtgtgcccccgtggcctggcggatgtggtgttcctaccacatgccactcaagacaatgctcaccgtgcggaggctacgaggagggtcctggagcgtctggtgttggcacttgggcctcttgggccacaggcagttcaggttggcctgctgtcttacagtcatcggccctccccactgttcccactgaatggctcccatgaccttggcattatcttgcaaaggatccgtgacatgccctacatggacccaagtgggaacaacctgggcacagccgtggtcacagctcacagatacatgttggcaccagatgctcctgggcgccgccagcacgtaccaggggtgatggttctgctagtggatgaacccttgagaggtgacatattcagccccatccgtgaggcccaggcttctgggcttaatgtggtgatgttgggaatggctggagcggacccagagcagctgcgtcgcttggcgccgggtatggactctgtccagaccttcttcgccgtggatgatgggccaagcctggaccaggcagtcagtggtctggccacagccctgtgtcaggcatccttcactactcagccccggccagagccctgcccagtgtattgtccaaagggccagaagggggaacctggagagatgggcctgagaggacaagttgggcctcctggcgaccctggcctcccgggcaggaccggtgctcccggcccccaggggccccctggaagtgccactgccaagggcgagaggggcttccctggagcagatgggcgtccaggcagccctggccgcgccgggaatcctgggacccctggagcccctggcctaaagggctctccagggttgcctggccctcgtggggacccgggagagcgaggacctcgaggcccaaagggggagccgggggctcccggacaagtcatcggaggtgaaggacctgggcttcctgggcggaaaggggaccctggaccatcgggcccccctggacctcgtggaccactgggggacccaggaccccgtggccccccagggcttcctggaacagccatgaagggtgacaaaggcgatcgtggggagcggggtccccctggaccaggtgaaggtggcattgctcctggggagcctgggctgccgggtcttcccggaagccctggaccccaaggccccgttggcccccctggaaagaaaggagaaaaaggtgactctgaggatggagctccaggcctcccaggacaacctgggtctccgggtgagcagggcccacggggacctcctggagctattggccccaaaggtgaccggggctttccagggcccctgggtgaggctggagagaagggcgaacgtggacccccaggcccagcgggatcccgggggctgccaggggttgctggacgtcctggagccaagggtcctgaagggccaccaggacccactggccgccaaggagagaagggggagcctggtcgccctggggaccctgcagtggtgggacctgctgttgctggacccaaaggagaaaagggagatgtggggcccgctgggcccagaggagctaccggagtccaaggggaacggggcccacccggcttggttcttcctggagaccctggccccaagggagaccctggagaccggggtcccattggccttactggcagagcaggacccccaggtgactcagggcctcctggagagaagggagaccctgggcggcctggccccccaggacctgttggcccccgaggacgagatggtgaagttggagagaaaggtgacgagggtcctccgggtgacccgggtttgcctggaaaagcaggcgagcgtggccttcggggggcacctggagttcgggggcctgtgggtgaaaagggagaccagggagatcctggagaggatggacgaaatggcagccctggatcatctggacccaagggtgaccgtggggagccgggtcccccaggacccccgggacggctggtagacacaggacctggagccagagagaagggagagcctggggaccgcggacaagagggtcctcgagggcccaagggtgatcctggcctccctggagcccctggggaaaggggcattgaagggtttcggggacccccaggcccacagggggacccaggtgtccgaggcccagcaggagaaaagggtgaccggggtccccctgggctggatggccggagcggactggatgggaaaccaggagccgctgggccctctgggccgaatggtgctgcaggcaaagctggggacccagggagagacgggcttccaggcctccgtggagaacagggcctccctggcccctctggtccccctggattaccgggaaagccaggcgaggatggcaaacctggcctgaatggaaaaaacggagaacctggggaccctggagaagacgggaggaagggagagaaaggagattcaggcgcctctgggagagaaggttttcctggtgtcccaggaggcacgggccccaagggtgaccgtggggagactggatccaaaggggagcagggcctccctggagagcgtggcctgcgaggagagcctggaagtgtgccgaatgtggatcggttgctggaaactgctggcatcaaggcatctgccctgcgggagatcgtggagacctgggatgagagctctggtagcttcctgcctgtgcccgaacggcgtcgaggccccaagggggactcaggcgaacagggccccccaggcaaggagggccccatcggctttcctggagaacgcgggctgaagggcgaccgtggagaccctggccctcaggggccacctggtctggcccttggggagaggggcccccccgggccttccggccttgccggggagcctggaaagcctggtattcccgggctcccaggcagggctgggggtgtgggagaggcaggaaggccaggagagaggggagaacggggagagaaaggagaacgtggagaacagggcagagatggccctcctggactccctggaacccctgggccccccggaccccctggccccaaggtgtctgtggatgagccaggtcctggactctctggagaacagggaccccctggactcaagggtgctaagggggagccgggcagcaatggtgaccaaggtcccaaaggagacaggggtgtgccaggcatcaaaggagaccggggagagcctggaccgaggggtcaggacggcaacccgggtctaccaggagagcgtggtatggctgggcctgaagggaagccgggtctgcagggtccaagaggcccccctggcccagtgggtggtcatggagaccctggaccacctggtgccccgggtcttgctggccctgcaggaccccaaggaccttctggcctgaagggggagcctggagagacaggacctccaggacggggcctgactggacctactggagctgtgggacttcctggaccccccggcccttcaggccttgtgggtccacaggggtctccaggtttgcctggacaagtgggggagacagggaagccgggagccccaggtcgagatggtgccagtggaaaagatggagacagagggagccctggtgtgccagggtcaccaggtctgcctggccctgtcggacctaaaggagaacctggccccacgggggcccctggacaggctgtggtcgggctccctggagcaaagggagagaagggagcccctggaggccttgctggagacctggtgggtgagccgggagccaaaggtgaccgaggactgccagggccgcgaggcgagaagggtgaagctggccgtgcaggggagcccggagaccctggggaagatggtcagaaaggggctccaggacccaaaggtttcaagggtgacccaggagtcggggtcccgggctcccctgggcctcctggccctccaggtgtgaagggagatctgggcctccctggcctgcccggtgctcctggtgttgttgggttcccgggtcagacaggccctcgaggagagatgggtcagccaggccctagtggagagcggggtctggcaggccccccagggagagaaggaatcccaggacccctggggccacctggaccaccggggtcagtgggaccacctggggcctctggactcaaaggagacaagggagaccctggagtagggctgcctgggccccgaggcgagcgtggggagccaggcatccggggtgaagatggccgccccggccaggagggaccccgaggactcacggggccccctggcagcaggggagagcgtggggagaagggtgatgttgggagtgcaggactaaagggtgacaagggagactcagctgtgatcctggggcctccaggcccacggggtgccaagggggacatgggtgaacgagggcctcggggcttggatggtgacaaaggacctcggggagacaatggggaccctggtgacaagggcagcaagggagagcctggtgacaagggctcagccgggttgccaggactgcgtggactcctgggaccccagggtcaacctggtgcagcagggatccctggtgacccgggatccccaggaaaggatggagtgcctggtatccgaggagaaaaaggagatgttggcttcatgggtccccggggcctcaagggtgaacggggagtgaagggagcctgtggccttgatggagagaagggagacaagggagaagctggtcccccaggccgccccgggctggcaggacacaaaggagagatgggggagcctggtgtgccgggccagtcgggggcccctggcaaggagggcctgatcggtcccaagggtgaccgaggctttgacgggcagccaggccccaagggtgaccagggcgagaaaggggagcggggaaccccaggaattgggggcttcccaggccccagtggaaatgatggctctgctggtcccccagggccacctggcagtgttggtcccagaggccccgaaggacttcagggccagaagggtgagcgaggtccccccggagagagagtggtgggggctcctggggtccctggagctcctggcgagagaggggagcaggggcggccagggcctgccggtcctcgaggcgagaagggagaagctgcactgacggaggatgacatccggggctttgtgcgccaagagatgagtcagcactgtgcctgccagggccagttcatcgcatctggatcacgacccctccctagttatgctgcagacactgccggctcccagctccatgctgtgcctgtgctccgcgtctctcatgcagaggaggaagagcgggtaccccctgaggatgatgagtactctgaatactccgagtattctgtggaggagtaccaggaccctgaagctccttgggatagtgatgacccctgttccctgccactggatgagggctcctgcactgcctacaccctgcgctggtaccatcgggctgtgacaggcagcacagaggcctgtcacccttttgtctatggtggctgtggagggaatgccaaccgttttgggacccgtgaggcctgcgagcgccgctgcccaccccgggtggtccagagccaggggacaggtactgcccaggactgaggcccagataatgagctgagattcagcatcccctggaggagtcggggtctcagcagaaccccactgtccctccccttggtgctagaggcttgtgtgcacgtgagcgtgcgtgtgcacgtccgttatttcagtgacttggtcccgtgggtctagccttcccccctgtggacaaacccccattgtggctcctgccaccctggcagatgactcactgtgggggggtggctgtgggcagtgagcggatgtgactggcgtctgacccgccccttgacccaagcctgtgatgacatggtgctgattctggggggcattaaagctgctgttttaaaaggc

SEQ ID NO: 1424 - DNA, 8835 bp, Artificial Sequence
  derived and/or modified sequence
atgaccctgcggctgctggtggccgccctgtgtgccggcatcctggccgaggccccccgggtgcgggcccagcaccgggagcgggtgacctgcacccggctgtatgctgctgacatcgtgttcctgctggatggcagcagcagcatcggccgcagcaacttccgggaggtgcgctccttcctggagggcctggtgctgcccttctctggagctgccagcgcccagggcgtgcgctttgccaccgtgcagtacagtgatgaccccaggacagaatttggcctggatgccctgggcagcggaggagatgtgatccgggccatccgggagctgagctacaagggcggcaacaccaggactggagctgccatcctgcacgtggccgaccacgtgttcctgccccagctggcccggcctggggtgcccaaggtgtgcatcctgatcacagatggcaagagccaggacctggtggacacagctgcccagaggctgaagggccagggcgtgaagctgtttgctgtgggcatcaagaatgctgaccctgaggagctgaagagggtggccagccagcccaccagtgacttcttcttctttgtgaatgacttcagcatcctgcggaccctgctgcccctggtgtccagaagagtgtgcaccacagctggaggagtgcctgtgacccggcccccagatgacagcaccagcgccccccgggacctggtgctgtctgagcccagcagccagagcctgcgggtgcagtggacagctgccagcggccctgtgacaggctacaaggtgcagtacacccccctgaccggcctgggccagcccctgcccagcgagcggcaggaggtgaatgtgcctgctggggagacctctgtgcggctgcggggcctgcggcccctgacagagtaccaggtgaccgtcatcgccctgtatgccaacagcattggagaggccgtgtctggaacagcccggaccacagccctggagggccctgagctgaccatccagaacaccacagcccacagcctgctggtggcctggaggtctgtgcctggggccaccggctacagagtgacctggagggtgctgagcggcggccccacccagcagcaggagctgggccctggccagggctctgtgctgctgcgggacctggagcctggaacagattatgaggtgacagtgtccaccctgtttggccgctctgtgggccctgccaccagcctgatggccaggacagatgcctctgtggagcagaccctgcggcctgtgatcctgggccccaccagcatcctgctgtcctggaacctggtgcctgaggcccggggctaccgcctggagtggaggcgggagaccggcctggagcccccccagaaggtggtgctgcccagtgatgtgacccgctaccagctggatggcctgcagcccggcacagagtaccgcctgaccctgtacaccctgctggagggccacgaggtggccaccccagccaccgtggtgcccaccggccctgagctgcctgtgtcccctgtgacagacctgcaggccacagagctgcccggccagagggtgcgggtgtcctggagccctgtgcctggggccacccagtaccgcatcatcgtgcgcagcacccagggcgtggagaggaccctggtgctgcccggcagccagacagcctttgacctggatgatgtgcaggccggcctgagctacacagtgcgggtgtctgcccgggtgggcccccgggagggcagcgcctctgtgctgactgtgcggcgggagcctgagacccccctggccgtgcccggcctgcgggtggtggtgtctgatgccaccagggtgcgggtggcctggggccctgtgcctggggccagcggcttccgcatctcctggagcactggaagtggccctgagagcagccagaccctgcccccagacagcacagccacagacatcaccggcctgcagcccggcaccacctaccaggtggccgtgtctgtgctgcggggccgggaggagggccctgctgctgtgattgtggccaggacagaccccctgggccctgtgaggacagtgcacgtgacccaggccagcagcagctctgtgaccatcacctggaccagggtgcctggggccaccggctacagagtgtcctggcacagcgcccacggccctgagaagagccagctggtgtctggagaggccaccgtggccgagctggatggcctggagccagacacagagtacacagtgcacgtgcgggcccacgtggccggcgtggatggccccccagcctctgtggtggtgaggacagcccctgagcctgtgggccgggtgtcccggctgcagatcctgaatgccagcagtgatgtgctgcgcatcacctgggtgggcgtgactggagccacagcctaccgcctggcctggggccgctctgagggcggccccatgaggcaccagatcctgcccggcaacacagacagcgctgagatccggggcctggagggcggcgtgtcctacagcgtgcgggtgacagccctggtgggggaccgggagggcacccctgtgtccatcgtggtgaccaccccacctgaggcccccccagccctgggcaccctgcacgtggtgcagagaggagagcacagcctgcggctgcgctgggagcctgtgccccgggcccagggcttcctgctgcactggcagcctgagggcggccaggagcagagccgggtgctgggccctgagctgagcagctaccacctggatggcctggagcccgccacccagtacagagtgcggctgtctgtgctgggccctgctggggagggccccagcgctgaggtgacagccaggacagagagcccccgggtgcccagcattgagctgcgggtggtggacaccagcattgattctgtgaccctggcctggacccctgtgtcccgggccagcagctacatcctgtcctggaggcccctgcggggccctggccaggaggtgcccggcagcccccagaccctgcccggcatcagcagcagccagagggtgacaggcctggagcccggggtgtcctacatcttcagcctgacccctgtgctggatggagtgcggggccctgaggcctctgtgacccagacccctgtgtgcccccggggcctggctgatgtggtgttcctgccccacgccacccaggacaatgcccacagagctgaggccaccaggagagtgctggagcggctggtgctggccctgggccccctgggcccccaggccgtgcaggtgggcctgctgagctacagccaccggcccagccccctcttccccctgaatggcagccatgacctgggcatcatcctgcagaggatccgggacatgccctacatggaccccagcggcaacaacctgggcacagctgtggtgacagcccaccgctacatgctggccccagatgcccctggaagacggcagcacgtgcctggggtgatggtgctgctggtggatgagcccctgcggggggacatcttcagccccatccgggaggcccaggccagcggcctgaatgtggtgatgctgggcatggccggggctgaccctgagcagctgcggcggctggcccctggcatggattctgtgcagaccttctttgctgtggatgatggccccagcctggaccaggccgtgtctggcctggccacagccctgtgccaggccagcttcaccacccagcccaggcctgagccctgccctgtgtactgccccaagggccagaagggggagcctggagagatgggcctgcggggccaggtgggccccccaggggaccccggcctgcccggccgcactggagcccctggcccccagggccccccaggcagcgccacagccaagggggagcggggcttccctggagcagatggccggcccggcagccctggccgggccggcaaccctggcacccctggggcccctggcctgaagggcagccctggcctgcccggccccaggggggaccctggagagcggggcccccggggccccaagggggagcccggggcccctggccaggtgattggaggagagggccctggcctgcccggcaggaaaggagaccccggccccagcggccccccaggcccccggggccccctgggggaccccggcccccggggccccccaggcctgcccggcacagccatgaagggggacaagggggacagaggagagcggggccccccaggccctggagagggcggcatcgcccctggagagcccggcctgcccggcctgcccggcagccctggcccccagggccctgtgggccccccaggcaagaagggggagaagggggacagtgaagatggagcccctggcctgcccggccagcccggcagccctggagagcagggcccccggggccccccaggggccatcggccccaagggggaccggggcttccctggccccctgggggaggccggggagaagggggagcggggccccccaggccctgctggcagccggggcctgcccggggtggccggccggcctggggccaagggccctgagggccccccaggccccaccggccggcagggcgagaagggggagcccggccggcctggggaccctgctgtggtgggccctgctgtggccggccccaagggggagaagggagatgtgggccctgctggccccaggggggccaccggggtgcagggcgagcggggccccccaggcctggtgctgcccggggaccccggccccaagggggaccccggggaccggggccccatcggcctgaccggccgggccggccccccaggggacagcggccccccaggagagaagggggaccccggccggcccggccccccaggccctgtgggcccccggggcagagatggagaggtgggggagaagggagatgagggccccccaggggaccccggcctgcccgggaaggccggggagcggggcctgcggggggcccctggggtgcggggccctgtgggggagaagggggaccagggcgaccccggggaggatggaagaaatggcagccctggcagcagcggccccaagggggacagaggagagcccggccccccaggccccccaggccgcctggtggacaccggccctggggcccgggagaagggggagcccggggaccggggccaggagggcccccggggccccaagggggaccccggcctgcccggggcccctggagagcggggcatcgagggcttccggggccccccaggcccccagggcgaccccggggtgcggggccctgctggggagaagggggaccggggccccccaggcctggatggccgcagcggcctggatggcaagccaggagctgctggccccagcggccccaacggggctgctgggaaggccggggaccccggcagagatggcctgcccggcctgcggggggagcagggcctgcccggccccagcggccccccaggcctgcccgggaagccaggagaagatggcaagccaggcctgaatggcaagaatggagagcccggggaccccggggaggatggcaggaagggggagaagggggacagcggggccagcggccgggagggcagagatggccccaagggggagcggggggcccctggcatcctgggcccccagggccccccaggcctgcccggccctgtgggccccccaggccagggcttccctggggtgcctgggggcaccggccccaagggggacagaggagagaccggcagcaaaggagagcagggcctgcctggagagcggggcctgcggggggagcccggctctgtgcccaacgtggaccggctgctggagacagctggcatcaaggccagcgccctgcgggagatcgtggagacctgggatgagagcagcggcagcttcctgcctgtgcctgagaggagaagaggccccaagggggacagcggggagcagggccccccaggcaaggagggccccatcggcttccctggagagcggggcctgaagggggacagaggagaccccggcccccagggccccccaggcctggccctgggggagcggggccccccaggccccagcggcctggccggggagcccgggaagccaggcatccctggcctgcccggccgggccggcggcgtgggggaggccggccggcctggagagcggggggagcggggggagaagggggagcggggggagcagggcagagatggccccccaggcctgcccggcaccccaggccccccaggccccccaggccccaaggtgtctgtggatgagcccggccctggcctgagcggggagcagggccccccaggcctgaagggggccaagggggagcccggcagcaatggagaccagggccccaagggggaccggggcgtgcccggcatcaagggggacagaggagagcccggcccccggggccaggacggcaaccctggcctgcctggagagcggggcatggccggccctgagggcaagccaggcctgcagggcccccggggccccccaggccctgtgggcggccacggggaccccggccccccaggggcccctggcctggccggccctgctggcccccagggccccagcggcctgaagggggagcctggagagaccggccccccaggccggggcctgaccggccccactggagctgtgggcctgcccggccccccaggccccagcggcctggtgggcccccagggcagccctggcctgcccggccaggtgggggagaccgggaagccaggggcccctggaagagatggagccagcggcaaggatggagaccggggcagccctggggtgcccggcagccctggcctgcccggccctgtgggccccaagggggagcccggccccactggagcccctggccaggccgtggtgggcctgcccggggccaagggggagaagggggcccctgggggcctggccggggacctggtgggggagcccggggccaagggggaccggggcctgcccggccccagaggagagaagggggaggccggccgggccggggagcccggggaccctggagaagatggccagaagggggcccctggccccaagggcttcaagggggaccccggggtgggcgtgcccggcagccctggccccccaggccccccaggagtgaagggggacctgggcctgcccggcctgcccggggcccctggggtggtgggcttccctggccagacaggccccagaggagagatgggccagcccggccccagcggggagcggggcctggccggccccccaggccgggagggcatccctggccccctgggccccccaggccccccaggctctgtgggccccccaggggccagcggcctgaagggggacaagggggaccccggggtgggcctgcccggccccagaggagagcggggggagcccggcatccggggggaggatggccggcccggccaggagggcccccggggcctgactggacctcctggcagcagaggagagcggggggagaagggagatgtgggcagcgctggcctgaagggggacaagggggacagcgctgtgatcctgggccccccaggccccaggggggccaagggggacatgggagagcggggcccccggggcctggatggagacaagggccccaggggggacaacggggaccccggggacaagggcagcaaaggagagcccggggacaagggcagcgctggcctgcccggcctgcggggcctgctgggcccccagggccagcctggagctgctggcatccctggggaccccggcagccctgggaaggatggagtgcccggcatccggggggagaagggagatgtgggcttcatgggcccccggggcctgaagggggagcggggcgtgaagggggcctgtggcctggatggagagaagggggacaagggggaggccggccccccaggccggcccggcctggccggccacaagggggagatgggagagcccggggtgcccggccagagcggggcccctgggaaggagggcctgattggccccaagggggaccggggctttgatggccagcccggccccaagggggaccagggcgagaagggggagcggggcaccccaggcatcggcggcttccctggccccagcggaaatgatggcagcgctggccccccaggccccccaggctctgtgggcccccggggccctgagggcctgcagggccagaagggggagcggggccccccaggagagcgggtggtgggcgcccctggggtgcctggggcccctggagagcggggggagcagggccggcccggccctgctggccccagaggagagaagggggaggccgccctgacagaagatgacatccggggctttgtgcggcaggagatgagccagcactgtgcctgccagggccagttcatcgccagcggcagccggcccctgcccagctatgctgctgacacagctggcagccagctgcatgctgtgcctgtgctgcgggtgtcccatgctgaggaggaggagcgggtgcccccagaagatgatgagtacagcgagtacagcgagtacagcgtggaggagtaccaggaccctgaggccccctgggacagtgatgacccctgcagcctgcccctggatgagggcagctgcacagcctacaccctgcgctggtaccacagagctgtgacaggcagcacagaggcctgccacccctttgtgtatggaggctgcggcggcaatgccaacagatttggcacccgggaggcctgtgaaagacgctgccccccccgggtggtgcagagccagggcactggaacagcccaggactag

SEQ ID NO: 1425 - DNA, 8739 bp, Artificial Sequence
  derived and/or modified sequence
atgaccctgcggctgctggtggccgccctgtgtgccggcatcctggccgaggccccccgggtgcgggcccagcaccgggagcgggtgacctgcacccggctgtatgctgctgacatcgtgttcctgctggatggcagcagcagcatcggccgcagcaacttccgggaggtgcgctccttcctggagggcctggtgctgcccttctctggagctgccagcgcccagggcgtgcgctttgccaccgtgcagtacagtgatgaccccaggacagaatttggcctggatgccctgggcagcggaggagatgtgatccgggccatccgggagctgagctacaagggcggcaacaccaggactggagctgccatcctgcacgtggccgaccacgtgttcctgccccagctggcccggcctggggtgcccaaggtgtgcatcctgatcacagatggcaagagccaggacctggtggacacagctgcccagaggctgaagggccagggcgtgaagctgtttgctgtgggcatcaagaatgctgaccctgaggagctgaagagggtggccagccagcccaccagtgacttcttcttctttgtgaatgacttcagcatcctgcggaccctgctgcccctggtgtccagaagagtgtgcaccacagctggaggagtgcctgtgacccggcccccagatgacagcaccagcgccccccgggacctggtgctgtctgagcccagcagccagagcctgcgggtgcagtggacagctgccagcggccctgtgacaggctacaaggtgcagtacacccccctgaccggcctgggccagcccctgcccagcgagcggcaggaggtgaatgtgcctgctggggagacctctgtgcggctgcggggcctgcggcccctgacagagtaccaggtgaccgtcatcgccctgtatgccaacagcattggagaggccgtgtctggaacagcccggaccacagccctggagggccctgagctgaccatccagaacaccacagcccacagcctgctggtggcctggaggtctgtgcctggggccaccggctacagagtgacctggagggtgctgagcggcggccccacccagcagcaggagctgggccctggccagggctctgtgctgctgcgggacctggagcctggaacagattatgaggtgacagtgtccaccctgtttggccgctctgtgggccctgccaccagcctgatggccaggacagatgcctctgtggagcagaccctgcggcctgtgatcctgggccccaccagcatcctgctgtcctggaacctggtgcctgaggcccggggctaccgcctggagtggaggcgggagaccggcctggagcccccccagaaggtggtgctgcccagtgatgtgacccgctaccagctggatggcctgcagcccggcacagagtaccgcctgaccctgtacaccctgctggagggccacgaggtggccaccccagccaccgtggtgcccaccggccctgagctgcctgtgtcccctgtgacagacctgcaggccacagagctgcccggccagagggtgcgggtgtcctggagccctgtgcctggggccacccagtaccgcatcatcgtgcgcagcacccagggcgtggagaggaccctggtgctgcccggcagccagacagcctttgacctggatgatgtgcaggccggcctgagctacacagtgcgggtgtctgcccgggtgggcccccgggagggcagcgcctctgtgctgactgtgcggcgggagcctgagacccccctggccgtgcccggcctgcgggtggtggtgtctgatgccaccagggtgcgggtggcctggggccctgtgcctggggccagcggcttccgcatctcctggagcactggaagtggccctgagagcagccagaccctgcccccagacagcacagccacagacatcaccggcctgcagcccggcaccacctaccaggtggccgtgtctgtgctgcggggccgggaggagggccctgctgctgtgattgtggccaggacagaccccctgggccctgtgaggacagtgcacgtgacccaggccagcagcagctctgtgaccatcacctggaccagggtgcctggggccaccggctacagagtgtcctggcacagcgcccacggccctgagaagagccagctggtgtctggagaggccaccgtggccgagctggatggcctggagccagacacagagtacacagtgcacgtgcgggcccacgtggccggcgtggatggccccccagcctctgtggtggtgaggacagcccctgagcctgtgggccgggtgtcccggctgcagatcctgaatgccagcagtgatgtgctgcgcatcacctgggtgggcgtgactggagccacagcctaccgcctggcctggggccgctctgagggcggccccatgaggcaccagatcctgcccggcaacacagacagcgctgagatccggggcctggagggcggcgtgtcctacagcgtgcgggtgacagccctggtgggggaccgggagggcacccctgtgtccatcgtggtgaccaccccacctgaggcccccccagccctgggcaccctgcacgtggtgcagagaggagagcacagcctgcggctgcgctgggagcctgtgccccgggcccagggcttcctgctgcactggcagcctgagggcggccaggagcagagccgggtgctgggccctgagctgagcagctaccacctggatggcctggagcccgccacccagtacagagtgcggctgtctgtgctgggccctgctggggagggccccagcgctgaggtgacagccaggacagagagcccccgggtgcccagcattgagctgcgggtggtggacaccagcattgattctgtgaccctggcctggacccctgtgtcccgggccagcagctacatcctgtcctggaggcccctgcggggccctggccaggaggtgcccggcagcccccagaccctgcccggcatcagcagcagccagagggtgacaggcctggagcccggggtgtcctacatcttcagcctgacccctgtgctggatggagtgcggggccctgaggcctctgtgacccagacccctgtgtgcccccggggcctggctgatgtggtgttcctgccccacgccacccaggacaatgcccacagagctgaggccaccaggagagtgctggagcggctggtgctggccctgggccccctgggcccccaggccgtgcaggtgggcctgctgagctacagccaccggcccagccccctcttccccctgaatggcagccatgacctgggcatcatcctgcagaggatccgggacatgccctacatggaccccagcggcaacaacctgggcacagctgtggtgacagcccaccgctacatgctggccccagatgcccctggaagacggcagcacgtgcctggggtgatggtgctgctggtggatgagcccctgcggggggacatcttcagccccatccgggaggcccaggccagcggcctgaatgtggtgatgctgggcatggccggggctgaccctgagcagctgcggcggctggcccctggcatggattctgtgcagaccttctttgctgtggatgatggccccagcctggaccaggccgtgtctggcctggccacagccctgtgccaggccagcttcaccacccagcccaggcctgagccctgccctgtgtactgccccaagggccagaagggggagcctggagagatgggcctgcggggccaggtgggccccccaggggaccccggcctgcccggccgcactggagcccctggcccccagggccccccaggcagcgccacagccaagggggagcggggcttccctggagcagatggccggcccggcagccctggccgggccggcaaccctggcacccctggggcccctggcctgaagggcagccctggcctgcccggccccaggggggaccctggagagcggggcccccggggccccaagggggagcccggggcccctggccaggtgattggaggagagggccctggcctgcccggcaggaaaggagaccccggccccagcggccccccaggcccccggggccccctgggggaccccggcccccggggccccccaggcctgcccggcacagccatgaagggggacaagggggacagaggagagcggggccccccaggccctggagagggcggcatcgcccctggagagcccggcctgcccggcctgcccggcagccctggcccccagggccctgtgggccccccaggcaagaagggggagaagggggacagtgaagatggagcccctggcctgcccggccagcccggcagccctggagagcagggcccccggggccccccaggggccatcggccccaagggggaccggggcttccctggccccctgggggaggccggggagaagggggagcggggccccccaggccctgctggcagccggggcctgcccggggtggccggccggcctggggccaagggccctgagggccccccaggccccaccggccggcagggcgagaagggggagcccggccggcctggggaccctgctgtggtgggccctgctgtggccggccccaagggggagaagggagatgtgggccctgctggccccaggggggccaccggggtgcagggcgagcggggccccccaggcctggtgctgcccggggaccccggccccaagggggaccccggggaccggggccccatcggcctgaccggccgggccggccccccaggggacagcggccccccaggagagaagggggaccccggccggcccggccccccaggccctgtgggcccccggggcagagatggagaggtgggggagaagggagatgagggccccccaggggaccccggcctgcccgggaaggccggggagcggggcctgcggggggcccctggggtgcggggccctgtgggggagaagggggaccagggcgaccccggggaggatggaagaaatggcagccctggcagcagcggccccaagggggacagaggagagcccggccccccaggccccccaggccgcctggtggacaccggccctggggcccgggagaagggggagcccggggaccggggccaggagggcccccggggccccaagggggaccccggcctgcccggggcccctggagagcggggcatcgagggcttccggggccccccaggcccccagggcgaccccggggtgcggggccctgctggggagaagggggaccggggccccccaggcctggatggccgcagcggcctggatggcaagccaggagctgctggccccagcggccccaacggggctgctgggaaggccggggaccccggcagagatggcctgcccggcctgcggggggagcagggcctgcccggccccagcggccccccaggcctgcccgggaagccaggagaagatggcaagccaggcctgaatggcaagaatggagagcccggggaccccggggaggatggcaggaagggggagaagggggacagcggggccagcggccgggagggcttccctggggtgcctgggggcaccggccccaagggggacagaggagagaccggcagcaaaggagagcagggcctgcctggagagcggggcctgcggggggagcccggctctgtgcccaacgtggaccggctgctggagacagctggcatcaaggccagcgccctgcgggagatcgtggagacctgggatgagagcagcggcagcttcctgcctgtgcctgagaggagaagaggccccaagggggacagcggggagcagggccccccaggcaaggagggccccatcggcttccctggagagcggggcctgaagggggacagaggagaccccggcccccagggccccccaggcctggccctgggggagcggggccccccaggccccagcggcctggccggggagcccgggaagccaggcatccctggcctgcccggccgggccggcggcgtgggggaggccggccggcctggagagcggggggagcggggggagaagggggagcggggggagcagggcagagatggccccccaggcctgcccggcaccccaggccccccaggccccccaggccccaaggtgtctgtggatgagcccggccctggcctgagcggggagcagggccccccaggcctgaagggggccaagggggagcccggcagcaatggagaccagggccccaagggggaccggggcgtgcccggcatcaagggggacagaggagagcccggcccccggggccaggacggcaaccctggcctgcctggagagcggggcatggccggccctgagggcaagccaggcctgcagggcccccggggccccccaggccctgtgggcggccacggggaccccggccccccaggggcccctggcctggccggccctgctggcccccagggccccagcggcctgaagggggagcctggagagaccggccccccaggccggggcctgaccggccccactggagctgtgggcctgcccggccccccaggccccagcggcctggtgggcccccagggcagccctggcctgcccggccaggtgggggagaccgggaagccaggggcccctggaagagatggagccagcggcaaggatggagaccggggcagccctggggtgcccggcagccctggcctgcccggccctgtgggccccaagggggagcccggccccactggagcccctggccaggccgtggtgggcctgcccggggccaagggggagaagggggcccctgggggcctggccggggacctggtgggggagcccggggccaagggggaccggggcctgcccggccccagaggagagaagggggaggccggccgggccggggagcccggggaccctggagaagatggccagaagggggcccctggccccaagggcttcaagggggaccccggggtgggcgtgcccggcagccctggccccccaggccccccaggagtgaagggggacctgggcctgcccggcctgcccggggcccctggggtggtgggcttccctggccagacaggccccagaggagagatgggccagcccggccccagcggggagcggggcctggccggccccccaggccgggagggcatccctggccccctgggccccccaggccccccaggctctgtgggccccccaggggccagcggcctgaagggggacaagggggaccccggggtgggcctgcccggccccagaggagagcggggggagcccggcatccggggggaggatggccggcccggccaggagggcccccggggcctgactggacctcctggcagcagaggagagcggggggagaagggagatgtgggcagcgctggcctgaagggggacaagggggacagcgctgtgatcctgggccccccaggccccaggggggccaagggggacatgggagagcggggcccccggggcctggatggagacaagggccccaggggggacaacggggaccccggggacaagggcagcaaaggagagcccggggacaagggcagcgctggcctgcccggcctgcggggcctgctgggcccccagggccagcctggagctgctggcatccctggggaccccggcagccctgggaaggatggagtgcccggcatccggggggagaagggagatgtgggcttcatgggcccccggggcctgaagggggagcggggcgtgaagggggcctgtggcctggatggagagaagggggacaagggggaggccggccccccaggccggcccggcctggccggccacaagggggagatgggagagcccggggtgcccggccagagcggggcccctgggaaggagggcctgattggccccaagggggaccggggctttgatggccagcccggccccaagggggaccagggcgagaagggggagcggggcaccccaggcatcggcggcttccctggccccagcggaaatgatggcagcgctggccccccaggccccccaggctctgtgggcccccggggccctgagggcctgcagggccagaagggggagcggggccccccaggagagcgggtggtgggcgcccctggggtgcctggggcccctggagagcggggggagcagggccggcccggccctgctggccccagaggagagaagggggaggccgccctgacagaagatgacatccggggctttgtgcggcaggagatgagccagcactgtgcctgccagggccagttcatcgccagcggcagccggcccctgcccagctatgctgctgacacagctggcagccagctgcatgctgtgcctgtgctgcgggtgtcccatgctgaggaggaggagcgggtgcccccagaagatgatgagtacagcgagtacagcgagtacagcgtggaggagtaccaggaccctgaggccccctgggacagtgatgacccctgcagcctgcccctggatgagggcagctgcacagcctacaccctgcgctggtaccacagagctgtgacaggcagcacagaggcctgccacccctttgtgtatggaggctgcggcggcaatgccaacagatttggcacccgggaggcctgtgaaagacgctgccccccccgggtggtgcagagccagggcactggaacagcccaggactag

SEQ ID NO: 1426 - DNA, 8835 bp, Artificial Sequence
  derived and/or modified sequence
atgaccctgcggctgctggtggccgccctgtgcgccggcatcctggcagaagccccaagggtgagggcgcagcatcgcgaacgggtgacctgcacacgcctgtacgcagcagatatagtgttcctcctcgacgggtcctcttctattggccgctcaaatttcagagaagtgcgttcgttcctggaaggactagtgctgcccttctcaggcgcagccagcgcccaaggagttcgcttcgctaccgtccaatacagtgacgaccccagaacagagttcggcctcgatgcacttggcagcggcggcgatgttattcgggccatcagggaattgtcctataaggggggtaacaccaggaccggcgctgctattctccacgtggctgaccacgtcttcttacctcagttagcccgaccaggggtgcccaaggtctgcattcttatcaccgacgggaagtcccaggacttagttgacactgcagcccagcgcttgaaagggcaaggcgtgaaactgtttgccgtaggtatcaagaatgctgatcctgaggaactcaagcgggtcgcaagtcaacccaccagtgatttcttcttctttgttaacgacttctccatattgcgcacactgcttcccctggtgtctagaagagtgtgcactacagccggaggcgtgcccgtgaccagacctcccgacgattccacatcagccccacgagatctggtgctgtcagaaccaagttcccagagcctgcgagttcagtggactgcagcctccggacctgtgaccggctataaagtccagtataccccattaactggcttgggacagccactgcccagtgagcgccaggaagtgaacgtacccgctggcgaaacatccgtcagactgcggggcctaagaccactaaccgaataccaggtcacggtcatcgcgctgtacgcgaatagcattggagaagccgttagtggcaccgcacgcacgaccgccctggagggcccagaattaacaattcagaatacaaccgcacactcactgcttgtcgcgtggcgatcggtccctggagccaccggctaccgggtgacatggcgagtactgtccggcgggccaacgcagcagcaggaactcggtcccggtcaaggctctgtgctgctaagagatctggagcccggaaccgattacgaagtaacggtttcaacgctgttcggaagaagcgttgggcctgctacatcactgatggcacgtacagacgcctcagtcgagcagaccctgagacccgtcatcctgggccccacctccatcctgctttcatggaatctcgttccagaagcccgaggttatcgcttggaatggaggcgcgagaccggcctagaacccccgcagaaagtggtgctcccatccgatgtaactaggtatcagctagatggcctgcagccagggactgagtatcgactaaccctttatactttactggagggacacgaggtcgctactccagcaacggtagtcccaaccgggccggagcttcctgtttctcctgtgaccgatctacaggctaccgagctgccaggccagagagtccgggtcagctggtctccagtgccaggcgctacccagtatcggataatcgtgagatcaactcaaggcgtggagagaactttggtccttccaggatcccagaccgcttttgatctggatgacgtgcaagctgggctttcatatacagtgcgcgtgagcgccagggtgggcccacgtgagggctctgccagcgtgttaacggttagaagggagcccgagacccctctggccgtccctggattacgagtagtcgttagcgacgctactcgcgtgcgggtggcctgggggccggtgcctggagcctcaggcttccgcatcagctggtctactggaagcgggcctgagtcctcccagaccctgccgcctgactcaacagccactgatatcactggcttgcaacctggcactacctaccaggttgctgtcagtgtactgagaggacgcgaagagggccccgccgcagtgattgttgctagaacagatccactgggccctgtgaggaccgtgcacgtgacccaagccagcagttctagcgtgaccatcacctggactcgagttcctggcgcgacaggttacagggtttcctggcacagtgcacacggcccggaaaagagtcagctggtctccggcgaggcgacggtcgcggagctggacggtctcgaacctgacacagagtacactgtacatgtccgcgcccatgtcgccggagtcgatggcccacccgcctctgtggtggtgaggacagcgcctgagccggttgggcgtgtatcacgcctgcagatattgaacgcctcgtcagatgtcctgagaatcacgtgggtgggcgtaactggcgccacagcgtaccgactggcatgggggcgctcagaaggcggtccaatgcgacaccagatcctgcctggaaacacagattccgccgaaatcaggggactcgaaggcggggtctcctatagtgtgagggtgactgccctggtgggcgatcgcgaaggaacccccgtgagcatcgtggtgaccactccacctgaggccccacctgcactcggcacgttgcacgtggtacagaggggggaacacagcctgcgactgagatgggaacctgtgccccgtgcccagggcttcctgctgcactggcaaccagagggagggcaagagcagagtagagttctcggccccgagctgtcttcctatcacctcgatggcctagaaccagcgacgcagtaccgggttcgtctgagtgtgctaggacccgccggcgagggaccttcagccgaagttactgccaggaccgagtctccacgcgtgccgtctatcgaactgagggtcgtagacaccagtatcgacagtgttactctcgcctggacgcctgtgtcacgtgcatcctcatatatcctgtcttggcggcctctacggggccctggccaggaggtgcccggctctccacagacattgccaggcattagtagttcccagcgcgtgaccggcctggagccaggggtgtcctatatctttagcctcacacctgtgctggacggcgtgcggggaccggaagcatctgtaactcaaacacccgtgtgccctcgtggcctggctgacgtcgtgtttctgccacatgctacacaggataacgcgcacagggccgaggccactagacgcgtactggagcgactggtgctcgcacttggaccactggggccccaggccgtccaggtaggcctcctgtcctatagtcaccggccctccccacttttccccctgaacggatctcatgacttgggcatcatcctccaacgcatacgcgacatgccctacatggatccgagcggcaacaatctgggaacagccgttgtgacagctcaccgctacatgctggccccagatgcgccggggcgaaggcaacatgtccccggtgtaatggtactattagtggacgagccactccgaggagacattttttctccaattagggaggcccaggcctcaggactaaacgttgtcatgcttggtatggctggtgcagaccctgagcaattgcgccggctggcccccggtatggattccgtgcaaaccttttttgcggtggatgatggcccctcactggatcaggctgtgtccggactcgcaacagctctgtgccaggcctcgtttactactcagccgaggcccgagccatgtccagtatattgcccaaaagggcagaaaggcgaacctggtgaaatgggcctacgggggcaggtcggtccccccggtgatcccggcctgccaggtaggactggagcccccggtccccagggccccccaggttctgcgacagcaaagggggaacgagggtttcctggggccgatggcagacccgggtcaccggggcgcgccggaaaccccggtacccctggggcaccgggcctgaaagggtctcccgggctgcctggaccacggggggaccccggggagcgcggtcccaggggcccgaagggtgaaccaggtgcaccaggccaagtgatcgggggagaagggccaggcctgcccggtaggaagggcgatcctggaccaagcgggccccccgggccacgaggacctctgggggatcctgggccccggggcccgcccggactccctggcaccgccatgaagggtgacaaaggagacaggggagaacgcgggcctcccggccctggggaaggggggattgcccccggcgaacctggcctgcccggactgccaggatcaccgggtccacagggcccagtgggccctcccggaaagaagggtgagaaaggagattcagaggatggtgcccccgggctgccaggacagccaggtagccccggtgagcaagggcccagaggcccacccggagctattggtccaaaaggggatagaggcttccccggtcctctcggtgaagctggggagaaaggagagaggggccctccaggcccggccggaagcagaggcttacctggggtggcaggacgccctggcgcaaagggacccgagggccccccaggtcctacaggccggcagggagagaagggggagcctggacgaccaggcgatcctgccgttgttggaccggccgtagcaggtcctaagggcgaaaaaggcgacgtcggtcccgccggtccacgtggagcaaccggcgttcagggcgaacgcggaccgcccgggctagtattgcctggggaccccggccccaaaggggacccaggtgatcgagggcccatcggtctaacagggcgggcaggcccacccggggattccgggcctcccggcgaaaaaggagaccccggcaggccaggccccccagggcccgtgggcccacgcggaagagacggagaggtgggcgaaaagggagacgaaggccctccgggggatcctgggctgcccgggaaggctggcgagaggggactacggggagcccctggggtgcggggaccggtcggcgagaagggggatcagggagatcctggggaggatggccgcaatgggagccccggctcgtcaggacctaaaggagacaggggggagcccggaccccccggcccgcccgggaggctggtagatacaggtcccggcgcccgcgagaagggagagccgggcgatcgcggacaagagggccctcgaggcccaaaaggggatccaggacttccaggcgcacccggggagaggggcattgagggatttcggggacccccaggacctcagggagaccccggtgtgaggggcccagcgggcgagaagggcgataggggtccaccagggctggacggaagatccgggttagacggcaagcctggcgccgccggaccatcaggccctaatggagctgcgggaaaggccggagacccagggcgagacggtttaccgggtcttcgaggtgaacagggtctacccggacccagcgggcccccaggattacctggaaagcctggcgaggacgggaagcccggtttaaacggcaagaatggggagcccggcgaccctggtgaagatggaaggaagggggagaagggagactccggagcttccgggagagaaggacgcgacggtcctaaaggggagcgcggggccccaggtatccttggtccacagggcccacccggcctcccgggtcccgtgggtcccccaggccaaggattccccggagttcccggcgggaccggccccaaaggagacaggggtgagacgggtagcaagggtgagcaagggttacccggcgagcgggggttgcggggggagcccggatccgtgcccaacgtggatagactgctggaaactgccggcataaaggcgtctgccttgcgggaaatcgtagaaacctgggatgaatcctctggatcattcctgccagtccccgagcggcgccgaggtcctaaaggtgatagtggggaacagggtccacccggcaaagaagggcccattggctttccaggagagagaggcttgaagggagatcgcggcgatcctggccctcagggtccacctggcctggccttaggcgagcgggggccacctggaccatcaggcctggctggggagcccggcaaaccaggcattccaggactccccggaagggctggcggagttggtgaagcggggaggcccggcgagaggggcgagagaggagaaaagggtgagcggggagaacagggtcgtgacggaccacctggcctaccgggcactcccggccctccaggccctcctggacctaaagttagcgtcgacgaacctggccctggtctttccggggagcagggtcctccgggcttaaagggtgcgaagggggaaccagggtccaatggtgaccaggggccaaagggggatcgcggcgttccaggcattaagggcgaccgtggtgagcctggtccccggggccaggacgggaatccaggtcttccgggcgaacgcggaatggccgggccagagggtaaacctggactccaggggccccgaggcccacccggtccagttggtggacacggtgaccctggaccaccgggcgctcccggccttgctgggccagcgggaccacaagggccgtccggactgaagggggagccaggcgagacaggacctccaggccgcggtttaacaggacccacgggtgccgtgggcctaccgggtcctcctggccctagcggactcgtgggacctcaggggtccccgggcctgcctgggcaggtcggggaaacagggaagccaggggctcccggccgagacggagcttctgggaaagatggcgatcgagggagccctggggtccccggtagccctggactgcccggcccggtgggccccaaaggcgagcctggaccgacaggggcccccggccaggccgtagttggcctgcctggggctaaaggagagaagggcgcccccggggggttagcaggtgacctggttggtgaaccaggagctaaaggcgaccgaggcctgcctggacctcggggggagaaaggagaggccggcagagccggtgagcccggggaccctggggaggatggacagaaaggagccccaggacccaaaggcttcaaaggagacccaggcgtgggcgttcccggctcacccgggccccctggacccccaggagtgaagggggatctcggactgccggggttacccggggctccaggtgtggtcggattccctggacaaaccgggcctcggggagaaatgggacagccaggaccgagcggagaaagaggactggccggccccccaggccgggaaggcatccctgggccactgggcccccctggaccccccggttccgttgggccacccggggcctcgggtctcaagggcgataagggcgaccccggggtcggtctgcctgggcccagaggcgagcgcggagaacccggcatcagaggcgaggacgggaggccgggacaagaagggcccagaggccttacgggccctccaggcagccggggcgaacggggggagaagggagatgtgggctcagcaggattaaagggagataagggagactcagctgtgatcctggggccccccggaccccggggcgcgaaaggcgacatgggcgagcgcggaccacgaggattagatggcgacaagggcccccgaggagacaacggagaccctggcgataaaggatcaaaaggagagcccggagataaagggagcgcaggactccctggactccgtggcttgctcggcccacaaggacagccaggggctgcgggtatacccggagatccaggatctccagggaaagatggagtgcccgggattcggggggagaaaggcgacgtcggattcatgggcccaagaggattaaagggggagcggggggtcaaaggagcctgcgggctcgacggggagaagggtgataagggtgaggccggtccacccgggcgccccggtctggctgggcacaaaggcgaaatgggcgaaccaggcgtcccgggtcagtctggagcacccggtaaggaggggcttattggacccaaaggggaccgaggatttgacggccagcccgggccgaaaggcgaccagggggagaagggagagaggggtacacccggaataggcggattcccaggacctagtgggaatgacggcagtgccggcccaccaggacctccggggtctgtaggcccaaggggacctgaaggcttgcagggccaaaagggtgagagaggcccacctggcgagagagtcgtaggagctcccggggttcctggggcgcctggagaacggggtgagcaaggcaggcctgggcctgccggacctcgaggcgaaaaaggtgaggcggctctcaccgaggacgatatcagaggctttgtgcggcaggagatgagtcagcactgtgcttgtcagggacaatttatcgccagcggctcacggcccctgcccagttacgccgctgatacagcaggctcccagcttcacgccgttcccgtactccgggtgagccacgcggaggaggaagagcgggtgcctccggaagatgatgagtacagtgagtactcagagtattctgtggaggagtaccaggacccggaagcgccatgggactcggacgacccctgctccctgcccttggacgaaggctcttgtaccgcttatactcttcggtggtaccacagggcggtgactggttctacagaagcatgtcatccgtttgtttacggaggctgtggggggaacgccaatcggttcgggactagagaggcttgtgagcgcaggtgccccccccgggtggtgcagtctcagggtactgggaccgcccaggactag

SEQ ID NO: 1427 - DNA, 8739 bp, Artificial Sequence
  derived and/or modified sequence
atgaccctgcggctgctggtggccgccctgtgcgccggcatcctggcagaggcaccccgggtgcgcgctcagcatagagagcgggtgacttgcactcggctatacgcggccgatatcgtgttcctgctggatggaagctcttctattggcagaagtaattttagggaagtgagatcgttcctggagggattagtgctccctttctccggagctgctagcgcgcagggggtgcggtttgccaccgtgcaatattctgatgacccacggactgaattcggcctggacgcgttgggttcaggcggcgacgtaattagagccataagggaactgagctataagggcggtaatacaaggaccggagctgccattcttcacgtggctgaccacgtcttcctcccacagctggcacggcccggcgtgccaaaggtgtgcatccttataactgatggaaagtctcaagacttagtggacaccgcggcccagcggctaaaaggccagggcgttaagttgtttgcggtgggaattaagaacgccgacccagaagagctcaagagggtggccagccagccaactagtgacttctttttcttcgttaatgatttttccatccttagaacccttctccctttggtgtcgagaagggtttgcaccacagctgggggcgttcctgtgactcgcccccctgacgacagcacgtctgcaccccgtgacttggttttgtctgagccctccagccagagcctgcgtgtacagtggaccgctgccagtgggccggtaacagggtataaagttcagtatacaccccttacaggcttgggacagccattgccttccgagcggcaggaggtaaacgtgcccgcaggggagacctctgtaagattgaggggactgcggccactgaccgagtatcaggtcacagtcatcgctctttacgctaattccattggcgaagcggtgagtggcaccgcccgaactactgccttggaagggcccgagctcaccatccaaaacactacagcgcactcactgctggtcgcctggagaagcgttccaggagccacaggatatcgggtgacatggcgagtactgagcggcgggcccacacagcaacaggagttgggccctgggcagggcagcgttctcttgcgggatctggagccaggaaccgattacgaagtgaccgtctcaaccctgttcggcagaagtgtcggcccagcaacctctctcatggcccggactgatgcatccgtggaacaaaccctgcgccctgtcatcctgggccctactagtatattgctgagctggaacctagtacctgaggctcgggggtaccgactcgaatggagacgggaaactgggctagagcccccacagaaagtcgtccttccaagcgatgtgacacgttatcagcttgacgggctgcagccgggcacggaatatcggttgacactgtacacactgctggaaggacacgaagtggcgacacctgccactgttgtgcccaccggacccgagctacctgtgtcgcccgtcacggacttgcaagccaccgagctcccagggcaaagagtgagagtgagttggtcccccgttcctggggctacccagtatcggattattgtgcgctctacccagggcgtcgaaaggacactggtgttgcctgggagtcaaaccgctttcgacctcgacgatgtacaggccgggcttagttacacggttcgggtctcagcacgggtagggccccgtgaaggaagtgcgtctgtgctcaccgtgcgaagagaaccagaaacccctctcgccgtgcctggattaagggttgtggtgtcagacgcaacccgggtgcgggtggcttggggccctgtccccggagcttcaggattccgaatctcctggtccaccggaagcggacctgaaagctcccagactctgcctcctgactcgacagcaaccgatatcacaggcctccagcccggaactacctatcaggtggccgtcagcgtgctaaggggccgcgaagagggcccagccgccgtgatcgttgctaggactgaccccttgggtccagtgaggacagttcacgtgacacaggcctcctcgagctccgtgactattacctggactcgagtgccaggtgctacaggatatagagtcagctggcacagcgcccatggccccgagaagtcccagcttgttagtggagaagcgaccgtggcggagctggatggactggagcctgataccgagtatactgtgcatgtgcgggcacacgttgcgggagttgacggtccacccgccagcgtcgttgtgcgcacagcccctgaacccgtgggacgcgtttcccgacttcagatcctgaacgcatcaagtgacgtgctgagaatcacatgggtaggagtaacaggtgccacagcgtataggctagcttgggggagaagcgaggggggccctatgaggcatcagatcctgcctggcaataccgactccgccgagataagaggactggagggcggtgttagctactctgtccgagtgacggcgctggtgggggatcgtgaaggcacacctgtatccatcgtcgtcacaacccccccagaagcccctcccgcccttggcaccctccacgtcgtacaaagaggagagcatagcctccgcctgaggtgggagcccgtgccaagagcacaaggattcctgttacactggcagccggaaggaggacaagaacagtccagagtgctgggacccgagttgtccagctatcacttggacggtttagagcctgccacgcagtatcgcgtccgactgagcgtgctaggccccgctggtgaggggccgagtgcagaagtgaccgcgaggacagagtccccacgggtgccatccattgaacttagggtcgtggacacaagtatcgatagtgtaacactggcttggacgcccgtttcgcgggcctcttcttacatactgtcctggcgaccgctccgtgggccagggcaggaagtgcccggcagccctcagactctgcccggaatcagctctagccaacgtgtgactggcttggagcccggcgtgtcctacatcttcagtttaactccagtcctcgacggagtccgcggccccgaggcatcagtgacacagacgccagtgtgtcctagaggactggccgacgtggttttcctaccacacgcaacacaagacaatgcccatcgggccgaggcgacacgtcgggtgcttgagagactagtgctggcccttggccctttggggccccaggcggtgcaggtcggactgctgtcttactcacaccgacccagtcccctcttcccactgaatggttctcacgatcttggcataattcttcagagaataagggatatgccttatatggatccctccggcaacaatcttgggacagcggtcgtgacagcacatcgctatatgctcgctcccgacgctccaggccggaggcaacacgttcccggtgtgatggtgctcctggtcgacgagccactgcgaggagacatctttagtcctatacgagaggcacaggcctcaggcttgaatgttgtgatgctgggcatggccggcgccgacccggagcagctaaggagactggcacccggcatggattctgttcagacttttttcgctgtcgacgacgggccatctttggatcaggcagtgtccggcttggccaccgccctttgtcaggcaagttttactactcagccccggccagagccctgcccagtgtattgcccaaagggccagaagggggaacccggcgagatgggcctcaggggtcaggtgggtcccccaggcgaccccgggctgccgggacgtaccggcgcgcccgggccacagggcccaccaggttccgctacggctaagggagagaggggtttccccggcgctgacggccggccaggcagccctggccgcgccggcaatccagggacaccaggggctccaggtcttaaggggagccctggccttccgggtccaaggggcgaccccggagaacgaggtccacgcggaccaaagggggagcctggcgccccaggacaagtcataggcggggaggggcctggcctgccgggcaggaagggcgacccaggcccttccggccctcccggacctcgtgggccactgggagaccctgggccccgtggtcctcccggccttccaggcacagctatgaagggcgataaaggcgacagaggtgagagaggccctcccggacccggcgaaggggggatcgcccccggcgagcccgggttacctggcctgcccgggagcccaggccctcaggggccggtcggcccacccggaaagaagggtgagaagggtgacagcgaggatggggcccccggcctgcccggtcagcctggatctcccggggaacagggaccccgggggccccccggggcaattggaccaaagggggataggggctttcccggccctttgggtgaagctggggagaagggggagcgtgggccacccggtcccgccggttcaagaggtttgccgggcgtggctggtaggccaggagcaaagggtccagaaggcccccccgggccaaccggtcgccaaggcgagaagggcgagcctggacggcccggagatcctgctgtggtcggtcctgctgtcgccggtcccaaaggcgaaaaaggggatgtgggacctgccggtcctcggggggctactggcgttcagggtgaaagagggccacctggcctggtgttgccaggggatccaggccctaagggtgaccctggcgaccgaggtccgattggtctcactggcagagctggcccaccaggagacagtgggcccccaggcgagaagggggaccctggcaggccaggacctcccggaccagtcgggccgcggggacgtgatggggaagtaggcgagaagggtgacgagggtccacccggcgatcctggactgccgggtaaagccggggagcggggcctccggggagccccgggcgttaggggccctgtgggcgaaaaaggtgatcagggggacccaggcgaggatggacgcaacggcagcccaggctccagtggaccaaaaggagaccgaggggagccgggcccccccggcccccctggacgcctcgtggacaccggtccaggggccagggagaagggggaaccgggcgatcgtggccaggaagggcccaggggccccaagggggatcccgggttacctggtgctccgggtgagcgtggcatcgagggattcaggggtccaccagggccccagggtgatccgggggtcagggggcctgccggcgaaaaaggagatagaggtccacccggactggacgggcggtctggactcgatgggaagcctggggcagccggacccagcggccccaatggcgctgcagggaaagcgggcgaccctggaagagatggcctccctggacttcggggcgagcaggggctgccaggccccagcgggccgcctggacttccaggaaagcctggagaggatggaaagccgggcctgaacggcaaaaacggcgagccaggggaccccggggaggacggcaggaaaggagaaaagggggattctggtgcctctggcagagaaggattccctggggtgcctggaggtacgggcccaaaaggcgaccgaggagagaccggaagcaagggcgaacaagggctgcccggggagagaggattaaggggggagccgggttccgtccctaacgtcgacagacttttggagactgcaggtatcaaagccagcgcattacgggaaatagtcgagacctgggacgaatcttcaggcagctttctgcccgttcctgaacgaaggcgtggaccaaaaggcgacagcggtgagcaggggccacctggtaaggaagggcccataggatttccgggcgaacgcggactgaagggtgatagaggagacccaggacctcagggccccccaggactggccttgggtgagagaggtccgcccggcccaagtggcctggcaggagaaccaggaaagccaggtatccctggcctgccaggccgcgctggtggcgtcggagaagccggtcgtccaggagagcgcggagaaagaggagaaaagggggagagaggggagcaggggcgggacggaccgccaggccttcccggaacgcctggcccacctggcccccctggacctaaagtctccgtcgacgagcctgggcccggcctctctggcgaacagggtccgcctgggctgaaaggagctaagggggagccaggaagcaacggggatcaaggccctaagggcgaccggggcgttcccgggatcaagggcgacaggggtgaacccggcccaaggggacaggatgggaatcccggcctgccaggggaacgcggtatggccggacctgaggggaaaccaggcctgcagggaccaaggggccccccaggccctgtaggtgggcatggggatcctggacctccaggggcccccggattggccggacccgcagggccccaggggccttctggattaaaaggtgagcctggcgagaccggaccacccggtcgaggactaactggccctacaggggcagtgggcctccccggcccccccggcccatctgggctggttggaccgcaaggatctcctggcctaccgggccaggtgggagagacgggaaaaccaggtgccccaggaagggacggggccagtgggaaggatggcgatcgcgggtctccgggagtaccaggctcacctggcctgccaggccctgtgggcccgaagggagaacctgggcccaccggggcccctggtcaggccgtcgtgggcctgccaggcgcaaagggggagaagggtgccccagggggactggccggcgacctggtcggagaacccggcgctaagggcgatcgaggtctccccggaccacgcggtgagaagggggaggctgggcgtgccggcgaaccaggagatcctggggaagacggacaaaagggtgcacccggccccaagggctttaaaggggaccctggggtgggtgtccctggcagtccgggtcctcctgggccccccggtgtgaaaggagatctcggactgccaggcctgcccggagcacccggagttgtgggtttcccaggccagaccgggccgcgaggggaaatgggccagccagggccatcaggggagagaggcttggccggtccgcctggacgggaagggattcccggcccactcggtccccctggccctcccggcagtgtgggacctcccggcgcgagtggccttaagggcgataagggggatccgggggtcggacttccgggaccccggggcgaacgtggcgagcccggaattaggggcgaggatgggcggccgggccaggaaggtccaagggggctcacaggcccgcctggatctcgcggggagagaggggaaaagggcgacgtcggcagcgccggtctgaaaggagacaagggggactctgctgttatcctcgggcctccaggaccaaggggggctaaaggcgacatgggtgagaggggcccgaggggtctggatggtgacaaaggtcctcggggcgataacggcgatcccggcgataagggctcaaaaggcgagcctggcgacaagggctcggccggcctgccaggactgcggggtctgttaggaccccagggccagcccggggctgctggaattcctggggatccgggaagccctggcaaggacggcgtccctgggattagaggcgaaaaaggcgacgtgggcttcatgggcccaagaggactgaaaggtgagaggggtgttaagggcgcttgtggcttggacggagagaagggagacaagggagaagccggcccacctggtagacccggactcgcaggtcataaaggcgagatgggtgagccaggagttcccgggcagagcggagcccctggcaaagaagggttaattgggccgaaaggagataggggctttgacggacagccaggacccaagggcgatcagggggagaaaggcgaaagaggcacacctggtattgggggcttccccggaccttctggcaatgatgggtctgctggcccgccgggcccccccggctcagttggccccagaggacccgaggggctgcagggccagaagggggaaagaggtcccccaggcgagcgggtagttggggcccccggggtgcctggggcacccggtgagaggggggaacagggtaggccaggtccagccggtccccgtggcgagaagggggaagccgccctgaccgaggacgatatcagaggatttgtgaggcaggaaatgtcccagcactgcgcgtgccagggtcaatttatcgcttccggttctcgcccacttccctcctacgccgcagacaccgcagggagccagttgcacgctgtcccagtattgcgggtgagtcacgcagaggaagaagaaagagttccacctgaggatgacgagtacagcgagtattccgaatactcagtggaagagtatcaggatcccgaggccccctgggattccgacgatccctgttccctaccgctggacgaaggaagctgcaccgcctataccttgcgttggtaccacagagcagtaacgggctcaacagaagcttgccacccatttgtgtacggtggctgcggtggaaacgcaaatagattcgggacccgcgaggcctgcgagcgacggtgccccccacgcgttgtccagtcccaaggaactggaactgcccaagattag

SEQ ID NO: 1428 - DNA, 8835 bp, Artificial Sequence
  derived and/or modified sequence
atgactctcagactactggtcgcagccctctgcgcgggaatcctcgcagaagctccaagggtgcgcgctcaacaccgggagcgcgtgacttgtacccggctgtatgccgctgacatagtttttcttctggatggctcttcgtcgatcggacgttctaatttccgcgaggttagaagcttcctggaggggcttgtccttccgttctctggcgctgcttccgcccagggtgtgcggtttgccactgtgcagtatagcgatgacccccgtacagagtttgggctggatgcactcgggagcggtggcgacgtaatcagagcaataagagagctaagctataagggcggtaacactagaaccggagctgccatcttacacgttgccgatcacgtgtttttaccgcagttggcgaggcccggtgtaccaaaggtgtgtattttgattactgacggaaagtcacaggatcttgtggatactgctgcccagagattgaagggacagggggtcaagctgtttgcagtgggcatcaagaatgctgatcccgaagagctcaaacgcgtcgcttcccagcctacatcagatttcttcttctttgttaacgatttttccatactccgaaccttactgccgctagtgagcagacgggtctgcaccacggccggaggcgtcccagtgacccgcccacctgatgacagcacaagcgctccacgtgacttggtgttgtctgaaccttcctcacaaagtttacgagttcagtggacagccgcttccggtccggtgaccggctacaaggtccagtacacaccactcaccgggcttggccagccccttccctccgagcgccaggaggtcaatgtgcctgccggagaaacatctgtccgactccgaggactccggcctcttactgagtaccaggttactgtgatagccctatatgctaattcaatcggcgaagccgtgagtgggactgccagaacaactgcccttgaaggcccagaactgacaatccagaacactaccgcacactcactcctggtagcatggagaagtgtccccggagccacaggataccgagtaacctggcgggttctgtcagggggaccaacccaacagcaggagctcggacccggacaggggtccgtgctcctgagggacctggaacccggtactgattacgaagtaacagtgagtacgctgttcggtagatcggtaggtcccgctaccagcctcatggctcggacagacgcttccgtggagcagaccctgcggccagtcatacttggcccaacatctatactgctgagctggaatctagtccctgaggcgagggggtatcgtctcgagtggcggagggaaactgggctggagcctccccagaaggtggttctgcccagcgacgttacgcgatatcagttggatggcttgcagcccggaactgaatataggttgacactgtacactctcctggagggccacgaggttgccaccccggctactgtggtgcctactggcccagagctgcccgtgtccccagtcaccgacctgcaggccacagagttgccgggacaacgggttagggtatcttggtcacccgtgccaggggctacacaatatagaataattgtccgcagcacacaaggtgtcgagaggacacttgtcctgcctggctcccagacagccttcgacctggacgatgtgcaggccggactgagctacaccgttagggtgtcagctcgcgtgggaccacgcgaaggctcagcgagcgtcctcactgtcaggagagagcccgagacccctttggcagtacctgggctgcgggtggtcgtaagcgacgccacaagagtaagagttgcttggggacctgttccgggtgcatccggctttcgcatcagttggtcaaccggtagtggtccagagtccagtcagaccttacctccggacagcaccgcgaccgacataactggcctccagcctggaacaacttaccaggtggctgtgtctgttctacgtggacgtgaggagggacctgccgctgttatcgttgccagaactgaccccttaggtccagttagaaccgttcatgtgactcaggcttcctccagcagcgttacaataacatggacccgcgtgcctggggctacaggctacagagtgtcttggcacagtgctcatggacccgagaagtcacagttggtatcaggagaagccacggtggccgaactggacggcctggagcccgacactgaatatacagttcacgtgcgagctcatgtcgcgggtgtggacggacctccagcttcggttgttgtccgaacagccccagagcccgtgggacgggtgagccgactgcagattctgaatgccagttcagacgtcctgagaatcacctgggtcggcgtcactggtgcgaccgcttaccgactcgcatggggtagatcagaaggtggtcctatgagacatcagatcttgccaggaaacaccgactctgcggaaatcagaggactagagggaggtgtctcatacagtgttagagtaacagccctggtgggagacagagaggggacacccgtttccatcgttgtgacgacccctcctgaggccccacccgcactcgggactctgcacgttgtccagcggggagagcactctctcagactgcggtgggaacctgtccctcgagcacagggatttctccttcattggcagcccgagggagggcaggagcaaagtcgggtcctcggacccgagctgtcttcctaccacctcgacggactggagcctgccactcagtacagggtgagactgagtgtgttaggacccgcaggcgaagggcctagcgccgaagtgacagcgagaactgaatcaccacgtgtaccgagtattgagcttagggtggtcgacaccagcatcgactccgttaccttagcctggacacccgtgtcccgggcttcctcctatattttgtcatggagacccctgagaggcccagggcaggaagtaccaggcagtcctcaaaccctcccgggaatctccagcagtcagcgggtgactggactcgagcccggagtgtcttacatcttctcactgactcctgtactggatggtgtccgcggacccgaggccagcgtcacccagacaccggtctgtcctcggggactggccgatgtcgtgtttttaccgcatgcaacacaggataacgcgcatcgggctgaggccacccggagggttctggagcgcctagttctggctctgggtcctctcgggcctcaagcagtgcaggttggattgctgagctatagtcaccgcccttctcctctgtttcccctaaatggcagccatgacctgggcatcattctgcagagaatcagagatatgccatatatggatccgagcggaaacaatctcggcactgccgtggtcaccgctcatcggtacatgctggcacccgacgccccaggacgccgtcaacacgtgcccggagttatggtgcttcttgtggacgaacctctacgcggagacatatttagtccgatcagggaggcgcaggcttcaggcctgaatgtcgtgatgctgggcatggctggcgcagaccctgagcagctcaggaggttggctccaggaatggactccgttcagacgtttttcgccgtggatgacggcccatctttagatcaagcggtctccggactagccaccgctctgtgccaagcgtcatttactacacagcccaggcccgagccttgcccagtgtattgccccaaggggcagaagggggagccgggtgagatgggtctccggggtcaggttggaccccctggagacccaggtctacctggcaggaccggcgctcccggtcctcagggccctcccggtagtgcaacagcgaaaggggaaagagggttccccggtgccgacgggagaccaggctcacccggaagagcaggtaaccccggaacacccggtgcacccggactaaaggggagccctggattgccgggaccgaggggtgatccaggcgagcggggacccagaggtccaaagggagaacctggtgctcctggacaggtgatcggtggtgaaggtcctgggctcccaggcagaaagggggatccaggaccctcaggccctccaggcccaaggggacccctgggcgaccctggcccacgcggtccacccggacttccaggtactgccatgaaaggcgacaagggtgaccgaggagagcgcggtccccctggaccgggtgaaggcggaattgcacccggagagcctgggctgcctgggcttcctgggagcccgggtccacagggtcccgtcggaccacccggaaaaaagggcgagaagggtgattccgaagacggcgcaccgggtctgcccggtcagcccggttcccctggcgaacagggccctcgaggcccaccaggcgcaattgggcctaagggcgaccgaggcttcccaggtcccctgggagaggctggagaaaaaggcgagcgcggtccgcctggtcctgccggaagccgagggctacccggagtcgccggacgacctggcgcaaagggccctgagggaccgccagggcctaccggcagacaaggcgagaagggagagccgggaaggcccggagatcccgcagtggtgggtcccgcagtcgctgggcctaaaggggaaaaaggtgacgtagggcctgctggcccacgtggcgctacgggcgttcagggtgaaagaggtccacctggcctagtgctccccggtgaccctgggcctaaaggcgatccaggagataggggccctatcgggttgaccggacgagccggtcctcctggagatagcggtccgcctggcgagaaaggagatccaggtcgaccgggaccgccaggtccagtgggcccacgaggcagggacggagaggtaggtgagaaaggtgacgagggccctcccggagacccagggctgccaggaaaagccggtgagcgtgggcttcggggagcacccggtgtgcggggacccgtgggagagaagggagaccagggggaccctggtgaggatggccgaaacggctccccaggcagctccggcccaaagggcgatcgcggtgaacccggaccacccggaccaccaggacggctcgtggacacaggcccaggtgccagggaaaaaggggagccaggcgatcggggtcaggagggaccccgtggtcccaaaggcgaccccggattgccaggcgcacctggggagcgcggtatcgagggatttaggggacctccgggaccgcagggggaccctggagtcaggggtcctgctggcgagaagggcgaccgaggaccaccgggactagacggaaggtcggggctcgacggcaagccgggagccgctgggccaagcggcccaaacggggctgcaggcaaggccggtgaccccggaagggatggccttcccggactgaggggggaacaggggctgcctggaccttccggacctcctggcttgcccggaaaacctggcgaggatggtaagcctggcttgaatgggaagaacggagaacccggtgaccctggtgaagacggacgtaagggtgaaaaaggagattcgggggcttctggaagagaaggtagggatggacctaaaggcgaacgcggagcgccaggtatccttggacctcagggaccccctggcctgcccggacccgtgggaccaccagggcagggatttccaggtgtacccggagggacaggcccaaaaggtgaccggggagaaactggctctaagggcgagcaaggactgcccggtgaaagaggcctgaggggtgagcctggctctgtccccaacgttgatcggttgctggaaacagcagggatcaaggcaagcgcactgcgcgagattgtggaaacatgggacgaatcaagtgggtcctttttaccagtgcctgaaagaagacgcggacctaaaggagatagtggtgagcaaggcccacctggaaaggaaggccctatcgggtttcctggagaaagaggccttaagggcgacagaggcgaccctggtccgcagggtcctccaggtctggccttaggtgaaagaggccctccaggccctagcggattggcaggtgaacccggaaaaccaggtatccccggactacctggaagagctggtggagtgggagaagcaggcagacctggcgaacgcggagagcgtggagagaaaggcgagcgaggcgaacaaggtagagatggccctccaggacttcctggcacccctgggccaccagggcctcccggacccaaggtgtctgttgatgaacccggaccaggactcagtggtgagcaaggaccgccaggtctcaagggtgctaagggggaaccaggatccaatggagaccagggccctaagggggaccggggagtccctggcataaagggggataggggagagccgggaccacgtggacaggatggaaaccccggtttgcccggagagcgagggatggccggacctgagggtaagcccggtctgcaagggcctcggggaccacccggtccagtggggggtcacggtgacccagggcctcccggagcacccggattggcaggcccagcagggccacagggtccctcagggctgaagggcgaacctggagagacgggcccacctggtcgaggtctgacaggccctactggtgctgtcggactgccgggacccccagggcctagtggcctggtcggaccgcagggatctcccggactacctggacaggtgggtgaaacagggaaacccggtgctcccggacgcgacggagcctcagggaaggatggggaccgtgggtcacccggagtaccagggtccccagggctgccagggccagtggggccaaagggcgaaccgggacccacgggcgctccaggacaagcggtggttggattaccaggggctaagggtgaaaaaggagcacctggaggcctagccggtgatttagtgggcgagccaggcgcaaagggggatcggggacttccgggtccacgcggagaaaagggagaggcagggcgtgccggagaacccggagacccaggagaggacggacagaagggtgcccctgggccaaagggcttcaagggggatcccggagtgggagtacctggcagtcccggtcccccaggacctcccggagtcaagggagatctcggcctccctgggctcccaggcgcacctggagtcgtgggctttcccggtcagaccgggccaaggggcgaaatgggccagcctggaccgtctggcgagcggggactggccggaccccctggcagagaaggcattccaggacccctgggacccccagggccacctgggtccgttggcccacccggtgcatccggcttaaaaggtgataagggtgaccctggggtcggactccccggtccaaggggggagcgcggagagcccggaatccggggagaagacggccgacccggtcaagagggcccaaggggtctaaccgggcctcctggatcacgaggagagcggggagaaaagggggacgtggggtccgccggtcttaagggagataaaggcgattcagctgtgatactaggacctcccggtccacggggagccaagggagacatgggcgagaggggcccacgcggactggatggggataagggacccaggggcgataatggagaccctggagataaaggatccaagggcgagccaggggataagggcagcgcgggattgcctggcctgagggggcttcttggcccacagggacagcccggagcagccggaatccctggcgaccccggttcacctggaaaagatggcgttcccggtattaggggagagaaaggcgacgtgggctttatggggccaagaggacttaagggggagcgaggtgtgaagggcgcttgcggtctcgacggcgagaagggggataagggggaggccggtccaccagggaggccagggctggcaggccacaaaggcgagatgggagagccaggcgtgcccggtcagagcggggctcccggtaaggaaggcctgatcggcccaaagggagaccggggtttcgatggtcagcctggtccgaagggggatcagggggagaaaggcgaaagggggacccctggtataggtgggttccccggtccctccggaaacgatggaagtgctggcccacctggccctccgggaagcgtgggccctcgaggaccggaaggcctgcagggccaaaagggcgagcggggaccacccggagaacgggtggttggagcaccgggagtgcccggagcacccggtgagcgcggtgagcagggacggcctggccctgctgggccaaggggtgagaaaggtgaagcagcactgaccgaggacgatatcagaggctttgtgcgccaggagatgtctcagcattgtgcctgtcaggggcagttcatagcttcgggttcgcgtccccttcccagttatgctgccgacacagctggctctcagctgcacgctgttccggtgctccgggtgagccacgctgaggaggaggagagggtaccgcctgaggatgatgagtacagcgagtattcggagtactctgtcgaagaataccaagatcccgaggcaccttgggactccgacgacccctgtagtttgcccctggacgagggttcttgcactgcctacaccctgcgctggtatcacagagccgttacaggtagcactgaagcgtgtcacccattcgtctacggaggatgcggcggtaatgccaacagattcgggactcgcgaggcgtgtgagcgtaggtgtccaccaagggtggtacagagccaggggactggcaccgcccaggactag

SEQ ID NO: 1429 - DNA, 8738 bp, Artificial Sequence
  derived and/or modified sequence
atgactctgcgcctcctagtcgctgccctgtgtgctggaattcttgccgaggcgccacgggttcgcgctcagcatagagagagagtgacttgtacccgcctttacgccgctgatattgtcttcctgcttgacggaagctcttctatcggcaggagcaactttagagaggtgcggtcctttctggagggactggtcttaccatttagcggggcagcgtcagcccagggggtgaggttcgcgactgtgcaatattccgacgatccgagaacagagtttggtctagacgctttgggatcaggaggggatgtgattcgggctatccgagagctttcctataaaggaggaaacacgagaaccggcgctgcgattctccacgtggcagatcacgttttcttgccccagctcgctcggccaggggtgcctaaagtatgtattttgattacagacggtaagagtcaggatctggtggatactgctgcacagagattgaagggccaaggcgtcaaactcttcgcagttggaatcaagaacgccgaccccgaagagcttaaacgagtggctagtcagcctactagtgattttttctttttcgtgaatgatttcagcatcctgcgcactctactccctctggttagtcgccgtgtctgcaccacagccggtggggtgcccgttacaagaccaccagatgatagtacttccgctccacgcgatctggtgctgtcagaaccgtcgagccagagtctccgggtgcagtggacagctgccagcgggcctgtcactggttacaaggtgcagtatactccactgacgggcctcggccagccgctgccatccgagcgccaggaagtgaatgtgcccgctggcgaaaccagcgtgcgcctcagaggactgcgcccactaacagagtaccaagtcacagtgattgctttatatgcaaacagcattggcgaagctgtctccggaacagcacgcacaaccgctctcgagggaccagagctaaccatccagaacaccaccgcacacagtttgctggtcgcgtggcgctctgttccgggtgctaccggctacagggtcacctggcgggtgctgtcggggggtcccacacagcagcaggaactgggaccaggacagggctccgttctgttgagagatctggagcctggaactgactatgaagtgactgtgagcaccctgttcggacgttctgtaggacccgctacatcactcatggcacgaacggacgcaagcgttgagcagaccttgcgaccagtgattctggggccaaccagcatcctgctcagctggaacctagtaccagaggcgaggggttatcggctcgagtggaggcgcgaaaccgggttagagcccccacagaaggtggtactccccagcgacgtaacacgatatcagctagatgggctgcagcccggtactgagtacaggttaaccctctacacactgctggagggccacgaggtggccacccctgctaccgtggttccgactggtccggaactgcctgtttctcccgtcaccgatctccaggcaaccgaactgcctggccagagggtgcgcgtatcttggtctccagtgcctggggcaactcagtatagaattattgtgcgctcgacccaaggagtagaaaggacactggtgctgcccggttctcagacagctttcgatcttgacgatgtgcaagcagggctgtcctatactgtcagggtttccgccagagttgggcctcgagagggctcagcatccgtgctgactgtgcgacgagagccagaaactcccctggcagttcctggtcttagggtagtggtcagcgacgcaacacgagtgcgcgtggcttgggggccagtacccggtgcgtctggcttccgcatttcttggtccaccggatctggccctgaaagcagtcaaacccttccgcctgatagtacagcgacagatattaccggcctacagcccggtactacataccaggtcgcggttagcgtgctcagaggccgagaggagggcccagctgctgtgatagttgcaagaacggatccactgggacccgtccgtacagtccacgtgactcaggcatcttcgtcgtcggtgacgattacctggacaagggtccctggcgcaaccggctatcgggtatcatggcacagcgcacatgggcctgagaagagccagctagtctccggagaagccacagtagccgaacttgacggactcgaacccgacacagagtatacggtccatgttcgcgctcacgtggccggagtggatggtccaccggcatctgtggtggtgaggacggctccagagcccgtgggcagagtgtcccggcttcaaatactgaatgcatctagtgacgtgctcaggattacatgggtgggtgtaaccggcgctactgcctacaggctagcatggggcaggagtgagggcggaccaatgcgtcaccagatactccctggcaataccgatagtgccgagattaggggccttgagggcggtgtgagttatagtgtgcgggtgactgccctggttggggacagagaagggactcccgtctctatcgtggtcaccaccccaccggaggctccaccagcacttggcacactgcacgtagtccagcgcggagagcactctctgcggctgcgatgggagcctgtgccccgagcccagggatttctgctgcattggcagcctgagggaggccaagagcagtctcgtgtgcttgggccagagctgtccagttaccacctggatggactggagccagctacccagtacagagtcaggctttcagtgttagggccagcgggtgaagggccttcagccgaggtgacggccagaacggaatcacctcgcgtgccgtctatcgaactccgtgtggtagatacgtctatcgactctgtcacgctggcctggactcctgtatctagggcgtcttcgtacatcctgagctggaggcccctgcgcggaccaggccaggaagtcccagggtcccctcagactctccctggcataagctcttctcagcgcgtgacagggttagagccaggcgtgtcttacatcttctccctcacacctgttctggatggtgtgcgcggacctgaagcatcggttactcagaccccggtctgtccgcgtgggttggctgacgtcgtctttctgccacatgccacccaggacaatgcacatcgggcagaagccacacgtcgcgtactagaacggctggtgctggcgctcggtcctctcggtccgcaagcagtccaagtgggcctgttatcctactcacatcgtcccagtcctcttttcccccttaacggtagccacgacctcggtataatactgcaaaggatccgggatatgccttacatggaccccagcggcaacaatctgggcacagctgtcgttactgcccataggtatatgcttgctccagacgctccgggtcggcgacagcacgtaccaggcgtgatggttttgcttgtcgatgagccactaaggggcgatatcttttcaccgattagagaggcccaggccagcggcttgaacgttgtcatgctcggtatggcaggcgcagatcccgagcagttgcgacgcctggctcccggaatggattcagtgcaaacattctttgcagtggatgacggtccctcgttggaccaggctgtgtccggactggcgacagctctgtgccaggcttcattcactacacaacctcgcccagaaccctgtcctgtgtattgccccaagggccaaaagggcgagcctggtgagatgggtctgagaggccaggtgggacctcctggggacccaggcttgcccggacgtacaggagctccagggcctcagggcccacctgggtctgctaccgccaaaggtgagcggggatttcctggggcagacgggagaccaggctcacctggcagagcaggcaacccgggtactcccggtgctcccggtctcaaagggtcacctggccttccaggccctcgaggagaccccggtgagagggggccacgcggacccaagggagaaccaggcgcacctggacaggtgatcggaggagagggccctgggttgcccggtcgaaagggggaccccggaccttcgggcccaccaggacctagagggcctctgggcgatccaggcccacggggtcctcccggattgcccggaactgccatgaagggcgataaaggagaccgcggagagaggggcccacccggaccaggcgaggggggaattgcgcctggtgaacccggacttcccggactacctggcagccctggtcctcaaggccctgtgggaccaccgggtaagaagggcgagaagggagactccgaagatggagctccaggcctcccagggcagcccggttccccgggtgaacagggcccacgcggaccacccggagccattgggccaaagggcgacaggggcttcccgggacctcttggagaagccggtgagaagggcgaaaggggtcccccaggcccagctggatctagggggcttcctggcgtagccggacgacctggcgcaaaaggtcccgagggccctcccggaccgacaggacggcaaggagaaaagggtgagccgggaagacccggtgatcccgctgtggttggccctgctgtcgcaggaccaaaaggcgaaaagggagatgtgggccctgcagggccaagaggcgctactggcgtgcaaggcgagaggggcccacccggattggttctccctggagatccgggaccaaagggtgatcctggcgacagaggacccatcggacttacaggacgtgcaggcccaccgggtgatagtggcccaccaggggagaaaggagatcctggcaggcctggtcctccgggacccgtgggaccgaggggcagagacggtgaagtgggtgaaaagggggatgagggccctcccggagatcctggtctgcctggcaaagccggtgagcgcggactacgaggagcccctggggtcagaggaccagtcggcgagaagggcgaccagggagatccgggtgaggacggcaggaatggcagccctggatctagcgggcctaagggtgatagaggcgaacctggccctcccggacctcccggtaggttagtcgatacaggaccgggtgcgagggaaaaaggggaacctggtgaccgaggacaagaggggccacgagggcctaagggcgaccctggcctgcccggtgcccctggagaacggggaattgaaggattcagagggccaccagggcctcagggagaccctggagtgcggggaccagcaggtgagaaaggtgacagaggcccaccaggattggacggcaggtctggactggatggcaaacctggcgctgccggtcccagtggccctaatggggctgccggtaaagcaggtgatccagggagagacggcttacccggactccgaggcgaacaaggtctgccaggaccctcggggccacccggactgccgggaaagcctggcgaagacggaaaacctggtttgaatggaaagaatggcgagccgggtgatccaggggaagatgggaggaagggtgagaaaggagacagcggtgcctcaggccgtgagggattcccaggggtgcccggtggtacaggtccgaaaggtgatcgtggcgaaacaggttcaaaaggtgagcaggggctccctggagagcgtggcttaagaggggagccaggatccgtgcccaacgtagacaggctgctggagaccgcgggaattaaagccagcgccctcagagagattgtcgagacatgggacgaatccagtggaagtttcctgccagttccagaaagacgcagaggtcctaagggcgacagcggggagcaaggccctcctggcaaggaaggtcccattggctttcctggagaacgcggactgaagggagaccgaggtgacccaggaccccagggccctccagggctcgctctcggcgagcgcggtccgccaggcccatccggccttgcaggcgaacctggcaagccgggtatccccggactgcctgggagagctggaggtgttggagaggcaggcaggccaggcgagcgcggtgaaaggggggagaagggagaacgaggcgaacaagggagggatgggcctccgggactgcctggcactccaggtccacccggacctcctggtcccaaggtctctgtcgacgagcctgggccagggctgagtggggagcaaggtccccctggcctcaaaggggcaaaaggcgagccgggtagcaacggcgaccagggtcctaaaggcgacaggggagtcccaggcattaagggagatcgcggagaacccggacccagggggcaggacggaaatccagggctgccaggggagagaggaatggctggcccagagggtaagcccggtctgcaaggccctagggggccacctgggcctgttggaggccacggagacccaggcccacctggtgcccctgggctagctggcccagccggaccacagggccctagcgggctgaagggggaacctggcgaaactggacctcccggtcggggactgaccgggccaaccggcgctgtcggtctgccgggacctcctggcccttccggtctggtgggtccgcaggggagcccgggactcccaggacaggttggggaaaccgggaagcccggtgcccctggccgagatggagcatctggaaaggacggcgacaggggctcacctggcgtgcccggttcgcctggcctacctggcccagtgggaccaaagggagaaccagggccaacaggtgcaccgggacaggccgtcgttggtctgccgggagcaaaaggagagaaaggcgctcctggcggtctggccggagaccttgtcggggaacctggcgctaagggtgaccgaggcctgccagggccaagaggcgaaaaaggagaagccggacgagccggagagccaggggatccaggcgaagatggccaaaaaggggcacccggtccgaagggatttaagggggaccccggtgtgggggtgcccggatctcccggacctccaggtccgccaggtgttaaaggtgatctgggacttcctggtctgcccggagcccctggtgttgtaggatttcctggtcagaccggaccgaggggggagatgggtcagcccggaccctctggtgaacggggattagccggacctcctggcagggaggggatcccaggacctctcggcccacccggtccacctggttcagtcggacctcccggtgcatccggactgaagggcgacaaaggagatccgggagtcggattacccggtccacgtggagagaggggagagccaggcattcggggtgaggatggcaggcccggacaagagggaccaaggggcctcaccggaccgccaggatcgcgcggtgagcgtggagagaagggagacgtcggatctgcaggcctgaagggtgacaagggcgactccgcggtgattctgggcccaccagggccaaggggggcaaaaggtgatatgggggagcggggtcccagaggactggacggcgacaaaggacccagaggtgataatggggaccccggtgacaaaggctcgaagggggaaccgggagacaaggggtccgctggactgccgggactccggggactcctcggacctcagggacagcccggagctgctggcattccgggagacccaggatcgcctgggaaggatggcgtccccggaatcaggggagagaagggagacgtgggattcatgggccctcgagggctcaaaggcgagcgtggggtgaagggcgcttgtgggctggacggagagaaaggagataagggtgaggctgggcctccagggagaccgggactggccggtcacaaaggagagatgggagagccgggtgttccgggacagtctggtgcccctgggaaggaggggctgattggcccaaaaggcgatagaggattcgatgggcagccgggtccaaagggcgaccagggagagaagggcgaacgtggcaccccaggcattggcggatttcccggaccgagtggtaatgacggctccgccggaccaccagggccaccaggctcggtgggcccaagaggacccgagggcctgcagggacaaaaaggcgagcgcggaccccctggcgagcgcgttgtgggtgctccaggggtgcccggtgccccaggagaaaggggcgagcaagggagaccgggtccggcagggccaagaggtgagaagggcgaggctgccctgacagaggacgacatacgaggtttcgttaggcaagaaatgtcgcaacactgcgcctgtcaagggcagttcatcgccagtggaagtcgtccactgcccagctacgcggcagatacggccggatcacagctccacgcggttccagtgctgagggtgagccacgccgaagaggaggagagagttccccctgaggatgacgaatatagtgaatactcagaatacagcgtagaagaataccaggaccctgaggcaccttgggattcagacgatccctgtagtctcccactggatgaaggatcctgcacggcctacaccctgcggtggtatcatcgggctgtcacggggtctactgaggcctgtcatccgtttgtgtatggaggctgcggaggcaatgcgaatcgatttggcacccgggaggcctgcgaacgcaggtgccccccacgcgtggtacaatcccagggaacagggacagctcaggatta

SEQ ID NO: 1430 - DNA, 8835 bp, Artificial Sequence
  derived and/or modified sequence
atgacattgcgtctcctggttgctgctctgtgtgccggaatcctggcagaagccccacgtgtgcgcgcccagcacagggaacgggttacttgcacccggctatacgcagcagatatagtcttcttgctggacggcagttccagcatcggccgcagtaatttccgggaggtcagaagcttcctggaaggcctcgtgctcccgtttagcggggcggctagcgcgcaaggcgtgagattcgccacagtccaatattcagacgaccccaggactgagttcggcctcgacgccctgggatcgggcggggacgtgattagagcaatacgagaactgtcttacaagggtgggaatacacggaccggagcagctatccttcatgtcgccgatcatgtttttctcccccagcttgcccggcccggggtaccaaaagtttgcatactgatcacagacggaaaaagccaggacctcgtcgatacagctgcgcagaggctgaagggccaaggagtgaaactgttcgccgttggtattaaaaatgcagacccagaggagctgaagcgggtggcatctcagcccacttcagacttcttcttttttgtgaatgatttctcaatcttaagaactttattgcccctggtgagtcggcgggtctgcacaaccgcgggcggggtgcccgtgactagaccgcctgacgactcaacatccgcaccaagagatttagttcttagtgagcccagcagtcaaagtctgcgggtccaatggacggcagcctccggaccagttactgggtataaggtgcagtatacccccctgactggactcggtcagcccctcccttctgaacggcaagaggttaatgtaccggccggcgagacatcagttcgccttagaggacttcggcccctcacagagtaccaggtaacagtgatcgctctgtacgcaaacagcatcggagaggccgtgtctggtacagcaagaacaactgccctcgagggcccagagctcactatccagaatactacggcacacagtctgctcgtagcgtggcggagcgtgcctggtgctactggataccgagtgacgtggagagtgcttagcggtggccccacccagcaacaagaacttggacctggtcagggtagcgtactgttaagggacctggaaccaggaaccgattacgaggtcaccgtgtcaacgctcttcggccggtctgtgggacccgctacttctttgatggcacgaacagatgcgtccgtggaacagactctgagacctgttattctagggccaacatccattctcctgtcttggaatctggttccagaggcgaggggttatcgtttggagtggaggagggagaccggtctggagccaccacagaaggtggtcttaccctccgacgtgacgcgctatcagctggacggattacagcccggtactgaatatagactgactctatacacgctgctcgagggtcacgaagtcgccaccccagctacagtagttccgaccggacccgagctgcccgtctccccggtaaccgatttgcaggcaactgaacttcccggacaacgcgtcagagtgtcatggtcccccgtaccaggagccacacagtacaggatcatagtgaggtcgactcagggggtggaacgcaccctggtgctgcctgggtctcaaacagcctttgacctggacgacgtccaggcgggcctgtcttatactgtgagggtgagtgctagagttggaccgagggaagggagcgcctccgtgctgactgtcaggagggagccggagacaccacttgccgtgccaggcttaagggttgtggttagcgacgcaacacgggtcagagtcgcatggggacccgtgccaggcgccagtggctttcggatcagttggtccacgggcagcggccctgagagctcccagactttaccccccgactccacagctacagacatcacagggctccagcccggaacaacctaccaggtcgcagtgagtgtactcagagggcgtgaagagggacccgccgccgtgatagtcgcccgtaccgatccactggggccagttaggacagttcatgtgacgcaggcttctagttcttctgttactatcacctggactagagttcccggggccactggctatcgcgtgtcttggcacagcgcgcacggccccgaaaaaagccagctggtgagtggggaggcaactgttgctgaactcgacggactcgagcctgataccgaatacaccgtacacgtgcgagcacacgtggctggggtggacggaccccccgccagtgtggtcgtgagaacagcacctgagccagttggacgagtgtcccggttacagatactgaatgccagctccgatgtcctgaggatcacttgggtgggcgtaaccggcgctactgcctaccgactggcctggggtcgctcagaaggcgggccaatgaggcaccaaattctgcctgggaatactgacagcgccgagatcagggggctcgaaggcggagtatcatacagcgtgcgcgtgaccgccttggtaggggaccgggagggtactccggtctctatcgtggtcaccactcccccggaagcgcccccagcattaggaacactgcacgtggtccagaggggggagcactctctccgattgcggtgggagcccgttcccagagcccagggattcctgctccactggcaacctgaaggcggccaggaacaatcccgcgtgttagggcctgaattatcctcttaccatctcgacggcttagaaccggccacgcagtatcgagtacggcttagtgtcctgggtcccgctggagagggcccttccgctgaagttaccgcgcggactgagtctccccgcgtgccctccatcgaattgagggtcgtggacacgtctatcgatagtgttacgttagcatggacccccgtgtctagagcctcttcctacatcctgagctggagaccattgcgtggacctggccaggaagtgccgggaagtccacagacactacctggaatttcaagctctcaaagagttactggactggagcctggcgtttcctacatcttttcactgacacccgtgctagatggagtgcgcggaccagaggcctccgttacccaaactccagtgtgtccccggggcctggcggacgttgtatttctcccacacgccacgcaggacaatgctcatagagcagaggcaactaggcgggtactggagcgcctggtgctcgctcttggcccactgggaccccaggccgtacaggtgggactcctgagctactctcatcggccttcacccctctttccactcaatgggtctcatgatctaggcattatactgcagaggatccgggatatgccctatatggaccctagcgggaataatcttgggaccgcagttgtgaccgctcatcgatacatgttggcgcccgatgctcctggcagaaggcagcatgtccccggtgtgatggtcctgttggtcgatgagccattaagaggggatattttctccccgatccgagaagcccaggcttcaggcctgaacgtcgtcatgctggggatggccggcgcggaccctgaacagcttcgccgactggcgcccggaatggattccgttcagacctttttcgctgtggacgatggtccctctctggatcaagcggttagtgggttggctaccgcactgtgtcaagcatccttcactacacagcctcgccctgagccctgccccgtgtactgtccaaagggtcagaagggcgagccaggggagatgggattgagaggccaggtagggccaccaggagacccaggtttacccgggaggacaggggctcccggcccccaagggcctccggggagcgcaaccgccaagggcgagagagggttccccggcgccgacggtagacccggatccccagggagggctggcaatcccggaacccccggtgctcctggtctgaaaggctcaccaggcctccctgggcctcgaggtgatcccggtgagcgaggtcctcgcggcccaaagggagagcctggcgctcccgggcaggtgatcggaggcgagggccccggcctccccgggcgcaaaggagacccgggaccttctggccctcctgggccccggggacctttaggggatccagggccaaggggacctccaggacttccaggcacagcaatgaagggagataagggcgatagaggagaaaggggcccccccgggcctggcgaggggggcattgcccctggggagccaggcctgccgggcttacccggatcaccggggcctcaaggtccagtaggtccccctggcaagaaaggagagaaaggtgattccgaagacggtgcccccggattgccaggacagcccggaagccccggcgagcagggccctcggggccctcccggcgccataggcccgaaaggcgatagggggttcccaggtccactgggcgaggctggcgaaaagggcgagcgcggtccacctggcccagctggaagccgaggcttgcccggagttgctggtagacccggagctaaaggccccgaggggccccccggaccgactggcaggcaaggggaaaaaggagagcccggaagaccgggggaccctgcagtggtagggccagctgtcgccggacctaaaggcgaaaagggagatgtgggccctgcaggacctcgcggcgccactggtgtgcagggagagagaggtccacctggcctagtcttgcctggcgaccccgggccaaaaggtgatccgggagacagggggcccatcggactcacaggccgcgccgggccccctggagatagcggtcccccaggggagaaaggcgacccggggcgacctgggcctcccgggcctgtgggaccgaggggccgagatggcgaagtcggagagaaaggtgatgaaggccccccaggcgaccctggcctgcctggcaaagccggtgaaagaggccttagaggagctcccggggttagaggcccggtgggggaaaagggagaccagggagatccaggcgaagatggtagaaatggttctccagggagtagcggacctaagggggataggggcgagcccggccccccggggccccctggccggctcgttgacaccggtcctggcgccagggagaagggcgaaccaggtgaccgtggacaggagggacccagagggccaaaaggtgaccccggtcttccaggcgcgccaggcgaacggggcattgagggctttagaggaccgccaggtccccagggagaccctggagtccgcgggcccgcaggggagaaaggcgaccgagggccccctggcttagacggaaggagcggcttagatggaaaacctggagcggccggtccgtctgggcctaacggagccgcaggtaaagctggggatccaggccgtgatggcctgccaggtctcaggggggagcaagggctgcctggcccatctggcccaccaggccttccgggcaagcctggggaggacggtaaacccgggttgaatggcaagaacggcgaaccaggagatccgggcgaggacggcagaaaaggggagaaaggagacagtggagcgagcgggcgggagggacgggacggccccaaaggagaacgaggcgctcccggaattttggggcctcagggtcccccggggttgccaggcccagtgggtcctcctggccaggggttccccggcgtgcccggtggaacgggaccgaagggcgacagaggagagaccgggtccaagggtgagcagggtcttccaggggaaagggggctgaggggggagccgggatctgtgcccaacgtcgacagattgctggagaccgccgggattaaagcgtcggctctaagggaaatcgtggaaacctgggacgagtcttccggcagcttcctccctgtgcccgaacgccgcaggggacctaaaggcgattccggtgagcaggggccccctggcaaagaaggcccaatcggattcccaggcgaaagaggactcaaaggggaccggggcgacccagggccgcagggaccacccggactggcccttggcgaacgcggtccccctggtccctccggcctcgcaggggaacctggcaaaccgggaatccccggactgccaggtagagccgggggggttggagaggccggtcgtcccggagagagaggggagcgaggcgaaaagggcgagcggggggaacaagggcgcgatggtcctcctgggctgcctggcactcctggccctcctggtccacccgggccaaaggtttcagtcgatgagccaggaccaggactgagcggagaacaggggccacctgggttgaagggggctaagggagagcctggaagcaacggggaccaaggcccaaagggagacaggggagtacccggaatcaagggcgatcgtggggaacctggacctcgcgggcaggatgggaatccagggttacccggggagaggggaatggctgggccagaaggaaagcctggccttcagggccctcgggggccacccggcccagtgggtggtcacggtgatcccggaccaccaggggcaccgggtctcgctggacctgctggaccccaaggcccatcaggccttaaaggagagcccggagagaccggtcccccaggcagaggccttaccgggcctactggggccgttggacttcctggtcctcccggacccagcggactggtcggcccacaggggagtccaggattgccaggccaggttggagagacaggcaagccaggagcacctgggagggacggggctagtggaaaggacggagataggggctcacccggcgtgcccggctctcccggcctgccaggacctgtggggccgaaaggagagcctgggccgactggcgctcccgggcaagctgtcgtggggttaccaggtgcaaagggcgaaaagggcgcacctggtggactagccggtgacctggtgggcgagccaggggccaagggcgataggggcttgcctggtccccgtggggaaaagggggaggcgggaagagctggcgagcctggggaccctggcgaggacgggcaaaaaggcgctccaggccccaagggctttaaaggggaccccggggtgggcgtgccagggtcaccaggcccccccggacctcccggagttaagggcgatctcggattgccaggtttaccgggagctcccggagttgtgggatttcccggacagacaggtcctaggggcgagatgggacagcctggccccagcggtgagagaggacttgcaggcccccccgggcgggaaggtatacctggcccactgggaccccctggtccccctggaagcgtgggtccacctggagcctcaggtctaaagggcgacaaaggcgaccctggagttgggctcccggggcctaggggtgagcgaggtgagcctggcatacggggtgaagacgggcggcctggccaggagggccctagaggactgacggggccgcccggttcccgcggagaacgcggggaaaagggagacgtgggttccgccggcctcaagggcgataaaggagacagcgctgtcattctgggacctcctggccctaggggtgccaaaggtgacatgggggagcggggtccacgcggcctcgacggcgataaagggccacgaggtgacaacggcgaccctggggataagggctccaagggtgagcccggggataaaggctcggctgggttacccggactccgcggactgctgggaccccagggtcagcctggagctgctggcatccccggcgacccaggctcccctggcaaagacggtgtgcccgggattcggggggaaaagggcgacgtgggctttatgggaccaagagggctgaagggtgagagaggagtcaagggtgcctgtggcttagacggggagaaaggagacaaaggtgaggccgggcctcccgggagacccggattggccggacataagggggagatgggagaaccaggagttcccggccaaagcggcgctccaggcaaggaaggcctgattgggccaaagggagaccgcggctttgacggccagcctggtccgaaaggagaccagggtgagaaaggtgaaagaggtacacccggcattggaggctttccaggaccatcaggtaatgacggctccgccggccctccggggccccccggctccgtgggcccccgcgggccagaagggcttcagggccaaaagggggaacgaggcccacctggtgaaagagtagtcggggccccgggggtccccggcgctcctggggagaggggcgagcaagggcgcccagggcccgcaggaccacggggcgagaagggggaagccgctctgacagaggacgatatcagagggtttgtacgacaggaaatgtctcagcattgtgcttgccagggtcagtttattgcctcaggatcgcgtcctctcccatcctacgccgctgatacggcagggtcacaactgcatgcggtgccagtcttacgagtctcccatgctgaggaagaggaaagggttcctcccgaggacgatgaatacagtgagtatagcgaatactctgtggaggaataccaggaccccgaggcgccatgggactctgacgacccatgcagcctccccctggacgaggggagctgcacagcctataccctacggtggtatcaccgagcagtaaccgggagtactgaggcgtgtcatcctttcgtgtacgggggatgcggaggcaatgccaacagattcggtaccagggaggcctgtgagcggaggtgccctccccgcgtagtccaatctcagggcactggtactgcccaggactag

SEQ ID NO: 1431 - DNA, 8739 bp, Artificial Sequence
  derived and/or modified sequence
atgacactgcgcctactggtggctgccctgtgtgctggtattttagccgaggctcctagggtgagggcccagcaccgtgaaagagttacatgtacccggctgtacgccgcagatatcgtattcctcttggacggttcttcctctatcggcaggtcaaattttcgtgaggttaggagctttctcgagggtcttgtgctgcctttttctggggctgcgtccgcccagggggttagattcgcaaccgtgcaatattccgacgacccacggaccgaatttgggcttgacgccctcgggtcaggcggcgacgtgatccgcgccatcagagagctgtcttataaaggcggcaatacacggacaggcgcggccatcttacatgtcgccgaccacgtctttcttccccaactggccagacctggtgtccctaaggtatgcattctcattacagatggaaaatctcaagatctggtcgataccgccgcccagagactgaaggggcaaggcgtgaaactgtttgcggtgggtatcaaaaacgctgatcccgaagaactcaaacgtgttgcctcccaacctacgtcggacttcttcttcttcgtgaatgactttagcatcctgagaactctgctccctctggtgtccaggcgtgtttgcactaccgcaggtggcgtgccagtgactcgcccccctgatgactccacatcagcccctcgtgaccttgttctcagcgaaccctcatctcaatcacttcgcgttcagtggacagcagcatctgggccggttacgggatacaaggtccagtacacaccactgacaggcctgggccagccccttccttccgaaagacaggaggttaacgtgcctgctggtgagacgtccgtgcgtttaagaggtcttcggccgctgactgaatatcaggttacggtgattgctctgtatgccaatagcatcggggaggcggtgtctggcactgctcggaccaccgcattggaaggccccgaactgacaattcaaaatactaccgcccactctctattagttgcctggagatcggtgcctggggccactggttaccgcgtgacgtggcgcgtgctttcgggtggccctacgcagcaacaggaactcgggcctgggcagggcagcgtcctgctgagagacctggaacccggtaccgattacgaagtgacagtttctactctctttgggaggtcagtcggccccgctactagcctaatggcgcgaaccgatgctagcgtggaacagactctgcggcctgtcattctgggacccaccagtatcctgctaagctggaacctagtccctgaagcacgcggctataggctcgagtggaggcgtgaaactgggttggagcccccacagaaagtggtgctgccatctgatgttacccgctaccagctggacggactgcagccagggactgaataccgattgacattgtacaccttgctcgagggtcacgaggtggctacacctgcaacggtggttcctaccggccccgaactgcctgtatcccccgtgactgatttgcaagcgacggagcttcctggacagcgcgtcagggtatcatggtctcctgtccctggggccacccagtacagaatcatagtgagatcgactcaaggcgtcgagagaaccctggtgcttcccgggagccagaccgcctttgacctggatgatgtgcaggcaggcttgagttataccgtcagggtgagcgccagagttggaccaagggagggcagcgcttccgttctcactgtgcggagagagccagagactcccctggcagtccctggtctgcgggtggtggtgtccgacgccacccgtgtgcgcgtggcatggggcccagtgcctggagcaagtggtttccgcatctcgtggtctacaggatccggccctgagtcctcacagactctacctccagattcaacggccaccgatatcactggtctccaacctggaaccacgtatcaagtagcggtatcagttctgcgtggaagggaggagggacctgcggccgtgatagtagccagaaccgatccattggggcccgtaaggaccgtgcacgtaactcaggcatcctccagctctgttacaataacatggaccagagtgcccggcgcaactgggtaccgcgtgtcctggcattctgcccacggcccagaaaagtcgcagctcgttagcggggaggccaccgtcgccgagcttgatggcctggagccagatacagaatatacagtgcatgtcagggctcacgttgccggcgtagatgggccccccgcatctgttgtggtgcggaccgccccagagcccgttggccgggtcagcaggctacagattctgaacgcttcgtccgacgtgctgcgcatcacatgggtgggagtgacaggagcgactgcttatcggctggcatggggacgcagcgaaggcggccccatgaggcatcaaattctgcccgggaacactgactcagccgaaatccggggacttgaaggcggagtctcctatagcgtgcgcgttaccgctctggtcggcgatcgggagggtactccagtgagtattgtcgtgaccacacctcctgaggctccaccagccctgggaacattgcatgtcgtacaaagaggcgagcattccctgcgcctccgctgggaacccgtgccccgagctcagggtttcctgctgcattggcagcctgagggcgggcaggagcagagccgagtgctggggcccgaactttctagttaccacctcgacgggttagagcctgcaacccagtatagggtgcggctatcagtcctgggaccggcaggggaaggtcccagcgcagaggtcacagcacgcaccgagtctccacgcgtaccatctatcgagctgagggtggttgacacatctatcgattcagttactctggcctggacacccgtgtcacgagcctccagctacattctgagttggaggccattacgcggaccagggcaggaggtaccaggatcaccacaaacgctgcccgggatcagttcctcacagcgcgtgaccggacttgaaccaggcgtgtcttatatattttccctgacaccggtgctggacggcgtccgcggcccagaggcaagtgtgacccaaactcccgtgtgcccacgaggccttgccgatgtagtgttcctgccgcatgccacccaagataatgcacatcgggccgaggctacaagacgggtcctcgagagactcgtgcttgcactgggtccgcttgggcctcaggccgtgcaggttggcttgctgagctatagccaccggcctagtcctctgttcccactcaacgggtcacacgatttgggaatcatcttacagaggatccgggatatgccatacatggacccatctggtaacaatctgggaacagcagttgtcaccgcgcaccgttacatgctggcccccgacgcacccggccggcggcaacatgtgcctggagtgatggtgttactcgtagatgagccacttcggggcgacattttttctccaatccgcgaagctcaagcctctggcctaaatgtcgtcatgctgggcatggccggtgccgacccggagcaactccgtaggctggcacctgggatggacagcgtgcagactttcttcgcagttgatgatgggccttctctcgaccaagcagtgagcggcctggccaccgcactgtgccaggcctcattcacaacgcagccaagaccggagccttgtccagtgtactgcccaaagggccagaagggtgaacccggcgagatgggactgcgcggtcaggtgggacctccaggggatcctggattgcccgggaggactggggcaccaggtccccaggggccacctggatctgcaaccgccaagggcgaacgtgggttccctggggctgatggcaggcccggttctcctggaagagcggggaatccgggcactcctggagccccaggactgaagggtagtcccggtctgccaggaccccgcggcgatccgggcgaacgtggaccaagaggcccgaagggtgagccaggcgcacccggacaggtgataggtggagaaggtcccggcttacctggtaggaagggggatcctggacctagtggccctcctggtccccgggggcctttgggcgacccgggacccagaggaccccccgggctgcctggcaccgccatgaagggtgataaaggagatagaggcgagaggggcccacccggccccggagaaggtggaatcgcacccggcgagccaggtctgcccggcctccccggtagcccagggccccagggacccgtagggcccccaggcaaaaagggagaaaaaggcgactctgaggatggagcccctggattgcctgggcagcctgggagccctggcgaacaggggccacgtggaccgccgggggccatcggccctaaaggcgaccgcggtttcccggggcccctgggcgaagccggggaaaagggggagcggggcccgcctggccctgcgggatctcgcggcctgcccggggtggccggacggcccggcgccaaggggcctgaaggtcctcctggcccaacaggcaggcagggtgagaagggcgaaccgggaaggccaggtgacccagctgtagtcggccctgccgtggccggccccaaaggcgaaaagggcgatgtgggtccagccggccctagaggggcgacaggggttcaaggcgagagggggccccctgggctcgtactgcccggagatcctgggccgaaaggagatcccggcgacaggggcccgattggactgaccggcagagcgggcccccccggtgacagcgggccacccggcgagaaaggggatccaggccgaccaggacctccaggtcctgtggggcctaggggtcgtgatggagaggtcggagaaaagggggacgaggggccacctggggatccagggcttcctggaaaggcaggtgagcgcggtctcaggggagcacccggagtccgcggccctgtaggggagaaaggtgaccagggggatccaggtgaggatggacgaaatggcagtcctgggagctctggacccaagggagaccgaggcgaaccaggtcctccaggcccccctggccgcctcgtggataccggccccggagcaagagaaaaaggcgagccaggagatagaggacaggagggccctcgcggcccaaagggggatcccggccttcccggagcccccggagaacgcggcatcgaaggattcaggggcccacctggtccgcaaggggacccaggggtgcgtggccctgctggtgaaaagggagatcgcggaccccctgggctggatgggcgctccggcctggatggcaagccgggagccgccggaccatccggccccaacggggctgctggtaaagcaggggacccgggccgagacggactcccagggctgagaggcgagcagggtttgccagggccctccggaccacctggacttccagggaaacccggggaggatggaaaaccgggcctcaatggcaaaaacggcgaacctggcgaccccggtgaggatggaagaaagggcgagaaaggagacagcggcgcttcagggagagaggggttcccaggagtgcctgggggcaccgggcctaagggtgatcgcggggagactggatctaaaggcgagcaaggtctaccgggtgaaagggggctgcgcggcgaacctggatctgtgcccaatgtggatcgcttgctggaaactgccggaataaaagcttccgcgcttcgggagattgtggaaacttgggatgaatcaagcggctcatttttacccgtccctgaaaggagaagaggtccaaagggtgatagtggagaacagggccctccaggcaaagaaggcccaatcgggttcccaggagagcgtggactaaagggtgatagaggagatccgggtcctcaggggccgccaggactggcccttggagagcgggggcctcccggacccagtgggctggccggagagccgggcaagcccggcattccgggcctccctggccgggcaggtggcgttggtgaggccggcagacccggggaaaggggtgagcgcggggaaaagggggagcggggtgaacagggtagggatgggccccctgggttacctggaacgcctggcccgccaggtcctcctggtcctaaggtttcagtcgacgaaccaggtcccggactgtccggagagcagggcccccctggcctgaaaggtgctaaaggggagcccggtagcaacggggatcagggacctaaaggggacagaggggtgccaggtataaaaggggataggggggagcctgggccacggggccaggacggtaatcccggtctgcctggcgaaagaggcatggccggacctgaggggaaaccgggactgcagggtcctcgcggaccaccaggtccggtgggggggcacggggatcctggcccgcctggcgcaccggggttagcaggacctgcaggcccgcaagggcctagcggtctcaaaggcgaacctggagaaaccggcccgccaggccgcggcctcactggtcccactggtgcggtgggcctgcctggtcctccaggccccagcgggttggttgggcctcagggcagtcccggtttaccagggcaagtaggcgagacaggaaaacccggagcccctgggagagatggtgcttctggcaaagatggcgatcgcggaagtccaggagtgcctggaagccctggtttacccggacctgtgggccctaaaggggaacctggacctaccggagcccccggccaagcagtagtcggtctacccggagccaaaggcgaaaagggagcccccggtggtctcgccggggacctggtgggagaaccaggagctaagggtgataggggcctccccggaccacgtggagagaagggagaggctggcagagccggcgagcccggcgacccaggcgaagatggacaaaagggcgcacccggacccaaagggtttaagggggatccaggagtgggcgtgcctggatctccagggcccccagggccccctggggttaaaggtgaccttgggctgccagggcttcctggggctcccggggtggtgggcttccctggccaaactggcccaaggggggagatggggcaacctggaccctcaggagagcgcggcctggccggaccccccggtcgtgaggggatcccaggccccctgggccccccaggcccccccggctcagttggcccacccggagcttctgggttgaaaggagacaagggcgatcccggtgtcggtcttccaggtccgcggggagaaagaggtgaacccggaattcgaggcgaggacggccgccccggccaagagggcccccggggtctcacaggcccccccgggtccagaggggaacggggcgagaagggggatgtaggttcagccgggctgaaaggggataagggtgacagtgcagtcattctgggcccaccaggaccgcgcggcgccaagggtgatatgggtgagcgaggtccacgcggacttgacggtgataagggacctcgtggcgacaatggcgatcccggcgacaagggcagtaaaggagagcccggagataaaggctcagcaggattgcctgggttgagaggattactgggaccacagggacagcctggcgccgccggtatccccggtgatccaggaagtccaggcaaagacggcgtgccggggatccggggcgaaaaaggggacgttgggtttatgggtccgcgcggattaaagggggaaaggggcgtgaaaggggcctgcgggctggacggagaaaaaggcgacaagggtgaggcaggacctcctggcaggcccggcctcgcgggacataagggggagatgggggagcccggcgtccccggccagtctggcgcgccaggcaaagaaggacttattggtcctaagggtgaccggggattcgacggccaacccggtcctaaaggcgatcaaggagagaaaggcgagaggggtaccccaggcattggcggctttccagggccctcgggaaacgatggatcagccggaccccctggcccaccaggcagcgtgggtccaagaggacccgaggggcttcaaggccagaaaggagaaaggggaccacctggtgaaagagtggttggggcccccggcgtgcctggagctcccggggaacggggagagcagggccgcccaggacctgccgggcccaggggtgagaagggagaggctgcgttgaccgaggatgacatcagaggcttcgtccgccaagagatgtcccagcactgcgcctgccaggggcagttcatcgcctcaggtagtcgtcctctgccgagttatgcagcggacactgccgggtcccaactgcacgctgtgcctgtgctgagagtctcccacgcagaggaggaagagcgggtgcccccagaggacgatgagtactctgaatacagtgagtattctgtggaagaatatcaggatccggaagccccatgggacagcgatgatccctgctcgctgcctctcgatgagggcagctgtactgcttatactctccggtggtaccaccgtgccgtgactggcagtactgaagcttgtcatccctttgtttacggcggatgtggcggtaacgccaatcgcttcggcacacgcgaggcatgtgaaagaagatgcccacccagagttgtccagtcccaaggaaccggaaccgcccaagactag

SEQ ID NO: 1432 - DNA, 8835 bp, Artificial Sequence
  derived and/or modified sequence
atgacacttaggctcctggtagctgccctttgcgcaggcattctcgcagaagctcctcgggtgcgagcccagcaccgcgaacgcgtgacatgtacccggctatacgccgcggatattgtttttttgctcgatggaagctcctcaatcggaagatccaactttcgagaggtccgctcattcttagagggtttggtcctgcccttctcaggggccgcctcggcccagggagtgcgctttgctactgtacaatactccgatgacccccgtactgaattcggacttgacgcgctgggatccggcggcgatgtaattagagctatacgagagctgtcctataagggcggaaacacccgaacaggtgctgccatcctgcatgtggcagatcatgtcttcctgccccagcttgcccgtcctggagtgcccaaagtatgtatcctaatcacagatgggaagtctcaggaccttgttgataccgcagcccaaaggttaaagggtcagggcgtgaagttattcgctgtaggaattaagaacgccgaccctgaagagctgaagagagtcgctagtcaacctacctcagatttctttttcttcgtgaatgatttttctattctgcggaccttgctgccactcgtgtcacgaagggtctgtacaacagctgggggcgtcccggtgacccgacctcctgatgactcaacctcagcccctcgagaccttgttctgtccgaaccgagcagccaatcactgcgagtgcagtggacagccgcctcaggtcccgttactggttacaaggtccaatataccccactgaccggactgggccagccattaccttcagaacgccaggaagtgaacgtgcccgctggcgaaacctctgtgcgattacgtggactgaggcccttgacggagtatcaggtgacagttattgcgctatacgccaactcaattggggaggcagtatccggcaccgccagaactaccgccctcgaaggtcccgagttgaccatccaaaacactaccgcccactcactacttgtcgcctggcgctcagtccctggagcaacagggtatcgggtgacttggcgcgtgctctccggcggcccaacacagcagcaagagcttggaccggggcagggctcagtgcttctgagagacctggagcctggaacagattacgaggtaacagtgtccacactcttcggtcgctctgtgggccccgctactagtcttatggcacgaaccgatgccagcgtggaacagacgctcagacccgtgatactgggaccaacaagcattctgctaagctggaacctcgtgcctgaagcccgaggctaccgcctggaatggaggagagaaaccgggcttgaaccccctcaaaaagttgtgctgccttccgacgtgactaggtatcaactggacgggcttcagccaggaactgaatacaggctcacactatacacccttctggaaggccatgaagtcgctactccagccaccgtggtgcccactggacctgagctgcccgtttcacccgtgaccgatctccaggccactgagttacctggacaacgggtgcgtgtgtcttggtcccccgttcctggtgctacccagtaccgcattatcgttagatctacacagggcgtcgaaaggaccctcgttttgccgggctctcaaactgccttcgacctggatgatgtgcaggcaggactctcctacaccgtgagggtgtcggcacgagtgggcccaagagaagggagcgctagtgttttgactgtgagacgcgagcctgagacccccctcgccgttccagggctccgggtcgttgtatcggatgccacccgtgttcgagtggcttggggacctgtgccaggcgcatccggctttcgcatcagctggagtacaggcagtggaccagaaagtagtcagactttaccgccagattcaacggccaccgacatcacagggctccagcccggcacaacttatcaagtggcagtgagtgtgttaagaggaagagaagagggccccgctgctgttatagttgcccgtaccgaccctctaggcccggtcagaacagtacatgtaactcaggcctcatcttcctctgttactattacatggacccgagtgcctggcgctaccggttaccgggtgagctggcatagtgcccacggacctgagaagagccagttagtctctggcgaagccacagtagctgagctggacggtctcgaacccgacacagagtacacagtccacgtgagggctcacgttgctggcgtagatggaccacccgcgagtgtagtcgttcgtacagctccggagcctgtgggaagggtgagcagattgcagatacttaacgcttcaagcgatgtcttaagaatcacatgggtgggcgtcactggtgctaccgcatatagattggcttggggcaggtctgaggggggccccatgagacaccagatattgccaggaaataccgactccgccgaaatccgtggactggaaggaggggtcagctactcagtcagggtcaccgcactggttggagatagagaggggactccagtttccatagtcgtcacgacgccccctgaggcgccgcccgcactgggaacacttcacgtagtccagagaggagaacatagcctgaggttgcgttgggaaccagtgccgagggcacagggttttttgttgcactggcaacctgaaggcggccaggaacaatcccgcgtgttagggcctgaattatcctcttaccatctcgacggcttagaaccggccacgcagtatcgagtacggcttagtgtcctgggtcccgctggagagggcccttccgctgaagttaccgcgcggactgagtctccccgcgtgccctccatcgaattgagggtcgtggacacgtctatcgatagtgttacgttagcatggacccccgtgtctagagcctcttcctacatcctgagctggagaccattgcgtggacctggccaggaagtgccgggctcaccacaaactctgccgggcatcagtagctcacagagagtgacgggactcgaaccgggggtgtcctatattttcagtctgacacccgtgctggatggtgtgcgcggtccagaagcgtccgtcacccaaacccctgtgtgtccccgaggcctagctgacgtcgtctttctcccccacgcaactcaggacaatgctcaccgtgccgaagccacacgcagagtgttagaaaggttggttctggctctcggtcccctggggccccaagccgtgcaggtgggacttctgtcatactctcataggccgtcccccctgtttcctctcaacggtagccacgatttaggtatcatattacaaagaattcgagacatgccatatatggacccatccggcaataacctgggcaccgctgtcgttactgcacacaggtatatgctagcccccgatgctcccggccgcagacagcacgttccaggagtaatggtgttactggtggacgaaccccttcgaggcgatatattttcaccaattagagaagcccaagcatccggtctcaacgtagtcatgctaggcatggcaggcgccgatcccgagcaactccggcgtttggcacctggcatggattctgttcagactttttttgcagtcgacgatggaccatctctggatcaggcagtcagcgggttggccactgccctgtgtcaggctagctttactactcaaccacgacccgagccttgtcctgtctactgtccaaaaggccaaaaaggtgagcctggtgagatgggattgaggggccaggtaggcccccccggtgaccccggtcttcctggccgcacaggagccccagggccacagggtcccccgggaagtgccaccgctaaaggagaaagaggatttcctggagctgacggccgccctggttccccaggacgagcaggcaacccaggtacccccggcgcaccagggctgaagggaagcccaggattgccgggcccaagaggagatcccggcgagcgcggcccaagaggccccaagggcgagccaggcgcccctgggcaagtcattggcggggagggccctggcttaccagggaggaagggcgaccctggaccttctggaccccccggccccagaggcccgctcggtgaccctggtccacgcggaccccccggattaccaggaacagctatgaagggggataagggtgacaggggtgagcggggaccaccaggacctggagaaggcggcatagctcccggagaaccaggtctgcctggcctgccggggtccccaggaccacagggccccgttggtcctcctgggaagaagggtgaaaaaggtgactccgaggacggtgccccaggtttgcctggacagccaggaagccccggtgagcagggtcctagaggtccccctggagcgattgggcctaagggtgaccgagggtttcccggccccctgggtgaagctggagagaagggcgaaagaggtcctccgggcccagctggaagccgaggcttgcccggagttgctggtagacccggagctaaaggccccgaggggccccccggaccgactggcaggcaaggggaaaaaggagagcccggaagaccgggggaccctgcagtggtagggccagctgtcgccggacctaaaggcgaaaagggagatgtgggccctgcaggacctcgcggcgccactggtgtgcagggagagagaggtccacctggcctagtcttgcctggcgaccccgggccaaaaggtgatccgggagacagggggcccatcggactcacaggtagagccggaccaccaggcgatagcggcccacccggggaaaaaggcgacccagggcgccccgggcctccagggcccgttggaccacgcgggagggacggcgaagtaggcgaaaaaggagatgagggacccccaggggatccaggcctgccagggaaggcaggtgagcgaggactaagaggcgcgccaggagtgagagggcccgtcggcgagaagggagatcagggagatcctggcgaggacggcagaaacggctcgcccgggagcagcggacctaagggagataggggggagcctggcccaccaggcccccctggtcgtttggtggacacaggccctggagctagggagaagggcgaacccggggacagaggtcaggagggcccacgtggacctaaaggagaccctggacttccaggcgcccccggcgaacgcggcatcgaaggttttcgaggacccccaggaccgcagggagaccccggggtaagaggaccagccggcgagaaaggagaccgaggccctccaggtcttgacggtagaagcggcttggacggcaaacccggcgcagctggtccaagcgggccaaatggcgcagccggtaaggcgggcgacccagggagagatggactgccaggcctccgcggtgagcagggactgcccggaccaagtggacctccagggctgcctggtaaacctggcgaagatggtaaacccggcctgaacgggaaaaatggagaacccggcgatcctggcgaagatggaaggaagggggagaagggcgacagtggcgcctctggaagggaaggcagggatggccccaagggcgaacgcggtgcacctgggatccttggccctcaggggcctcccggtctccctggccccgtcggaccaccaggacagggtttccctggcgtccccggcggtacaggcccaaagggagatagaggagagacaggttctaaaggggaacaaggtctgccaggcgagagaggtctaaggggggaacccggcagtgtccctaacgtggacaggttacttgaaacagctgggatcaaggcatcagccctgcgggaaattgtggagacctgggacgaatcatccggatccttcctacctgtccctgaacgtaggcgcggacccaaaggtgacagcggagaacagggcccacccggaaaggagggccctataggcttcccaggggaaagagggctgaaaggagatcgcggtgatccgggacctcagggaccgcccggccttgcattgggcgagagaggaccaccagggccatcggggctggctggcgaaccagggaagccagggatacccggcctgccagggagggcgggcggcgtaggcgaagcaggtagaccaggggagaggggcgagagaggcgagaagggagagagaggcgaacagggcagagacggtccccctggcctcccaggaacccccggacccccgggcccccccgggcccaaggtgtcggtggatgaacccggccccggcctgtcgggcgaacagggacccccaggtttaaagggcgccaaaggtgaaccgggatcaaacggcgatcaaggacccaagggcgaccgaggtgtgccaggaatcaaaggagacagaggtgaaccggggccaagaggacaagatggaaaccctggcctcccgggggaaagaggcatggccggtcctgaaggcaaaccagggctgcaggggcccagaggcccacctggaccggttggaggtcacggggacccaggcccccccggcgctcccggccttgccggacctgctggccctcagggcccctctggactgaaaggggaacccggtgagactgggccccccggaagaggattaacaggccctaccggagccgtcggactgccagggcctcctggcccaagcggactcgttgggccgcaggggtctcccgggctgcccggacaagtaggagagacgggcaagccgggcgcaccagggagagatggggcatcagggaaagatggggaccggggatctccaggcgtgcccgggtcgccaggcttaccgggacctgtgggcccaaaaggagagccaggacctaccggagcaccgggacaagcagtcgtgggtcttccaggagctaagggtgagaagggcgcgccaggcgggctcgccggagacttggtgggggaacctggggccaagggcgatagggggcttcctggacccagaggcgaaaaaggtgaagccggaagggctggggaacctggcgacccgggcgaagatggccagaaaggggcaccaggtcctaaaggattcaaaggtgatcccggcgtaggcgttcccgggtctcctgggccccccggaccacccggtgtgaaaggagatttgggtttaccaggactgccaggagcacccggcgtagtcgggtttccaggacaaacaggaccccgcggggagatggggcaaccaggaccttccggggaacgaggcctagctggtccccctggaagggaaggcattccgggaccactgggacctcccggccctccaggctctgtggggccaccgggtgcgtcaggcctgaaaggtgacaagggggatccaggtgttgggctgcctggaccacggggggaacgaggcgagcctggcattagaggggaggatggaagaccaggtcaggagggaccaaggggattaacgggtcccccgggaagtcgaggagagcgtggtgagaaaggagatgtggggagcgccgggctcaagggggacaaaggtgattctgccgtgatcctcggtcctccaggacctaggggcgcgaagggtgatatgggcgaaagaggaccacggggattggacggagataaagggcctcgaggcgataatggcgatccaggcgataagggctcaaaaggcgaacctggcgacaaagggtccgctggactccctggactgagagggttactgggaccacaaggccagcctggagcggctggcattccaggtgatccaggtagccccggaaaggatggagtgccgggcattaggggtgaaaagggggatgtgggctttatggggcccagagggttgaagggggaacgcggagtgaaaggggcctgtggactagacggagagaagggggataagggtgaggctggacctccaggacggccgggcttagctggacataagggggaaatgggagaaccaggagtgccaggtcagagcggggctccaggtaaagaaggcctgattggaccaaagggcgacagagggtttgatggccaacctggaccaaaaggcgaccagggcgagaagggagagcgaggaacgccaggaatagggggtttcccaggtccaagtgggaacgacggaagcgcagggccaccaggcccacccggctccgtgggacctaggggtcccgaagggttacagggccagaagggagaaaggggaccccccggagaaagagtcgtgggtgcgcccggagttcccggcgctcctggcgagaggggagaacagggccgacccggacccgccggaccccgtggcgaaaaaggcgaagctgcgctgacagaggatgatatccggggcttcgtaaggcaagagatgtctcagcattgtgcttgtcagggtcagttcattgcatcaggtagtcgtcctcttcctagctacgcagccgataccgctggatctcaacttcatgccgtcccagtgctgagggtttcacatgctgaggaagaagagcgtgtgcctcctgaagatgatgaatattcagaatacagcgagtacagtgtggaggaatatcaggatcccgaggcaccctgggactccgacgacccatgcagcctcccccttgatgaaggttcatgtaccgcatatacactgaggtggtatcatagggctgtgacaggaagtaccgaggcatgccatccttttgtgtatggggggtgcggaggtaatgccaacagatttgggacacgggaagcatgtgaacgaaggtgtccgcctcgcgtcgtccagagccaaggcacaggaactgcacaggactag

SEQ ID NO: 1433 - DNA, 8739 bp, Artificial Sequence
  derived and/or modified sequence
atgactctgcgacttttggtcgctgccctttgtgctggcatattagccgaggccccccgcgttcgcgcacaacatcgcgaaagagttacctgcactaggctttacgccgccgacatcgtgtttctgctggatggaagcagcagtatcggaaggtctaacttccgtgaagtgagaagctttcttgaaggtctggtcttgcccttctccggagctgctagcgctcaaggcgtcagattcgctactgtgcagtatagtgacgatcctcggactgaatttggcttggacgcactcggctcagggggagacgttatccgtgcaattcgggagttgtcatacaaagggggcaacactagaaccggcgccgcgatcttgcatgttgccgatcacgtcttcctaccacagttagccagacctggagtgccaaaggtctgcatcctcataaccgatggcaagagtcaggacctcgtcgataccgccgcacagagactcaaaggccaaggagtgaagcttttcgccgtgggcatcaaaaacgctgatccagaggaattgaaaagagtggcatctcagccgacttctgacttttttttcttcgttaacgattttagtattctgcgtacgcttttacccttagtgtccaggagagtctgtacgaccgccggaggcgtacccgttacccgcccgccagacgactcgacatcagccccacgcgacctggtcttgagcgaaccgagctcccaatccctgagggtgcaatggaccgccgcaagcggcccagtgacaggttacaaagtgcagtatacacctctgacagggctcggtcagcctcttcccagcgaaagacaagaagtgaacgttcccgccggcgagacctcagtacgacttagaggactgcgcccattaaccgaataccaggtcaccgtcattgctctttatgctaatagcattggagaggccgtctccggcaccgcgcggacgacagctctggaaggacctgaactcacaatccagaacacgacagctcactctctcttagttgcctggcggtcagttccaggcgccacaggctaccgggtgacatggcgagtactcagtgggggccctactcagcaacaagaattaggccctggccagggtagcgtcctgcttcgagatctagaacccggcaccgattatgaggttaccgtttcaactcttttcggacggagcgtgggtccagccacatctttgatggcccgcacagatgccagcgtagaacagacattacgacccgtaattctcggtccaaccagcattctgttgtcatggaatctcgtgcccgaagcccgcggttatcgcctcgagtggcggcgcgaaactggactggaacctccccaaaaggttgtgttaccgtcggacgtcacccgctaccaattggatggtctgcagccaggaacagaatacagactgaccctgtacacacttttggagggacacgaagtagccactcctgcgaccgtggtgcccactgggcctgaactgcctgtctctcctgtgaccgacctccaagctactgagctaccaggccagagagttcgcgtatcttggagcccagtcccgggcgctactcagtatcgtataatagtcagatcaacacagggagtggagcgcacgctggtgctccctggttcacaaactgcattcgacctagatgacgtgcaggccggtttgagttacaccgtgagggtttccgctagggtcggccctcgagaaggttccgcttctgttctcacggtcagacgtgaacctgagactcctctcgcagtgcccggacttcgcgttgtggtgagtgatgctactagggtgagggtggcatgggggcccgtaccaggggcgtccggctttagaataagctggagtactggctccggcccagaaagctctcagacactgccaccagacagtactgccactgatataacagggttgcagcccggcacaacgtaccaagtggctgtatctgttcttagaggaagagaggaaggtcctgccgccgtcatcgttgcccggacagatcctttaggacccgtgcggacagtgcatgtaactcaggctagctctagcagcgttaccatcacttggacgcgtgtcccaggagctactggttaccgcgtgtcatggcactcggcccacggccctgaaaaatcgcaactggtttccggcgaggcaacagtggcggaacttgacggtctcgaaccagatacagaatacaccgtgcatgtcagagctcatgtggccggcgtcgatggcccccccgcttccgtggtagttcggacagctccagaacctgtcggcagagtctcccgtttgcagattctgaatgcttccagtgatgtcttacgcattacatgggtcggagtgaccggcgctactgcctatagactagcctggggcagaagcgaaggaggacctatgaggcaccaaatactacccggaaatacagatagcgccgaaattagaggccttgaaggcggggtctcttactcggtccgagtgactgcgcttgtcggtgaccgtgaggggacccccgtgagtatagtcgtgactacacccccagaagccccccctgccctcggcaccctgcacgttgtgcaaaggggcgaacattctctaaggctacggtgggagccagtgccacgggctcagggctttttactgcattggcagcccgaaggcggtcaggaacaaagtcgagtgctgggccctgagcttagctcctatcacttagatgggcttgaaccagcaacacagtacagagtcagactgtccgtcttgggacctgcgggggaaggaccctctgctgaggttacggccagaactgagtctccccgagtacctagcattgagctccgcgtagttgacactagcatcgatagtgtgaccctggcctggactcctgtgtctagagcatcttcttatattctgagttggaggcctctcagaggaccgggccaagaagtcccaggcagtccacagaccttgcctgggatatcaagttcccagagggtgactggtctagagcccggcgtgtcatatatcttctctcttaccccagttttagatggcgtgcgtggcccagaagcatccgtgacacagaccccagtctgccctagaggccttgctgacgtcgtgttcctgccccatgcaactcaagacaatgcccaccgtgccgaggctacaagacgggtccttgaaaggttagtgctcgccctgggtccgctgggaccacaagccgtgcaggtgggtctattaagctacagtcacagaccgtcgccgttattccccctcaatggatcacatgacctgggcattattctacaacgtattcgcgacatgccctacatggacccatccggcaataaccttggaaccgccgtagtgacagcacacaggtacatgctggctccagatgcccctggtaggcgtcagcacgtccctggggttatggtgctgttggttgatgaacccctcagaggagacatcttttcgccgattcgtgaagcacaggcatccggtttaaatgtcgttatgctcggcatggcaggagccgacccagaacagcttaggagactggccccaggcatggattctgtgcaaaccttttttgccgtcgacgacggaccttcactcgatcaggcagtgtctgggctggcaaccgctttgtgccaagcatctttcacaacacagcctcggcccgaaccttgtcccgtttactgtccaaaaggccagaaaggcgagccaggagaaatgggactgcgcggacaagtggggccaccgggagatcccgggcttcctggacggacaggtgcgccaggcccgcagggacccccaggatcggcaaccgccaagggggagcgcgggttcccaggtgcagatggtagaccaggttctcctggaagagccggaaaccccggtactcctggtgcacccggcttgaaggggagtccaggcctcccaggaccaagaggggatccaggggagcgaggaccaagaggtcctaaaggtgaacctggggcaccaggacaggtgatcggtggtgaaggacctgggttgcccggtcgcaagggagatcctggaccttctggaccacccggcccccgtggccctttaggggaccccgggcctcgaggtccacctggcctcccaggaaccgccatgaagggggacaagggcgataggggcgagcgcggccctcccgggcccggagaaggcgggattgctcccggcgagccaggactgcccggattaccagggtcacctgggccccagggccccgtcggcccgccagggaaaaaaggcgaaaagggagatagtgaggacggcgccccaggattgcctgggcaacccggctcaccgggcgaacaagggcccagaggacctcccggagcaatcgggccaaaaggagatagggggttcccaggaccgttgggagaggctggagagaagggcgagagaggcccaccgggcccggcaggttcccgtggcctcccgggggtggctggacggcccggcgccaaaggccccgaaggaccccccggccctaccgggcgacaaggcgaaaagggagaacctggacgccctggagatcctgcagtggtcgggccagcagtggccggacccaaaggggagaaaggcgacgtgggacctgcaggtcctagaggagctacaggggtgcagggagaaagaggtccaccaggcctcgttttaccaggagatccaggaccaaaaggggatcccggggataggggaccaattggactgactggtcgagcgggacccccaggcgattcagggcctccaggcgagaaaggcgatccaggcagacctggtccaccaggaccagttggccccagggggcgggatggtgaggtcggtgaaaaaggcgatgagggaccaccaggagatccaggcttgcctggtaaggctggcgagcgcggactgcgtggcgctcctggggttcgaggtcccgtgggtgagaagggggatcagggagaccccggagaagatggacggaacggctctccaggaagcagtggacctaagggcgatagaggcgaacctggccccccgggcccacctggacggctcgtagacactgggccgggcgcaagagagaaaggggaacctggagatagagggcaggagggcccccgaggcccaaaaggagatcctggcctccctggagctcccggagaacgaggtatcgaagggtttaggggcccacccggaccacaaggagacccgggcgtacgcgggccagctggagagaaaggagatagagggccaccagggctagatggccggtccgggctggacggcaaaccaggcgcagcaggtccctcaggcccaaatggcgctgccggaaaagccggcgaccccgggcgtgatggactgcccggcctaaggggagaacagggccttccaggtcccagcggtcccccaggtctgccaggaaagcccggcgaggatggcaaacctggtctgaatggcaagaacggcgaaccaggcgatccaggtgaagacgggaggaaaggtgagaaaggggattccggtgcctcgggtcgcgaaggattccccggtgtacccggtgggactggccccaaaggagacagaggcgagaccggatcaaagggcgagcagggactcccaggagagagaggcctccgcggcgaacctggatctgtgcccaatgtggatcgcttgctggaaactgccggaataaaagcttccgcgcttcgggagattgtggaaacttgggatgaatcaagcggctcatttttacccgtccctgaaaggagaagaggtccaaagggtgatagtggagaacagggccctccaggcaaagaaggcccaatcgggttcccaggagagcgtggactaaagggtgatagaggagatccgggtcctcaggggccgccaggactggcccttggagagcgggggcctcccggacccagtgggctggcgggtgaacccgggaagccggggattccagggctgccggggagggcgggcggggttggggaggcaggcagacccggcgaacgcggggagagaggagaaaaaggggaaagaggcgaacaggggagagatggacccccaggacttcctgggacacccggcccacccggacccccaggtcccaaagtttcggtggacgagccggggcccgggctgagcggcgaacaggggcccccaggtttgaagggggccaaaggagaaccaggaagcaacggcgaccagggacccaaaggtgataggggtgttccaggaattaagggagatcgtggagagcccggacctcggggacaggatggaaacccgggtctgcctggtgagaggggtatggccggaccagagggtaagcccggactgcaagggccccgcggcccacccggcccagtcggcggacacggcgaccctggccccccgggcgcccctggcttagccggtcccgccggacctcaaggccctagtggattaaaaggcgaaccaggagaaaccgggccccccggaagagggctgacagggcctacaggcgctgtagggcttcccggaccaccgggccccagcgggttggttgggcctcagggcagtcccggtttaccagggcaagtaggcgagacaggaaaacccggagcccctgggagagatggtgcttctggcaaagatggcgatcgcggaagtccaggagtgcctggaagccctggtttacccggacctgtgggccctaaaggggaacctggacctaccggagcccccggccaagcagtagtcggtctacccggagccaaaggcgaaaagggagcccccggtggtctcgccggggacctggtgggagaaccaggagctaagggtgataggggactcccgggcccacgcggagagaaaggagaagcaggccgagccggcgaaccgggcgatccaggggaagatggccaaaagggcgcacccgggcccaaaggcttcaaaggtgatcccggtgttggcgtgcccggaagtcctggccctccaggcccacctggtgtgaagggggatctgggtttacctggcctgcccggagctccaggcgtcgtcggatttccgggccagactggacctcgcggcgagatgggacaaccgggacccagtggggaaagagggctggccggccctcctgggcgtgagggaatcccgggccctctgggacctccaggaccgcccggatctgtaggcccccctggcgcttcggggcttaagggcgacaagggcgatccaggtgtaggactgcctggtccgcgcggcgaacggggcgagcccgggattcggggggaagacgggcgaccaggacaggaagggccacgtggactgacagggccgcccgggagtagaggagagcgaggagagaaaggtgacgtcggcagcgctggcttgaaaggagacaaaggcgatagtgccgttattcttggaccccctggaccaaggggtgccaaaggagacatgggcgagcgtggaccaagaggattagatggcgataaagggcccagaggtgacaatggcgaccctggcgataaagggagtaagggggagcctggagataaaggaagtgcaggtctgcctggcttgcgcggtttgctcggcccccagggacagcctggcgcagccggaatcccgggcgatcctggaagccccggcaaagatggagtgccaggtattagaggcgagaaaggcgatgttggattcatgggaccaagaggcctgaagggcgagcgcggggttaaaggcgcctgcggcttggatggagagaagggcgataagggcgaagctggaccacctggcagacctggcctggccgggcacaaaggcgagatgggcgaacctggcgtacctggacagtctggggccccgggaaaggaaggtctcatcggccccaagggtgacagaggttttgacggacagcctggccccaagggagatcaaggagagaaaggggaaaggggcacacctggtatcggcggattccccggcccgtcaggcaatgacggaagtgctggtccacccggcccccctggcagtgtcggacccagaggcccagagggactgcagggacagaaaggagaacgtggaccccctggcgaaagggttgttggggctcccggagtccctggggctcctggggagcgaggcgaacagggcagaccagggcctgctggaccacgcggagagaaaggggaggctgccctgactgaagacgatatcagggggtttgtgagacaagaaatgagtcagcactgtgcttgtcagggtcaatttatcgcatccggaagccgccccctgccaagctacgcagcagataccgccgggtcacaactccacgccgtaccagtgctgcgagtgtctcatgccgaagaggaagaacgagttccccccgaagatgacgaatattccgaatactctgagtatagcgtggaagagtaccaggaccccgaagcaccttgggatagtgacgatccgtgtagcctcccgctagacgagggctcttgcactgcttacacactgcgctggtaccatcgggccgtgacggggtccacagaagcctgccatccgttcgtgtacggcggttgtggtggcaacgctaacagattcggaacaagagaagcatgcgaacggaggtgccccccaagggtcgttcaatctcagggcacaggtacagctcaagactag

SEQ ID NO: 1434 - DNA, 8832 bp, Artificial Sequence
  derived and/or modified sequence
atgacgcttcgcctccttgtggccgcactgtgtgccggaattctggcagaagcacctagagtgagagcccaacatagggaacgggtgacctgcactcgcctctatgccgcagatatagtgttcctcctcgacggctcgtcatcgattggccgctccaatttccgtgaagtcagatccttccttgagggacttgtccttcccttttcaggagcagcatcggcgcagggggtgcggtttgcaaccgtccagtactcagatgacccgaggactgaatttggcctggatgccctgggatcgggaggcgatgtcattcgcgcaattcgggaactctcgtacaaaggaggcaacacccgcactggcgcagcaattcttcacgtggcagatcatgtctttctccctcagctggcaaggcccggagtgccgaaggtctgtatactgatcaccgacggaaagtcgcaggatcttgtggacacggccgcccagcggctgaaaggacaaggcgtcaagctgtttgcggtggggattaagaacgctgaccctgaagaacttaagcgagtggcctcccaaccgaccagcgatttcttcttttttgtgaacgatttttccatcctgcgtacgctcctgcctcttgtgtcgaggagagtgtgtaccactgccggaggtgtccctgtgaccaggcctccagatgatagcacctcggcgcctcgcgaccttgtgctgagcgaaccttcctcccaaagcctgagagtgcaatggactgcagcatccgggcctgtgactggttacaaggtccagtatactcctcttaccggtcttggacagcctcttccatccgaacggcaggaagtcaatgtcccagccggagaaacgtccgtgcgccttagagggctccgccctctgaccgaataccaagtgactgtgattgcattgtacgcaaattccattggagaagctgtgtctggtactgcacggaccactgcgctggaaggccccgaactgactatccagaataccactgcacattcacttcttgtggcctggagatccgttccaggagccacgggttaccgagtcacgtggcgcgtgctgagcggagggcctactcaacagcaagaacttggacctggacagggatcagtgctgctccgtgaccttgaacctggaaccgattatgaagtgaccgtgtcgactctgtttggcaggagtgtcgggccagccacctcccttatggcgcgaactgatgcctctgttgaacagactcttaggcctgtcatccttggtcctacctcgattcttctgtcatggaaccttgtgccagaagctcgagggtacagactggaatggagacgcgaaaccggactggagccaccacagaaagtggtgctgccgagcgacgtcactcggtaccaactcgatggactccagccaggtactgagtaccggctgactctgtacactctcctcgagggacatgaagtcgcaaccccggcaacggttgtgccgacgggaccggagctgccagtgtcacccgtcaccgatcttcaggcaactgaactccctggacagcgcgtgagagtatcgtggtcgccagtccctggtgcaacccagtacaggatcattgtccgctcaactcaaggagtggagcgtaccctggtgttgccaggaagccaaactgcatttgacctcgatgatgtccaagcaggactgtcctacacggtgcgagtgagcgcacgcgtcggaccccgggaaggatcggcctcagtgctcaccgtgcgtagagagcccgaaacgccccttgccgtgcctggacttagagtggttgtgagcgacgcaacccgtgtgagagtggcatggggccctgtgcctggagcctcgggatttcggatctcgtggtcgactggtagcggacctgaatcctcgcaaactctgccaccagattcaaccgcaaccgacattactggacttcaacctggtaccacctaccaagtggcggtgtcggtgcttagaggccgggaagaggggccagcagctgtgattgtggccagaaccgatccacttggtcccgtccgcaccgtgcacgtcacccaagctagctcctcaagcgtcactattacctggaccagagtgcccggtgctaccggataccgtgtatcctggcattccgcacatgggccagagaagtcacagctcgtctctggagaggcaactgtcgctgaacttgatggtcttgaaccggacactgaatacactgtgcatgtaagagcacacgtcgctggcgtggatggtcccccagcatcagtggtggtccggactgcgcccgagccagtgggtagagtcagccgtctccagattttgaacgcatcgtcagacgtccttcgtataacctgggtgggggtgactggcgcaaccgcttaccgcctcgcctggggtagatcagaaggaggtcctatgcggcatcagattctgcccggaaatacggattcggcagaaatccgaggtcttgaggggggagtgtcatacagcgtccgagtgaccgcactggtgggggacagagaaggaaccccagtgtcgattgtggtgaccaccccacctgaagcgcctccagcactcggcaccctccatgtggtgcagagaggggaacactcactccgcctccgttgggagccagtccccagagcacaaggctttctgctgcactggcagcccgagggtggccaggaacagtcgcgagtgctgggtcccgagttgtcatcgtaccatcttgacggattggaacctgccacgcaataccgggtgagattgtcggtgctgggtccagcaggtgaaggtcccagcgccgaagttaccgctcggactgagagtccgcgcgtgccttccattgaacttagggtcgtggacaccagtattgattccgtcacccttgcgtggaccccagtttcgcgggcatcgtcgtacatcctgtcctggcgccccctccgcggcccaggtcaggaagtgcctggatcgccacaaactctcccgggtatttcgagctcccaacgggtgactggtcttgagcctggagtgtcatacattttctcactgaccccagtgcttgacggagtgaggggccctgaggcgagcgtcactcaaacccctgtgtgtcctagaggactggccgatgtggtctttcttcctcatgccacccaggacaacgcacatagagccgaggcaacgcgtcgggtgctcgagcggcttgtgttggcactgggaccattggggccacaagcagtgcaggtgggtttgctctcctactctcatagaccgagcccactgtttccactgaacggtagccacgatctcggtataatcctccagcgcatcagagatatgccgtacatggacccatccggtaacaaccttggaaccgcagttgtcactgcccaccgatacatgctggcaccagatgcgcctggacgccgtcaacacgtcccgggagtgatggtgcttctcgtggacgagccacttagaggcgacatcttttcacctatcagagaggcacaggcgagcggactgaacgtcgtgatgctggggatggcgggagccgatcctgaacaattgaggaggcttgcacctggaatggatagcgtacaaactttctttgcggtggatgatggtccaagcctggatcaagcagtctccggcctggcaaccgcactgtgtcaagcgagcttcaccacccaaccacgacccgaaccttgccctgtgtattgtcctaagggacagaagggggaaccaggtgaaatggggctgagaggacaagtggggccgcccggagatcccggcttgcccggtaggaccggtgcgccaggacctcagggacctcctggctcagcaactgccaagggggaaaggggttttcctggagccgatgggcgccccggtagtccgggtagagcaggaaacccgggaactcccggggcacccgggctcaaggggtccccgggtttgcctggaccaagaggcgaccctggggagcgcggtcctcgaggccctaaaggcgaacccggagcaccaggccaagtgattgggggcgaaggccctggactgcccggacgaaagggtgatccaggcccttcaggaccaccagggcctagaggcccgcttggagatcctggcccgagaggtcctcctggcctgccgggtactgcaatgaagggagataaaggtgatcggggtgaaagaggaccccctggccctggtgagggcggcatcgcacccggtgaacctgggctgcctggactgcccggaagtccaggtccgcagggccccgtcggcccgcctggtaagaaaggagaaaagggcgattccgaggacggagctccggggcttcccggacaacctggaagcccaggtgagcagggtcccagaggacctcccggtgctattgggccaaagggtgatagaggatttcctggtcctttgggtgaagctggagagaaaggcgagcgaggccctcccggcccagcggggtccagaggactgcccggggtggccggccgccccggagcaaaagggcctgaaggcccgccaggtcctactggccggcaaggagagaagggtgaaccagggaggcctggtgaccctgcagtcgtgggtcccgcagtggccggacccaaaggcgaaaagggagatgttggtcccgctggccctcgcggagcaaccggagtgcagggtgaaagaggacctccgggtttggtgctccccggcgaccctggtcctaagggtgaccctggggaccggggaccaattgggctgactggcagagcaggacctccgggcgattccgggccacccggagaaaagggcgacccaggtagaccagggcctccaggcccagtgggacctcgtggaagagatggtgaagttggtgaaaaaggagatgaaggtccgcctggggacccaggcttgccggggaaagctggcgaacgaggactccgtggagcacctggggtgcgaggtcctgtgggcgagaaaggtgaccaaggcgaccccggagaagatggacgcaatggttcgccgggatcatccgggcccaagggagataggggcgagccgggaccgcctggccctcctgggcggctcgtcgatactgggcccggcgcaagagaaaaaggagaacctggtgacagaggacaagaaggacctcgaggacctaagggagatccagggctgcccggcgcgcctggagaacgcggtatagagggatttagagggccgcctggaccccaaggagatcctggagtacggggtcccgcaggcgaaaaaggggaccggggtcccccaggattggatggccggagcggtcttgatggaaaacctggggcagccggaccatccgggcctaacggtgcagcaggaaaggctggtgacccgggtcgtgacggactccctggtctgcggggcgaacaaggcctccctggaccttcaggtcctccaggattgcctggcaagccaggtgaggatggtaagcccggactgaatggtaaaaacggtgaaccgggtgacccaggggaggacggacgaaagggggagaagggcgatagcggtgcgtcgggtagggaaggccgggatggaccaaaaggtgaaaggggtgcaccgggaatcctcgggcctcaaggtccgcctgggctgcccggaccagtgggccctccaggacagggttttcctggagtgcccggtggaaccggtccaaagggcgacagaggtgagactggaagcaaaggggaacaaggactccccggtgagcggggacttcgcggagagcctggtagcgtgcctaacgtcgacaggctgcttgaaactgcaggaatcaaggcatcagcgttgcgggagattgtggaaacctgggatgaatcatcggggagcttcctgccagtgccagagaggcggcggggtcctaaaggtgatagcggcgagcagggtcctccgggtaaggaaggccctattggtttcccaggggaaagaggacttaagggggaccgaggtgatccggggccccaaggcccacccggcctggccctgggggagaggggccctcccgggccttcgggtctggcaggtgaacccggtaaaccaggtatccctggcctgccagggcgagccggaggtgtgggagaggcaggacgacccggcgaacggggagaacgaggggagaaaggggaacgaggtgagcagggaagggacggaccccctgggctgccgggcacccctggtccaccgggcccaccaggtccgaaggtgtcagtggacgaacctggtccaggactctctggcgagcagggccctcctggtcttaagggcgctaaaggtgaacccggatccaacggagatcaaggaccaaagggggatagaggcgtcccaggaatcaagggggatagaggagagccgggtcctcgcggacaggacggcaatccaggtttgcccggggaacgcgggatggccggaccagagggaaagccgggcctccaagggcccagaggtccaccaggtcctgtcggaggacatggggatccgggtcctcctggggccccaggtcttgccggtccagcgggaccacagggcccatcaggactgaagggagaaccaggagaaactgggccacctggcaggggacttaccggaccaactggcgcggtgggtctgcctggaccccccggaccttcggggttggtcggacctcagggatcccctggcctgccaggccaagtcggcgaaacgggcaaaccaggagcgcccggacgtgatggagcctccggaaaggatggggataggggctcgccaggtgtaccgggaagccccggactgcctgggccagtcggacccaaaggcgagcctggaccaaccggtgcccctggacaagcggtggtggggcttcctggagcaaagggtgagaagggggctccgggaggactggccggagatcttgtgggtgaaccgggggcaaagggcgaccgcgggctgcccggaccgcgcggagagaagggtgaggctggtagggcaggcgaacctggggacccaggagaagatggccaaaagggagcacctggacctaaaggattcaaaggtgatcccggcgtgggggtcccgggatccccaggtccgcctggaccaccaggtgttaagggagatttgggattgccgggacttcctggtgcccctggggtggttgggtttccggggcagaccggcccaagaggcgaaatgggacaacctggaccatccggagaacgtggactggccggcccgcccgggagagaggggatacctggtcctttgggacctccaggaccaccaggatcggttggaccgcccggcgcatcgggacttaagggggataagggggatcccggtgttggacttcccggtccacgcggggagagaggggaaccaggtattcgcggagaggatgggcggcccgggcaggaaggtccccgcggtctgaccggtcctccgggatccagaggagaacgcggagaaaaaggtgatgtcggctcagcaggactgaaaggcgacaagggtgattccgcggtgatcctgggaccaccgggacccagaggtgcaaagggagatatgggcgagaggggtccccgggggctggacggggataagggtcctcgtggagacaacggcgacccgggggataagggtagcaagggagaacccggcgataagggctcggcaggcttgcctggtcttagaggacttcttggcccacagggtcaaccaggtgcagccgggatacccggggatccaggttctccaggaaaagatggggtgccgggtataagaggtgaaaaaggagacgtgggatttatggggcccaggggtctgaagggtgagcgtggcgtcaagggtgcctgtggtttggacggagaaaagggtgataagggagaggctggcccaccagggcgacctggactggcgggtcacaagggagaaatgggcgaaccaggtgtgccaggtcagtcgggggcacccggaaaggaaggactgatcggcccaaagggggaccgcggttttgacggacaaccaggacctaagggggatcaaggagaaaagggagagcgcggcacgcctggcattggaggttttcctgggccttccggcaacgatggaagcgcgggccctccgggtccgcccgggtcagtcggacctcggggtcctgaaggacttcaagggcagaagggggaacgtggaccacccggagagcgagtagtgggcgcaccgggagtgccgggcgctcctggagagaggggggaacagggacgcccaggccccgcaggccccagaggggaaaagggagaagcggcgctgaccgaggatgatattaggggattcgtccggcaagaaatgtcgcaacattgtgcttgccaaggtcaattcatcgcctctggcagtagaccacttccttcctacgcagctgataccgcaggttcgcagctgcatgccgtccccgtgctgcgcgtgtcacacgcggaagaggaggaaagagttccaccagaggacgacgaatacagcgagtactcggagtactcggtggaagaataccaagatccagaagccccatgggattccgatgacccttgtagcctccctttggacgaaggatcctgcactgcctacactctccgctggtaccatcgtgcagtcactggatccactgaagcatgccacccattcgtctacgggggctgcggaggtaatgcaaataggttcggcacccgggaggcatgtgagcgccgatgtccaccccgggtggttcaatcgcaaggtaccggcactgcacaggat

SEQ ID NO: 1435 - DNA, 8832 bp, Artificial Sequence
  derived and/or modified sequence
atgactcttcggctgctagtggccgcactttgcgccgggatcttggctgaagccccaagggttagggcccagcacagggagcgggttacctgtactcgcctgtatgccgcggacatcgtgtttctacttgatggaagctcaagtatagggcgatccaactttagagaggtccgcagcttcttagagggtctggttcttccattcagcggcgccgcaagtgcacaaggtgtgcgtttcgcaacggtccagtattccgacgatccgcgtactgagttcggacttgatgcactcggttccggtggcgatgtcatacgggccattcgagagttaagctataaaggaggcaacacacgaaccggcgctgcgatcctgcatgtggctgaccacgtgtttcttccacagttggccagaccaggagttccaaaggtgtgcatcctaataactgatgggaagagccaggacctcgttgacacggccgcccagcgcctgaagggccagggggtgaagctgttcgctgttggcataaagaatgctgaccccgaagagctcaaaagagttgcctcccaacccaccagtgacttctttttttttgtcaatgactttagtatcctgaggacgcttctccccctggtgagtcggagagtctgtacaacggccgggggcgtacctgtgactaggccccctgacgatagcacttccgcccctcgggacttggtgctgagcgagccctctagccagtcccttagggtgcaatggaccgctgcctcaggccccgtgactggctataaagtacagtacacacctctgaccggactgggtcagccgctgccctctgagcggcaggaggtgaacgtgcccgcaggggagactagtgtgcgtttgcgtggccttagaccactgacggagtaccaggtcacagtgattgctctctacgccaactctattggtgaggcagtctcgggcacagccaggacaaccgcgctcgaaggccctgagctcacaatccagaacaccaccgcccactctctcttggtggcttggcggagtgtgccgggcgcgacgggatatcgcgtgacctggagagtgctgtctggcggcccgacccagcagcaggaactgggcccagggcagggtagcgtgttactgagagacttggagccagggaccgactacgaggtcaccgtttcaactctttttggacggtctgtggggccagccacatcacttatggccaggacagacgcctcagtggaacagactcttcgccctgtgatactggggcctaccagtatcttactatcatggaatctcgtccccgaagctcgagggtatcgacttgaatggcgacgcgagacaggccttgagccgcctcagaaagtggttcttccttccgatgttacaagataccagcttgatgggctgcaaccgggcaccgaataccgactgactctatacacactcttagaggggcacgaagttgctacgcctgccacagttgtgccaaccgggcccgaactgccagtctcgcctgtgacggaccttcaggccaccgaactgccaggtcagagagtgcgtgtatcctggtctcccgtgcctggcgctactcaatacagaattatagtgaggtccacccagggggtggaacgtactcttgtcctccccggatcacagactgcgtttgatcttgacgacgtgcaggctggattatcctacacggttagagtctctgcacgcgtgggtccccgggagggaagcgctagcgtcctgactgtccgtagagaaccggagaccccactggctgtccccggacttcgagttgttgtgtccgacgctactcgggtgagagttgcctgggggcctgtccctggtgcctcgggcttccgcattagctggtccacaggctcagggccagagagcagtcaaaccctgccccccgacagtactgccacagacattacggggctacagcctggcacgacataccaggtcgcagtgtctgtgctcagagggagggaggaaggacccgcagctgtgatcgtggcaagaaccgaccccctgggtcctgtgcgcaccgttcacgtgacccaggccagctcctccagtgtgaccattacttggacgcgcgtcccaggggccacagggtacagggtctcctggcactctgctcatgggccggaaaagtcccaattagtgagtggcgaggcaacagtggcggagctagatggtttggaaccagatactgagtacacagtgcacgtgagggctcatgtcgcaggcgtagatggcccgcccgccagcgtggtggttagaaccgcgccagagccggtaggaagggtctcacgccttcagattctgaacgcttcgtccgacgtgcttcggattacatgggtgggggtgaccggcgccacggcctatcggttggcctgggggaggtcagaaggaggccctatgaggcaccagatcctcccaggcaataccgactccgcagagatcagaggactcgagggtggtgtttcatactctgtcagagtcaccgccctggtgggcgatcgagaggggacaccggtaagcatcgtggtgacaaccccacctgaggcaccacctgccctgggcacccttcatgttgttcagcgcggcgaacactctctgcggttgcgctgggaaccagtgccaagggctcaaggttttttgctacactggcaacccgagggaggtcaagaacagtcgcgtgtgctgggaccagaactgagcagttaccacctcgacggactcgagccagcaacccagtatcgcgtcagattatccgttctaggtcctgccggagaaggaccctcagctgaggtaacagccagaacggaatctcctagggtgccaagtattgagctcagggtggtggatacatccatcgattcagtaactctggcctggacacctgtgtcccgcgcaagtagctacatactgtcttggagaccactccgcggaccagggcaggaggtcccaggctctcctcaaacactgcctggtatatccagttcgcagcgtgtcacaggtctggagccaggggtgtcttatatcttttcgcttactccagtcctcgacggcgtgcgcggcccagaagcctctgttactcaaactcctgtttgtcctcggggcctggctgacgtggtgtttctaccacatgcaacgcaagacaatgctcacagggcagaagccactcgaagagtgttggagcgtctggttttggctctcggacctctcgggccccaggccgttcaagtggggctgctttcgtactcacatcgaccgagtcctttgttccccctaaatggtagccacgacctcgggattatcctccagcggataagagacatgccctacatggatcctagcggcaacaatttgggcactgctgtagtcactgcccaccgctacatgctagcgcccgacgcccccggccggagacagcatgtaccaggcgtgatggtgttgctggtggacgagcccttaaggggcgatattttctccccaatccgggaggcccaggcctcaggcttaaacgtcgtcatgctaggaatggcaggagccgacccggaacagctccgtcggctcgcacctgggatggatagcgtgcagacgttcttcgcagtggacgacgggccttccttagatcaggccgtgtctggcctggccaccgcactatgtcaggcttccttcacaacccagccgcgacctgaaccgtgccctgtatactgtcccaagggtcagaagggcgaaccaggcgagatgggattgcggggtcaggtaggcccgcctggtgacccaggtcttccaggccggaccggcgcccctggccctcagggacccccggggtcagcaacagctaaaggcgaacgggggttcccaggagctgatgggcgaccagggagtccaggacgagccggaaaccctggtactccaggcgcccctggcctaaagggaagcccaggcctccccggccccaggggggatccaggggagaggggcccgcggggtccaaagggagaaccaggggcccctggccaggtgattggcggtgagggcccgggattacctgggagaaagggtgatccagggcccagtggtcctcccggccccagaggcccactgggggatccgggccccagaggtcctccagggctccctggaactgctatgaaaggcgacaagggagaccgcggagaacggggaccacccgggcccggcgagggggggatagcccctggcgagccaggtctccctggcctgcccggttccccgggtccccagggacccgttgggcctcccggcaaaaaaggagaaaagggagacagtgaagatggcgcccccgggcttccagggcagccaggatcaccaggggaacagggcccccgtggccctccaggggccatcggaccgaagggagacagggggttccccggaccgctgggggaagccggcgagaagggagagcgaggccccccggggcctgctgggtcccgcggtctccctggcgtggccggcaggcccggagccaaagggcccgaaggtccgccagggcccacaggacgccagggtgagaagggggagcctggaaggccaggcgatcccgccgtggttgggccggccgtggccggtccgaaaggtgagaagggtgatgttggccctgccggaccccgcggggccaccggagtccagggagaaaggggccctcccgggctagtgctgccaggagaccccggccctaaaggggaccccggggatagggggccgattggcctgacgggccgcgctgggcctccgggagactctgggccacccggcgaaaagggagacccaggcagaccaggaccgccaggtcccgttggcccacgagggagagacggcgaggtgggcgagaaaggagatgaagggccacccggcgatcccggattgcccggaaaagcgggcgagagaggtttgcggggggctcctggggttcgcggtcctgtgggggagaagggagaccaaggagatcctggggaagacggccggaatggatcaccagggtcttccggtccaaagggagaccggggagaacctggcccacccgggcccccaggacgactggtggacaccgggcctggtgctagagagaaaggcgagccgggagataggggtcaggaaggtcccagaggccctaagggcgatcccggacttccgggagccccgggtgaacggggcatagagggcttccggggaccaccaggcccccagggagacccaggcgtcagaggccctgccggagaaaagggtgatcgggggccgcccggcctcgacggtaggagcgggctcgacggtaaaccaggggctgccgggccatccggacccaatggtgctgccggtaaagctggtgatcccgggcgagatggcctgcctggactccgtggcgagcaaggtctgcctgggcccagtggcccgcctggcctccctggaaaacctggggaggacggcaaaccgggacttaacggaaagaacggtgaaccgggagatcccggagaagacgggcggaagggtgagaaaggcgactctggagccagtggaagagaaggtagggacggacccaagggagagaggggcgctcccggaattcttggacctcaaggcccacccggcctgccgggacctgttgggcctccgggccagggcttccccggagtgcctgggggaaccggacccaaaggcgaccgaggggagacagggtccaagggagagcagggactcccaggggaaaggggacttcggggcgaacccggatctgtcccaaatgtggaccgactcttagagaccgcagggatcaaagcaagcgctctgcgagaaatcgtggagacctgggatgagagctccggctcgttcctaccagtcccggaaagaaggcgcggcccaaaaggtgacagcggggagcagggcccgcccggaaaagaagggcccataggatttccaggggagcgggggctaaagggggatcggggcgacccggggccacaaggcccacctggcctcgcactcggcgaacgcgggccgcctggcccctctggcctcgcgggggagcccgggaaacccggtatccccggacttcccgggcgcgcagggggtgtgggagaggccggtcgccccggagagcggggcgaacgaggcgagaagggagagagaggcgaacaaggaagggatggacctcctgggttgcccggaacacctggcccacctggccctcccgggccaaaggtatccgtcgacgagcctggtccaggcttgagcggtgagcaggggccccccgggttaaagggggccaaaggtgaacccggttccaacggggaccagggtccgaaaggagaccgtggagtgccggggataaagggggatagaggggaaccagggccaaggggtcaggacgggaaccccggattgcctggcgagcgcggtatggctggacccgaaggaaaaccaggcttacaagggcccaggggaccaccagggccagtggggggtcacggggacccaggtccacccggtgctccgggacttgctggaccagcaggccctcaagggccgagtggcttaaaaggggagccaggcgagacgggcccccccggacgaggactcactgggcctacaggagccgtcggtctccccggccctccaggcccctccgggctggtgggccctcagggcagcccggggcttccaggccaggtaggagagactggtaagccaggcgcaccagggcgcgacggtgcttcaggcaaagacggcgatcgcggtagtcccggggttcccgggagcccaggcttacccggacctgtggggcccaaaggagaacctggcccgactggggcacccggacaagcggtagtgggcctacccggtgccaaaggtgagaagggggcgcccgggggactcgcaggcgacctggtaggagaacctggggccaagggggacagagggctgccggggccccgcggtgagaaaggtgaggccggcagagcaggggagccaggcgacccgggtgaggacgggcagaagggcgcgcccgggcctaagggatttaagggagatcccggagtcggcgtcccgggaagtccgggtccccctggccccccaggggttaagggcgatcttggtctcccaggcctgccaggggcccccggtgtggtggggtttcctggccagactggacctcgcggtgaaatgggtcagcccggtcccagcggcgagcgcggattagccggcccgcctggccgtgagggcatccctgggcctctaggcccaccaggaccaccgggaagcgtcggaccccctggcgcttccgggctgaagggcgacaaaggggaccctggagttgggctccctggaccaaggggagagaggggagagcctgggattcgcggcgaagacggacgtcccgggcaggaagggcctcgtgggctaaccggaccaccgggttctcggggggagcgcggagagaagggtgacgtgggctccgccggcttgaaaggcgataaaggtgactctgcagttatcctcggcccaccaggccctaggggtgccaagggagacatgggggagcgtggccccaggggcctggacggagacaagggcccaagaggggataacggagaccctggagacaaagggtcaaagggagagccaggagataaaggcagtgcaggccttccggggcttagaggactgctgggccctcagggccagcccggtgctgctggcatccctggcgatcctggaagccctggaaaggatggtgttcccggaattcgaggcgagaagggcgatgtggggtttatgggacccagaggtctcaaaggagaacggggggtgaagggggcctgtgggctcgatggagagaagggtgacaaaggggaggctggacctcccggaagacctggcttagccggccacaagggcgagatgggtgaaccgggtgtaccaggccaatctggagcgccggggaaggagggattaattggaccaaagggcgatcgtggattcgatggacagcctggtcctaaaggggaccagggagaaaagggcgaaaggggcactcccggaattggcggatttcccggcccctccggaaatgatggctcagccggccctccagggcctcctggctctgttggacctaggggacctgaggggctgcagggtcagaagggcgaaaggggcccccccggcgaaagggtcgtaggagcacccggagtgccgggcgctcccggcgagcgcggcgaacaagggcgcccgggaccggcggggccaaggggcgagaagggtgaggctgctctcactgaagatgatattagagggttcgttcgccaggaaatgagccagcactgtgcttgccaagggcagtttattgctagtggctcccgcccactgccctcgtacgccgccgacactgcagggtcacagctgcatgccgtccctgttctgagagtctctcacgctgaagaggaagaacgcgttcctcccgaggacgacgagtattctgagtactccgaatattcagtggaagagtatcaagaccccgaagccccctgggacagtgacgatccatgctcgttgcccttagatgaagggagttgtaccgcttatacacttaggtggtatcacagagctgtgaccggtagtacagaagcttgtcatcccttcgtgtacggcggatgtgggggcaacgccaacagatttggaacaagagaggcgtgcgagcgcaggtgcccaccgcgagttgtgcagtcccagggtactggcacagctcaggat

SEQ ID NO: 1436 - DNA, 8832 bp, Artificial Sequence
  derived and/or modified sequence
atgaccctgcggcttctggtagccgccctctgcgcgggaatcctcgctgaggctcctcgcgtgcgggcgcagcaccgggaacgggtgacctgcactagactgtacgccgccgacatcgttttcctcctggatgggtcgtcatccatcgggcggtcgaactttagggaggtgcggtcgtttttggaaggccttgtgctgcctttctcaggagcggcatccgcacaaggagtccggtttgctaccgtccagtactcagacgacccaaggaccgagttcggactggacgccctcgggtccggaggagatgttatccgggcgatccgggagctgtcgtacaaaggagggaacactaggacgggagcggcgatcctccatgtggcagaccatgtgttcctgccacaactggctcgccccggagtcccgaaggtgtgtatcctgatcactgacggcaagtcacaggatctggtggataccgccgcacaacggctcaagggacaaggagtgaaactctttgcagtgggaattaagaatgcggatcccgaggaactcaagagagtcgcgtcgcagccaacctcagatttcttcttcttcgtgaatgacttcagcatcctgcgcacgctcctgccactcgtctcgcgccgggtgtgcactactgctgggggcgtgcctgtgacccgcccgccagacgattcaacctcagcacctagggacctggtcctgtcggagccaagctcccagtcgcttagagtgcaatggaccgcagcaagcgggcccgtgactggctataaagtgcaatacaccccgctcacggggctggggcagccactcccgtcggaacggcaagaggtgaacgtgcccgccggagaaaccagcgtgaggctccggggactccgcccactgactgaataccaggtgaccgtgatcgcgctctacgctaattcgattggggaagcggtatcaggaactgccagaaccactgcgttggaaggaccggaattgactatccagaatactactgctcactccctgctggtcgcctggcgcagcgtgcccggtgctactggatacagagtgacttggcgcgtcctttcaggtggccccactcaacagcaggagctgggacccggtcagggatctgtgcttttgcgggatctcgagccgggtaccgactacgaagtcacggtgtcaactctgtttggacgctccgtgggacccgcaacctcgcttatggcacggaccgacgcgtcggtggaacagacccttagaccagttatcttgggcccgacttcaatccttctgtcctggaacctggtgcctgaagcaagggggtaccggctggaatggaggcgcgagactgggctcgaacccccgcagaaagtcgtgctgccgagcgatgtcaccagataccaattggacggactgcagccggggacggagtaccgcctgaccctgtacactctcctggaaggacatgaagttgcaaccccagcgactgttgttcccactggaccagagctcccggtgtcgccggtgactgacctgcaagctactgaattgccgggacagagggttagagtgagctggagccctgtgccaggagccacccaataccgcattatcgtgaggagcacccagggggtggagcgcactctggtgctgccgggctcgcagacggcatttgacctggatgacgtgcaagcaggactctcgtacaccgtcagagtgagcgcgagagtgggccctcgggagggaagcgcgtctgtcctgactgtgcggcgggagcccgaaaccccgctcgccgtgccgggactgcgcgtggtggtcagcgacgcaacgcgggtccgggtggcctggggaccggtgcctggagcctccggattcagaatttcgtggagcaccggctccggacctgagtccagccagaccctccctccggactcaacggccaccgatatcacgggactgcaacccggcaccacgtaccaggtggcggtgtccgtactgcgaggtagagaagaaggaccggcggcagtgatcgtggctcgcaccgacccgctgggaccggtgcgcaccgtccatgtgacccaagcctcgtcgtcatccgtgacgatcacttggacgcgggtgccgggcgcgaccggatatcgggtgtcctggcattcggctcacggtccagagaagagccagctcgtgagcggtgaggccaccgttgccgaactggatggcttggagccagatactgagtatactgttcatgtgagagcccacgtggctggcgtggatgggcctccggctagtgtggtggtgcgcaccgcaccagagccggtaggccgcgtgtcaaggctgcaaatactgaacgcgtcctccgacgtccttcggattacttgggtcggagtgactggagcgaccgcctaccggctggcttgggggcgctcggaggggggccctatgagacatcaaatactgccgggaaacaccgatagcgcagaaatccgcggcttggagggcggcgtgtcgtacagcgtgcgggtcaccgcgctcgtgggagatcgcgaggggactccagtctcgatcgtggtgacgactccacccgaggccccgccagccctgggcactctgcatgttgtgcagcgcggtgagcactcgctgcgcctgagatgggagcccgtcccgagagctcagggatttctgttgcattggcagcctgaaggaggccaggaacaatccagagtcctgggtcctgagctgtcatcgtaccacctggacggcctggaaccggcgacccagtatcgggtgaggctgtcagtgctgggcccggcgggagagggacctagcgccgaggtgaccgcccgaacggagagccctcgggtgccctcaatcgaactgagagtcgtcgatacctcaatcgatagcgtcactctggcatggactcctgtgtcaagagcaagctcctacatcttgtcctggcgcccgctgcgcggaccaggacaggaagtgcccggatcgccacaaacgctgccaggaatttcctcctcacaacgggttactgggctggagccaggagtgtcatacatcttctcgttgaccccggtgctcgacggcgtcaggggccccgaggcatcagtgacccagaccccggtctgccctcgcggccttgcggacgtggtgttcctcccgcatgcgactcaagacaacgcccaccgcgccgaggcgaccagaagagtgctggagaggcttgtgttggcgctgggcccacttggcccacaggcagtgcaagttggactgctctcgtactcccatagaccttcgcctctgttcccactgaacggatcgcacgatctcggaatcatcctgcaacggatccgcgacatgccctatatggatccttccggaaacaaccttggtactgcggtggtgaccgctcatcggtacatgctcgcacctgatgctcctgggcggcgccaacatgtcccgggagtcatggtgctgctcgtggacgaaccgctcagaggcgatatcttcagcccgatccgagaagcccaggccagcggtctgaacgtggtgatgttgggaatggcgggtgccgatccggaacagctccgcagactggccccaggaatggactccgtgcaaaccttttttgccgtggatgatgggccttcactggatcaagccgtctcgggcttggcgaccgcgctctgccaggcttctttcacgacccagccacggcctgagccgtgccctgtgtactgccccaagggccagaaaggagaaccgggggagatgggcctcagaggccaagtgggaccgcctggagatccaggcctgccaggacggaccggcgcgccaggtcctcaggggcctccgggttcggcgactgccaagggagaacggggattccccggagcagatggccgcccgggatcaccagggagagctggaaacccgggaactccgggcgccccagggctcaagggctcaccggggcttccaggtccgcgtggtgaccccggtgaacggggaccaagagggcccaagggagaaccgggagcaccaggccaggtcatcggaggggagggacccgggctgccgggacggaagggtgacccaggaccgtcgggcccgcctggaccgcgaggacctttgggagatccaggaccgcggggcccgcccggattgccggggactgcaatgaagggtgacaagggggaccgcggagaacgcgggcctccgggacctggagagggagggatcgccccaggagaacctggactgccgggactgccgggaagcccgggtccgcagggcccggtgggaccgccaggaaagaagggagaaaagggcgattcagaagatggggccccagggctgccgggacaacccggctccccgggagaacagggaccacgcggaccccccggtgcgatcggacctaagggggatcggggattccccggaccgttgggagaggcgggagagaagggggaaagagggccgccgggccctgcgggaagcaggggactgccgggagtcgccggcaggccgggggcgaagggcccggagggacctccgggacctaccggacggcaaggcgaaaagggcgaaccggggcggccgggggaccccgccgtggtcggccctgcggtggctggcccgaagggcgaaaagggagatgtcggaccggccggcccaaggggggcgaccggcgtgcagggcgaacgcgggcctccggggctggtcctgccgggagatccaggaccgaaaggagatccgggcgaccgggggccaattggactgaccggacgggccggacctccgggagattccggcccaccgggagagaaaggggacccggggaggccgggccctccaggccctgtgggaccacgcggacgggacggggaggtcggcgagaagggcgacgaggggcctccaggggatccgggtctgcctggaaaggctggagaacggggcctgaggggcgctcctggagtccggggtccagtgggtgagaagggagatcagggggacccgggcgaagatggcagaaacggatcgcctggctcctcaggaccgaagggagatcgcggagagccggggccaccaggaccaccgggcagactcgtggacactggcccgggcgctcgggaaaagggagagcctggagatcggggacaagagggacctcggggacccaagggggacccgggactccctggggctccgggtgagcggggaattgaaggattcagaggaccacccggacctcagggcgatccaggagtgagaggaccggctggagaaaagggcgaccggggaccgccggggctcgacggccgctcaggactcgatgggaagcctggagcggccggcccgagcggcccaaatggtgcggctggaaaggcgggggaccctgggcgggacggtctgccgggattgagaggagaacagggcttgcctggtccgtcgggccctcccggtctgccgggcaaaccgggagaggatgggaagcccgggctcaatggaaagaacggcgagccaggtgaccctggcgaggacggacgcaagggtgaaaaaggagactccggtgcctccgggcgggagggtcgcgatggccccaaaggagaacgcggagcacctgggatcctgggcccacagggccctccaggtctgccaggtccggtcggccccccaggacaggggttccctggagttccgggagggaccggtccgaagggagataggggcgagactggctccaagggagagcagggactgcccggcgagcgcggtctgcgcggtgagccaggatcagtcccgaatgtggacagactcctcgaaaccgccggaatcaaggcatcagcgttgcgcgagatcgtcgagacgtgggatgagtcctcgggatcctttctcccggtcccggaacggcgccgagggccaaagggtgactctggagaacaggggccgccgggcaaagaaggaccgatcgggttccccggtgagcgcggcctgaagggtgaccggggagatcccggaccgcagggcccaccgggactcgccctgggagagagaggacctcccggaccgagcggactcgcaggggaaccgggaaagccaggaattcctggtctgcctggccgcgcgggaggagttggcgaagctggcaggccgggagaacggggagaacgaggcgagaagggtgagcgcggtgaacaaggacgcgacggaccgccaggcctccccggcaccccagggccacccggaccaccgggaccgaaggtgtctgtggacgaaccgggtccaggactgtccggagagcaaggtccgccgggactgaagggcgccaagggtgaacctggaagcaacggagatcagggccccaaaggagatcggggagtcccgggaatcaagggtgaccggggcgaaccaggcccacgggggcaggatggaaaccccggtctgccgggtgaaagagggatggccgggcctgaaggcaaaccgggactgcagggaccacggggccccccaggccctgtcgggggtcatggagatccagggcctccgggcgccccgggactcgcaggaccagctgggccccagggtcctagcggactcaagggcgagcccggagaaaccggaccaccgggccgcgggctcactggcccgaccggagcggtgggacttcccggaccgccgggaccgtccggactggtgggaccgcagggatcccccggactcccgggacaggtcggtgaaaccggaaagccaggagctcctggacgggacggagcttcaggaaaggacggtgaccgcggatccccgggcgtccctggaagcccaggattgcctggacccgtggggccgaagggcgaaccgggacccactggcgcgccgggccaggcggtcgtcggcctcccaggagccaagggagagaaaggagcgccgggcggactggccggggacctggtgggcgaaccgggcgctaagggagatcgcggcctcccaggtccgaggggagagaaaggagaagcaggacgcgcaggcgaaccgggcgaccctggagaggacggccagaaaggagcaccgggtccgaaaggtttcaaaggggacccaggtgtgggagtcccagggtcaccgggcccccctggaccgccaggagtcaagggggatctgggactgccaggcctgccgggagcgcccggagtggtgggtttcccgggacagactggccctagaggagaaatgggccagccgggcccatccggagaacgcggactggccggccctccaggacgcgaaggaattccaggaccgctcggtcctcctggcccacctggatcagtcggcccgccgggagcttcaggtcttaagggggataagggagatccaggggtgggcctcccgggaccgagaggagaaaggggcgagcctgggattcgcggcgaggacggccgccccgggcaggagggtcctagaggactgactggcccaccgggatcccgcggagaacgcggagagaaaggcgacgtgggatcggccggactgaaaggggacaaaggcgactcggccgtcatcttgggtcctccaggtccgcgcggggccaaaggagacatgggggaaagaggtccacgcggtctggacggagacaagggccccagaggagataacggggacccgggagataagggatcgaagggagagcctggggacaagggctccgccggactgccaggactccgaggactgctgggacctcagggccagccgggagccgccggaatcccaggagatcccggttccccgggcaaggacggagtccctggaatcagaggtgagaagggagacgtgggctttatgggcccacggggcctgaagggagaacgcggagtgaagggtgcgtgcggacttgatggcgaaaaaggagacaagggagaagccgggccgcctggacgcccgggactcgctgggcacaaaggcgaaatgggagagccaggcgtgccgggtcagtccggagctccgggtaaggaaggcttgatcggacccaagggagacagaggcttcgatggccagcccggacccaagggggatcagggagaaaagggagagagaggaactcccggaatcggaggatttcccggtccatctgggaatgacggctcggctggaccgcccggaccgcctggttccgtggggccgcgtgggccggaaggactgcagggacaaaagggcgaaagagggccgccgggagaaagagtggtgggagctccgggggtgccgggagcccctggagaacgcggggaacagggacggccaggcccagcgggcccacggggcgaaaaaggagaggcagcgctgactgaagatgacattcgcgggtttgtcagacaagaaatgtcacaacattgcgcatgccaagggcaattcatcgcctccggctcgcgcccgctgccgtcctacgcggcggacaccgcaggatcgcagcttcacgcagtgccggtgcttagagtctcgcatgctgaggaagaagagcgtgtgcctccagaggacgacgagtattccgaatactcagaatactcagtggaggagtaccaagatcctgaggcgccgtgggattccgacgacccatgcagcctgcccctggatgaaggatcgtgtaccgcgtacaccctccggtggtatcacagagccgtgaccggatcgacggaggcgtgccatccctttgtgtacgggggttgtggcggtaacgcaaatcgttttggtaccagagaggcgtgcgaaagacgctgccccccaagagtggtccagtcgcagggaactggaacggcacaagat

SEQ ID NO: 1437 - DNA, 8832 bp, Artificial Sequence
  derived and/or modified sequence
atgacactacgactactcgtcgcagctctgtgcgccgggatactggccgaggctcctagggttagagcacagcaccgagaaagagtaacatgtacccgactgtacgccgctgacattgtgttcctcctagatggctctagctcaattgggagatctaattttcgagaggtgcgcagcttccttgagggcctggtattaccttttagcggagcagcctccgctcagggagtgcggttcgccactgtgcagtattctgatgaccctaggactgaatttggcctcgacgcactgggctctggcggagacgtgatccgggcaattcgcgagctgtcatataaggggggcaatacacgaaccggggccgccatcctgcatgtagccgatcatgtgttcttacctcagcttgcccgtccaggggtgccaaaagtgtgcatactaatcacagacgggaaaagccaggatctggtggacacagctgcacagcgcctcaaggggcagggcgtaaagctgttcgcagttgggataaagaacgccgaccctgaggagctcaagcgcgtcgccagccagcccacctctgactttttcttcttcgttaacgacttctccattttgcggactttactccctctggtgtcacggagggtgtgcacaacagcaggcggcgtccccgtgacccgacccccagacgattccactagtgcccctagagacctagtgctcagcgaaccctcctctcagtctttgcgagtgcaatggactgctgctagtggccctgtgacagggtacaaagttcagtacacccccttaactggcctgggacaacctctgccatcagagagacaagaggtcaacgtccccgccggcgaaacctcagtgcgactgcgaggcctgcgacccctgacagagtaccaggtgaccgtgatcgctctttacgccaactccataggtgaggccgtgtctggcaccgccaggactactgctctcgaagggcccgaactgactatccagaatactaccgcacattctctgctggtagcatggcgctctgttcctggcgccacaggttatagagtgacctggcgcgtcctgtccggcggacccacccagcagcaggagctggggcctggccagggttctgtcctgctgcgtgatctagagcctgggaccgattacgaagtgacagttagtaccctgttcggacggtccgtcggacctgcaacctctctcatggcccggactgacgcatccgtggaacaaaccctgcgcccagtgatcctgggcccaacttccatcctcctgagttggaacctcgtgcctgaagcccgcggataccggttagagtggaggcgcgaaaccgggctcgagccaccacagaaggtcgtgctcccatctgatgttaccaggtaccagctggatggactccagccagggacagagtaccgactgaccctgtacactttgctagaggggcacgaggttgcaacccctgcaaccgtagtgccaactggacccgaactgcctgtttctccagtgactgatttacaggctacagagctcccaggccagcgcgtccgggtcagctggagtcccgttccaggggccactcaatatcggataatcgtaaggtccacccagggtgtggagagaacactcgttctgcctggcagccagaccgcttttgacctggacgatgtgcaggccggcttaagttataccgttagggtgtccgctcgggtgggacctagggaaggcagtgcttccgtgctgactgtgaggcgcgagcctgagacccctctggccgtgccaggtttacgagtggttgtttccgacgccaccagagtgagggtggcctgggggccagtgcctggcgcttccgggttccgaatcagttggtccaccggctccgggcctgaaagctctcaaaccctgcctcctgatagtactgctaccgatattacaggcctgcaacccggcacaacttaccaggttgctgttagcgtgctgcgtggtcgcgaagagggaccagccgcagtgatcgtggcacgcaccgaccctttggggcccgtcagaaccgtacacgtgactcaggcaagttcaagttctgtcaccatcacatggactagggtgccaggagccactgggtacagagtctcatggcatagcgctcatgggcccgagaaatcccagctcgtgtccggcgaagctacagtggctgaactcgacggattagaaccagacaccgagtataccgtgcacgtccgagcccacgtcgctggagtcgatggcccccctgcctctgtggttgtcagaactgctcccgagcctgtgggcagagttagccgcctgcagattctcaacgccagctccgatgtgctgcgcatcacatgggtgggcgtcactggcgctaccgcatatcgcttggcatgggggcgttccgagggaggacctatgcgacatcagatactgccaggcaatactgattccgcagaaataagaggtctagaaggcggcgtatcttactctgttcgagtgaccgctctcgttggagatagagaaggaactcccgtgtctattgtggtgaccaccccacccgaagctccaccagcactcggcactctgcatgtcgtccagcggggcgagcacagcctgcgtttacgctgggaacccgtgccaagagcccagggcttcctgcttcactggcagcctgagggcgggcaggaacaatcacgcgtcctgggacccgaactttcttcctaccatttggacggtctggagcccgccacccagtacagggttaggctgtccgtgctggggccagccggcgaaggcccatccgccgaggttacagcccgcacagaatcccccagggtcccctcaattgaactgcgtgtcgtcgacacaagtattgacagcgtcaccctcgcatggactccagtgagcagggcatctagctatatcctgagttggaggcccctccgtgggcccggacaagaggtgccaggcagccctcaaaccctgccaggaatatccagcagtcagcgggttacaggtctggagccaggggtgagctacatcttctccctgacccctgttctggatggtgtgaggggacccgaggccagcgtgacccagactcctgtttgtccacgcggtctagctgacgtggtgttcctgccccacgccactcaagataacgcacaccgagctgaggcaactagaagggttctagagagactcgtgctggctttgggaccacttggcccacaggctgttcaggtcggcttactgtcctattcccatagacctagcccactgtttccactcaatggctctcacgatctgggcataatccttcagcgcattagggatatgccctatatggatccaagcgggaacaaccttggaacagctgttgtgaccgctcaccggtacatgcttgcccccgatgctcccgggcgccgtcagcacgtccctggtgttatggtgcttctggtagacgagcctctccgcggagatattttttcacccatccgggaggctcaagcaagcggtctgaatgtggtcatgctgggcatggctggtgccgatcctgaacaactgcggcgactggcccccggaatggattccgttcagaccttcttcgccgtggacgacggcccatctctagaccaggcagtcagcggcctggccaccgctctctgtcaggcaagctttacaacacagccacggccagagccttgccctgtgtattgtccaaaagggcagaagggcgagcctggagaaatgggccttcggggccaggtgggcccccccggcgatcccggcctgccaggccgcactggtgccccgggcccacagggcccccccggaagcgctacagccaaaggtgagcggggctttcccggggcagacggaagaccagggtcccccggccgcgctggtaatcctggaacacccggtgctcccgggctaaaaggctcccctggactgcctggcccacggggagatcccggagaacggggacctcgcggccctaaaggggagcccggcgcacctggccaggtgattggcggggagggccccggcttgccaggccgcaagggagatcctgggccttctggtccccccggccccagaggcccactgggtgatccagggcctagaggaccacccggtcttcctggaactgccatgaagggagacaagggggacagaggcgagagaggcccaccaggccctggagagggcggaatcgctcctggggagcctggccttcctggattacccggatctccagggccccaggggcctgtggggccacctgggaagaaaggagagaagggagactccgaggacggcgctcccgggctgcctggccagccagggtccccaggcgagcagggtccacggggcccacctggagcaattgggccaaagggagatagaggtttcccagggccactgggcgaggccggtgaaaaaggcgaacgtgggcccccaggccccgctggttctagaggccttcccggggtagccgggaggccaggggccaagggtcctgagggcccacccggccctaccggcaggcagggcgagaagggggaacccgggcgacccggagacccagccgtggtgggccctgcagtggcaggcccaaagggtgagaagggcgacgtggggcccgctggacctcgaggagctaccggcgtgcaaggggaaaggggacctcccggcttagttttacccggggatccaggccccaaaggagacccaggcgacaggggcccaatcggtctgaccggcagggctggcccacctggcgatagtggaccaccaggggagaagggggacccaggtcgccctgggcccccaggccccgttggccctcggggacgggacggggaagtcggcgagaagggcgacgaaggcccccctggcgaccccggtctgccaggtaaggccggcgagcgcggtttgcgaggggctcccggtgtacggggacctgttggggaaaaaggggaccagggtgaccccggcgaggacggacgcaatggcagccctggctcatctggcccaaaaggggacagaggggagccaggccctccaggcccaccagggcgtctggtcgatacaggcccaggcgcccgggagaagggagaacctggggataggggacaggaaggacctaggggccctaagggcgatcctggcctccctggggctcctggggagaggggcatcgaggggttcaggggccctcctggcccccaaggcgacccaggcgtgcgaggccctgccggagagaagggcgacaggggccctcccggcctagacggccggtctggattggatggtaaacccggcgccgccggccccagtggacctaacggcgcagctgggaaggcaggcgatcccgggcgagacgggcttcctggcctgcggggcgaacaggggctaccaggcccatctggtccccccggtctgcccggcaaaccaggggaggacggcaagcctggtttaaatggcaaaaatggagagcctggcgatcctggagaggacggtcgcaagggggaaaagggcgatagcggggcctctggaagagaaggccgagacgggcccaaaggcgaacgcggcgcccctggaatcttaggtcctcagggcccacccggcctcccaggcccagtggggccacctggtcagggatttccaggcgtgcctggcggaacagggcccaagggtgacagaggtgagaccggctctaagggcgagcagggtttgcccggggaacgaggattgcgtggcgagcctggttctgtccctaatgtggatagactcctagagaccgccgggatcaaggccagcgccctaagagagatcgtagaaacatgggatgaaagtagcggttcctttctgcccgtgcctgaacggagacgagggcccaaaggggactccggggaacagggaccccctggaaaggagggtcccataggattccctggagagagagggctaaagggggatcgaggggatcccggccctcaaggaccacccgggttggctctgggcgagagaggcccaccaggccccagtgggctcgctggagagcctggcaagcctgggattcctgggcttccaggacgtgcagggggtgtcggcgaagccgggcgtcctggcgagaggggagagaggggagagaaaggagagagaggcgagcagggccgggacgggcctccaggcctccctgggacacccgggccccctggaccacctggcccaaaagtgtccgtggatgagcctgggcccggtctcagcggggagcagggcccacctggcctgaaaggggccaagggtgagcccggctctaacggagaccagggccctaaaggcgaccggggcgtgccaggcattaagggagacaggggcgaaccaggaccccgcggtcaggacggcaaccccggcctgcccggtgagagagggatggcagggccagagggaaaacctggcctgcaagggccccgtggccctcccggccccgtcgggggtcatggggacccaggccccccaggggcccccgggctcgctgggccagccggaccacaggggccaagcggcctgaagggcgaacctggtgagactggaccacccggccggggcttaaccggaccaacaggcgcagttggtctgccaggccccccaggcccctctgggctggtgggtccacagggatcacctggcctgcccggccaggtgggagaaactggaaagccaggcgctccagggcgggacggggctagtggcaaagatggcgatagaggctctcctggcgtccctggctctcccggcctgccaggaccggtcggcccaaaaggagaacccggccctactggggcaccaggccaggccgtggttggattacctggagctaagggagagaagggcgcacccggcggcctggccggcgacctggtgggagagccaggcgcaaagggcgacaggggattgccaggcccacgcggcgagaagggagaagctgggcgcgccggggagcccggggaccctggcgaggacggacagaagggcgccccaggacccaagggattcaagggtgatcccggcgttggcgtgccaggttccccaggcccaccaggccctcccggcgttaagggcgatctgggactgcccgggctgcccggcgcccccggggtggttggcttcccaggccaaacaggcccccgcggtgagatgggacagccagggccttctggggagcgtggcctagccgggccaccaggcagagaggggataccaggccccctcggccccccaggtcctccagggtccgttgggcctccaggggccagcgggctcaaaggagacaagggcgatccaggggtaggactgcctggtcctcgcggcgagaggggcgaacctggaatcaggggcgaggacggcaggcccggccaggagggccctaggggcttgactgggccccccggctctaggggggagcgtggcgagaaaggggacgtcgggtcagctggattaaaaggagacaaaggggactccgcagtcatcctgggtccccctggaccacggggggccaagggcgacatgggagagagaggcccaagaggcttagatggcgacaagggacccagaggggacaacggggacccaggtgataaaggttccaagggcgaacccggcgataagggatcagctggcctacctggcctccgagggctgctggggccccagggccagccgggagctgccgggatacccggcgacccagggtctcctgggaaagatggggtgcctggtattagaggcgagaagggcgacgttggtttcatgggtcccaggggattgaagggagaaaggggcgttaagggagcctgtggactggatggcgaaaagggagataaaggggaggcaggccctcccggcaggcctggtcttgccggacataaaggggaaatgggggaacctggggtgcctgggcaaagcggggctcctggaaaagagggcctcattggccccaaaggggacaggggctttgatgggcagcccggcccaaagggggaccagggtgagaaaggtgaacggggcacacccgggatcggtgggtttccagggccttctggtaatgatggcagtgctggtcctccaggcccccccgggtcagtgggcccacgtggacccgagggcctccagggacagaagggagagcggggacctcccggcgagagagtggtgggggctcctggggttccaggcgcccccggcgagcgcggcgaacagggccgacctggaccagctggtcccaggggcgagaaaggagaagccgctctcaccgaagatgacattaggggcttcgtgcgccaggagatgagccagcattgcgcctgtcagggccagttcatcgccagcgggtctaggcctctgccctcttacgccgccgatactgccggctctcaactgcacgcagtgcctgtgctccgcgtgtctcacgcagaagaagaagagagggtgccccctgaggacgatgagtattctgaatatagcgagtatagcgtggaggagtatcaagatcccgaggcaccctgggattcagacgacccctgttctctgcctctggatgaaggctcttgtaccgcatacacactgaggtggtaccacagagccgtgactggttcaactgaggcctgccatccatttgtgtatggagggtgcggtggtaatgcaaaccgtttcggaactagggaggcctgtgagcgccgttgtccccctagggtcgtacagtcccagggtaccggcaccgcccaggat

SEQ ID NO: 1438 - DNA, 8832 bp, Artificial Sequence
  derived and/or modified sequence
atgaccctgcgattgctagtcgccgccctctgtgcaggtatcctagccgaggcaccgcgtgttcgggctcaacacagggagagagtgacgtgtacgagactctacgctgctgacatcgttttcctcctggatgggagcagttccattggccgtagtaattttagagaggtgcgaagcttcttagaaggtctcgttcttccattcagcggagctgcctctgctcagggagtgagatttgctactgtccagtattccgacgatccccggacggagttcggactagatgccctaggttcaggcggcgacgtgattagggctatccgggagttgagttacaagggaggaaacactcgcaccggagccgcgatattacatgtggccgaccacgtctttctcccacaactagcccggccaggcgttcccaaggtttgcattctcatcaccgacgggaagtctcaggaccttgtggataccgccgcacagcgcctgaaaggacaaggtgtgaaactgtttgccgtcggcattaagaacgccgacccagaagagttaaaacgagttgcaagccagccgacttccgacttttttttttttgttaacgatttttcgattctcaggacactcctcccattggtgagtaggagagtgtgcactactgccggcggtgtccccgtaaccagaccccccgatgatagtacaagcgccccccgagatctcgtactgtctgagccctcaagccaatccttgagagtgcaatggaccgccgcatcagggcccgtgacaggttacaaggtccagtacactccactgaccggcttgggacagcctctcccctcagagcgccaggaggtgaatgtccccgcaggggaaacatctgttcgcctgagaggccttcggcccctcacagaatatcaggtgacagtgatcgctttgtatgccaactccatcggcgaggcagtcagcggcacggctcgaacaactgctctcgagggtccggagttgacaattcagaacactacagctcattcccttctggtcgcctggagatctgtgccaggagctactggttatcgggtgacctggagagtcctttctggcggacccacacagcagcaggagttggggccaggccaggggtccgtgctcctgcgcgacctggaaccagggactgattatgaggtcaccgtctccaccttgtttggcaggtccgttggtccagccacctctttaatggccagaacagacgctagtgtggaacagaccctccgaccagtgattctaggcccaacctcaatcctgctcagctggaacctcgttcccgaagcaagaggatacaggttagaatggcggagggagacagggttggaaccgccccagaaggtggtccttccttcagacgtcacacggtatcagctggatggactgcagccggggactgaatataggcttactttgtacactctgctggagggccacgaagtagctacaccggccactgtcgtgccaactggccccgaattaccagtgagtcccgtcaccgatctccaggctactgagctgccaggccagcgagtccgggtgtcctggagccctgtacccggggccacacagtatcgcataatcgtacggagtacacagggcgttgaacggaccctggtactccctgggtcgcagacagcttttgatctggacgatgtgcaggccggccttagctatactgttcgcgtatccgctcgcgtagggccgagggaaggctcagcttccgtgctaacggtcagacgagaacccgaaacacccctcgcagtgcctggactgcgcgtggttgtgagtgatgctacccgagtccgagtggcatggggaccagtgcctggcgcatccggctttagaatatcatggtccactggatctggcccagagagcagtcagactcttcctcccgacagcaccgccacagatattactgggctgcagcccggaacaacctatcaggtcgcagtgtcagttctccgtggccgagaagagggaccagcagcagtgattgtagcgcgtacagacccgctgggtcctgtacggactgtccacgtgacccaggccagttcatcctccgtcaccatcacatggacacgcgtgccaggggcgacaggttatagagtctcatggcactccgcacacggccctgaaaaatctcaactggttagtggcgaagccacagtcgctgagctcgacgggctggagcccgacacggagtacactgttcacgttcgcgcacatgtggcaggagttgatggcccacctgcgtctgttgtcgtgagaacggcgccagaacccgtggggagggtatctcggctgcagatcctgaacgcttcctccgatgttctgcggattacctgggtaggcgtgacgggagcaactgcttatcgactggcctggggtcgctcagagggcggcccaatgcggcatcagattttgccaggcaacacagatagcgcggagatccggggcttggagggcggcgtgtcttacagtgtgcgggtgacagcactggtgggcgaccgcgagggcacaccagttagcatagtagtgaccacgccccctgaagcccccccagccctaggcacgttacacgtcgtgcagaggggcgaacactccctgcgcttacggtgggagccagtgcctagagcccaaggcttcctgctccattggcagccagagggagggcaagaacagtcgcgcgttctgggaccagagctcagctcttatcacctggacggcttggagcctgcaactcagtatcgggttaggttgtccgtactggggcctgctggcgagggaccctctgcagaggtgactgctaggacggagtctcccagggtcccatctatcgaactccgagtcgtggacacatccatagattccgtgactctggcatggactccggtgtctcgcgcaagctcttacattttgtcctggcgaccattgagaggcccgggccaggaggtacccggatctccacagactctgcccgggatatcaagctcccagcgtgtgaccggtttggagccaggtgtaagttatatcttctctctgactcccgtccttgatggcgttcgagggcccgaggctagcgtgacacagaccccggtgtgccctagggggctggccgacgtagtgttcctgccccacgccactcaagacaatgcccatcgcgccgaagccacacgaagggtgctggaacggctggttttggctttaggacccttaggtccacaggcagtccaggtggggttgttgagctacagccaccgcccttccccgttgtttcccctcaacgggagccatgatctcgggattattctgcagagaatacgggacatgccttatatggatccttctggcaacaatctcggaacggccgtcgtgactgcccaccgatacatgctggctcctgacgctcctggaaggcgccagcacgtccctggcgtaatggtcttactggtggatgagcctcttcgcggcgatatcttttcccccattagggaagcgcaggcctcagggctgaacgtggtgatgttgggcatggctggggcagatccagagcagctgcgcagactcgcccccgggatggacagcgttcagaccttcttcgctgtcgatgacggaccttcccttgaccaggctgtcagtggcttagccaccgctctgtgtcaagcatcatttactacgcagccgcggcccgaaccgtgtccagtatattgccccaaaggacagaaaggcgaacccggtgagatggggctgagaggacaagtcggtcctcccggcgatcccggattgcctggtagaactggggctcccggaccccagggacctccagggagcgcaacagctaaaggtgaacgaggcttccccggggccgacggcagaccaggcagccctggacgagcaggcaatcctggtacacccggcgcccccggcttgaaagggagccctggtctgccgggaccgagaggtgacccgggtgagaggggcccacggggccccaaaggggagcccggcgcccctgggcaggttattggcggcgaaggacccggcctgcctggaagaaaaggggatcccggcccgagcggccctcccggaccccgggggcccctcggtgatcctggccctaggggaccgccgggactgccagggaccgcaatgaagggggataaaggagataggggagaacgcgggcctcccggtcccggggagggcggcattgcccctggtgaacctggactgcctggcctgccaggctcccccggaccacagggccccgtgggcccccctggcaaaaaaggcgaaaagggcgatagtgaagatggcgctccaggactccccggccagcccgggtcgcctggcgaacagggcccacgaggaccccccggcgctattggcccaaagggcgatcgcgggtttccaggcccactcggcgaggccggcgagaagggtgagcggggtccacccggccctgcaggatcccggggattgccgggcgtggccggccgacctggggctaaaggcccagaggggccccctggccccaccgggcggcagggtgagaagggggagcctggacggcccggtgatcccgcggttgtcgggccggccgtcgccggaccaaagggagaaaagggagacgtcggacctgccggtcctagaggcgctaccggcgtgcaaggagaaagaggaccaccgggcctagtcctgcccggtgatcctggacccaaaggagatccaggggatagaggccccataggcctcaccggcagagctggcccaccaggggattcgggtcccccaggggaaaagggggaccccggccggcctggacctcctggtcctgtaggtccccgtgggcgcgatggagaagtcggcgaaaaaggcgacgaaggtccacccggtgacccgggccttcctggaaaagcgggcgaaagagggctgaggggagcccccggtgtacgaggaccagtgggggaaaaaggagaccagggagacccaggcgaggacgggcggaatgggtcacctggttcctctggccccaaaggagatcgtggtgagccaggaccacccggtccacccggccggttggtggacacaggccccggagctcgagagaagggcgaacccggcgataggggacaggaaggtccccgtgggcccaaaggcgatcccggccttcctggggcccctggggagcgtggtatcgaaggattccgcggcccccctggcccacagggcgatccaggcgtccgggggcctgctggcgaaaaaggcgaccggggccctccagggcttgacggtcgctcggggctggacggcaagcccggagccgcggggccctcaggaccaaatggcgccgcaggtaaggccggcgatcccggcagggatggactgccaggtctgcgaggagagcaggggctgccagggccttctggtccgcctgggctcccaggcaagcccggggaagacgggaagcctggcctgaacggcaaaaacggggagccgggcgaccccggagaagatggcagaaagggcgagaagggagattccggagctagtggccgagagggaagggatggcccgaaaggggaacgaggcgcacctgggattcttggcccacaggggccaccgggattgcccggacccgtaggcccacccgggcagggttttccaggcgtcccagggggcaccggacctaagggggacagaggggaaacaggctctaagggtgaacagggcttacccggcgagaggggacttagaggagaaccaggatctgtccccaacgtcgaccgcctgcttgagaccgcggggattaaggctagcgccctcagagaaattgtggaaacatgggacgagtcttctggcagtttcctgcccgtccccgaacgccgaagaggccctaaaggggattcgggcgagcagggccctcccggaaaggaagggccaattggcttccccggggagagaggactcaaaggagaccggggtgatcccggcccccaaggcccccctgggctggcactcggtgaacggggcccacccggaccctcagggctcgccggcgaacccggaaagcccggtatacctggcctgccagggcgggccggtggagtgggcgaagctgggaggcccggagaaagaggggagagaggcgagaagggggaacgcggggagcagggccgggacgggccgccaggactgccaggaacaccaggacctccagggcctccagggccaaaagtctccgtcgacgaacccggaccaggattgtccggagagcagggccccccagggttaaagggggcaaaaggagagcccgggagcaatggggaccaagggccgaagggggataggggcgttccaggcatcaaaggggacaggggggagccaggtccccgcgggcaggatgggaaccctggcctgcccggcgaacgggggatggcaggaccggaaggcaaacctggccttcagggtcctcgtggaccacctggacccgtgggagggcacggcgaccccggaccgcctggagcccctggactggccggccccgctggtccacaggggccgtccggcttgaaaggagagcctggtgaaacgggaccgcctggccgtggactgaccggtccaaccggggctgttggactgcctggacccccgggaccctcgggacttgtcggccctcagggctccccgggtctgcctggtcaggttggagagacaggcaagccaggggcccctggtagagacggggccagcggtaaagatggggacagagggtcacctggggttccaggctcccctggcttaccggggcccgttggccctaagggagaacccggcccaacaggagcaccggggcaggctgttgtaggccttcccggcgcaaaaggggagaaaggcgcccccgggggacttgccggagacttggtgggagaacctggcgcaaagggagatcgcggtctgcccggcccacggggcgagaaaggcgaggctggccgagcaggggaacccggggatccaggggaggatggtcagaagggtgcgccaggcccgaagggatttaaaggggatccaggagtaggagtgcccggaagcccaggaccaccagggccgcccggcgtgaaaggggacctcggtctccccggccttcccggagcccctggggtcgtgggttttcccggacagactggccccagaggggaaatgggtcagcctggtcccagcggcgagagaggcctggccggaccaccgggacgagaggggatcccaggccctcttggacccccaggcccacctggtagcgtcggcccgcctggcgcttctgggctgaagggagacaagggggatcccggcgtggggttgccaggcccccgcggcgagcgaggcgagcctgggattcgcggcgaagacgggcgacctggccaagaaggacctcgtggactcactggacccccgggtagcaggggagaacggggggaaaagggcgatgtggggagcgctgggctgaagggtgataaaggcgacagcgctgtcattctgggaccaccggggcccaggggcgctaagggcgacatgggggagagaggcccgcgcggtctggatggtgataaaggaccgaggggcgataatggcgaccctggcgacaaaggaagtaagggtgaaccaggcgacaagggatctgcgggtttacccggtcttcgtggcttgttagggcctcaagggcagcctggtgccgccggcatccctggcgatcctggatcccctggtaaggacggtgtgccgggcattaggggagagaagggagatgttgggttcatgggcccccggggcctgaagggggaaaggggcgtgaagggagcctgtggcctggatggcgagaaaggcgataagggagaggcaggcccgccaggtcgtcctgggctcgcgggccataaaggagaaatgggagaaccaggcgtccccggccagtcaggagcaccaggcaaggagggcttgataggccctaaaggggaccgcgggtttgatggacagcccgggccaaagggcgaccaaggggagaagggtgagagaggtactccagggatcggtggctttccaggacccagcgggaatgatggatccgctggcccccccggccctccgggctccgtgggccccaggggacctgaaggtctgcagggacagaagggggagaggggcccgccaggcgaacgggttgtcggagctccaggagtgcccggagcccccggagagcgtggcgagcaggggcggcctggcccagccggaccccggggggaaaagggggaagcagctctgactgaagacgatatcaggggttttgtgcgccaggagatgtcccagcactgcgcatgccagggacagttcatcgcaagcggctcccgccctctgcccagctacgctgccgataccgcaggatcccaactccacgccgtccccgtgctccgggtttcccacgcagaggaggaggagagagtgcccccagaggatgacgaatattcagagtatagcgagtactcagtcgaagagtatcaagacccggaagccccttgggactccgacgatccctgcagtctgcccctcgatgaagggtcctgtaccgcatataccctgcgctggtatcaccgggctgtcactgggtcgactgaggcatgccaccccttcgtttatggaggatgcgggggaaatgcaaatcggttcgggacccgtgaggcatgtgaacggcggtgccctcccagagtcgtccagtcccagggcactggcacagcacaggac

SEQ ID NO: 1439 - DNA, 8832 bp, Artificial Sequence
  derived and/or modified sequence
atgactctcaggttgttggtggcagccctttgcgccggaatcctggctgaggcaccgcgcgtcagggctcaacatcgcgaacgcgtcacctgtaccaggctctacgccgcggatattgtattcctgctggatggcagctcgtctatcggcagatcgaacttcagggaagtgagatctttcctggaaggattggtcctgccgttcagcggagctgcctcggcccagggggtccggtttgctactgtgcagtacagcgacgaccctcgcactgaattcggcctggatgcgctcggctcaggaggtgacgtgatacgcgcgattcgcgaacttagttacaagggaggcaataccaggaccggcgcagcgattctgcacgtcgccgatcatgtgtttcttccgcaactggcccgacccggtgtcccgaaagtgtgcatcttgattaccgatgggaagtcacaagacctggtggacaccgccgcccagaggctgaaaggtcagggagtcaagctgttcgcggtgggcattaagaacgcagatccggaagaactcaagcgggtggcgtcgcagcccacgtccgacttcttcttcttcgtgaacgacttttcgatccttcggactctcctcccactggtgtcgcgtagagtgtgcactactgccggaggcgttcctgtgacccggccgcctgacgactcgactagcgcacctcgggacctcgtcctgtccgagccgtcgtcccaatccctgcgcgtgcaatggactgcagcgtcaggtccggtgaccggatacaaggtgcaatacacgccgctgactggactgggacaaccactgccgagcgaacgccaggaggtgaatgtcccagccggagagactagtgtgagactgaggggacttcggccactgactgaataccaagtcactgtgatcgccctgtacgcgaactccattggagaggcggtttccggaactgcacggaccaccgctctggagggcccagagctgactatccaaaatactaccgcccactccctcctggtggcttggcggtcggtcccaggagccacgggttaccgcgtcacctggcgggtgctgtcgggtggtcctacccagcagcaagagttgggaccaggccagggctcagtgctcttgcgggatctggagccgggaacggattacgaagtgactgtttcaactctcttcgggaggtccgtgggaccggctacttccctcatggcaagaaccgacgcctcggtggagcagaccctgcggccagtgattctgggaccgacttcgattcttttgagctggaatctcgtgcccgaagccagaggctaccgcctggaatggagacgagagactggccttgagccgccccaaaaggtcgtgttgcctagcgatgtgactaggtaccagctcgacggactgcaaccgggcactgaataccgccttactctctacaccctcctggaaggacatgaagtggccacccccgcaactgtggtgccgaccggcccggaactgcccgtctctcccgtcaccgatctgcaggctaccgaactcccagggcagagggtgcgcgtctcatggtcgcctgtgccaggcgccacccaatatcgcatcatcgtccggtccactcaaggggtggagcgcactcttgtgctgcctggctcacaaaccgcatttgacctcgatgatgtgcaggctgggctctcgtacaccgtgcgcgtgagcgcgcgagtgggaccaagagaaggttcggccagcgtccttactgtgaggagagaaccggaaaccccgctggccgtgcctggccttagagtggtggtgtctgatgccacccgggtgagggtcgcctggggacccgtgcctggagcctcgggcttcagaatctcatggtcaactggtagcggtccagagtcgagccagacgctgccgccagactcaactgcaaccgacatcactgggctgcagcctggaacgacctaccaggtggccgtctccgttctgcgcggcagagaagagggcccagcagctgtgatcgttgcccgcaccgacccactgggaccagtgcggaccgtacatgtgacccaggcgtcatcgtcgtcggtgacgatcacttggacccgcgtaccgggcgccacgggttaccgggtatcatggcactcagcccatggtcctgagaagtcgcaactggtatcaggagaagcgaccgtcgcagagctggacggcctggaaccagacactgagtacaccgtgcatgtgcgggcccacgtggcgggtgtggatgggccgccggcgtccgtcgtggtgcgcactgcacccgaaccggtcggacgggtgtccaggctgcagatcctgaacgcctccagcgacgtcctgcgcatcacctgggtgggcgtcaccggtgccactgcctacaggctggcatggggaagaagcgagggtggaccaatgagacatcaaatcctcccgggaaacacggactcggcagaaatccggggactggaaggcggagtgagctactcggtccgggtgaccgcgctggtgggtgaccgggagggaactccggtgagcatcgtggtaactacccctccggaagcgccgcctgcactgggaaccctccacgtggtccagcgaggagagcattctctcaggttgcgctgggagcccgtccctcgggcacagggatttctcctgcactggcagcctgaaggcggccaggagcagtcacgggtcctgggacctgaactctcctcgtaccaccttgacggactcgaacctgcgactcagtacagagtgcgcctgtcggtgttggggccggccggagagggtccgtcagccgaagtgacggcgcggaccgagtcgccacgggtgccttcgatcgagctgcgggtcgtggatacttcgatcgactccgtcaccctggcgtggactccggtttccagggcaagctcctacatcctctcgtggcggcctctgaggggcccgggccaggaggtccctgggtcgcctcagactctccctggaatctcctccagccagcgggtgactggacttgaaccgggagtctcttacatcttctccctgacgcctgttctcgacggagtgcgcggaccggaagcgagcgtgacgcaaactccggtctgcccaagaggacttgcggacgttgtattcctcccgcacgccacccaggataacgctcatcgcgccgaggccacccgtagggtcctcgaacgcctcgtcctggccctcggaccactggggccgcaagcagtgcaagtgggtttgctctcatactcacaccgcccttcaccacttttcccattgaatgggtcacacgacttgggaattatcctgcaacgcatcagagatatgccttacatggacccaagcggaaacaatttgggaaccgctgtggtgacggcccacaggtacatgttggctcccgatgcgccgggccgccgacagcatgtgccaggggtgatggtgctcctggtggacgagccactgagaggcgacatcttctcaccgatccgcgaggctcaagcctcgggccttaacgtggtgatgctcggaatggcaggggccgacccggagcagctccgtaggctggcgcctggtatggattcggttcagaccttcttcgctgtggatgatggtcccagcttggaccaggccgtgtccggactggcaaccgcgctctgtcaggcctcctttaccactcaaccgcgcccggagccctgtccggtgtactgccccaaaggacagaagggagaacccggcgagatgggattgcggggacaggtgggaccgccgggcgacccgggcctccccggccgcaccggagcaccaggacctcaagggcccccggggtctgctaccgcgaaaggagaacggggattcccaggcgccgacggacggcccggaagcccgggaagagccggtaacccaggaactcctggcgcgccgggactcaagggaagcccgggactcccgggaccacgaggggacccgggagagcgcggaccgcgcggacctaagggagagccaggagccccagggcaggtgatcggcggagaaggacctggactcccaggaagaaaaggcgacccagggccctcgggtccaccgggaccgcgcggaccacttggcgatccgggaccacggggacctccgggactcccgggcactgcaatgaagggagataaaggggaccgcggcgaaagggggcctccgggaccaggagagggaggtatcgcgccgggagagccgggcctccctggattgcctggatcgcctggaccacagggaccggtgggcccgccgggaaagaagggagaaaagggagactcggaggatggggccccagggctcccaggtcagcctggttccccaggtgagcagggcccgcgcggacccccaggtgctatcggaccgaagggagacaggggattccccgggcctctcggcgaggccggagagaaaggtgaacggggaccaccgggccctgccggttcgagaggcctgcctggcgtggccggccggccgggggcaaagggtcctgaaggcccgcccggcccaacgggccggcaaggcgaaaagggcgaaccgggtcgcccgggggatcctgccgtcgtcggtccggcagttgccgggcccaaaggggagaagggggacgtcggaccggctggaccacgcggagctaccggggtccagggtgagaggggaccaccgggattggtgctgcctggggatccggggcccaaaggcgacccgggagatcgcggtcctatcggactgactggacgggctggcccaccaggtgactcgggcccgccaggtgagaagggagatccgggccggcccggaccgccaggtccggtcgggccacggggccgcgacggagaggtgggagagaaaggggacgaaggacccccgggggatccaggcctgcctggaaaggccggggaacgcggacttcggggtgcaccgggagtgcggggaccggtcggagaaaaaggggaccaaggagatccgggggaagatgggaggaacggaagccctggaagcagcggaccaaagggcgacagaggagagccgggacctccgggcccaccagggcgcctcgtggacactggaccgggcgcgcgcgaaaagggtgagccaggtgacagaggacaggaaggacccagagggccgaaaggagatccgggacttcccggagccccaggagaacgcggcattgaaggatttaggggaccccccggcccccagggcgatccaggcgtgcgcggccctgctggagaaaagggggatcgcggtccgccagggctcgatggcaggagcggactggatgggaagccgggggccgcgggcccgagcggcccgaacggcgccgccggcaaggcaggagatcctggacgagatggcctgccgggcctccgaggagaacagggactccctggcccgtccggcccgcccggcctccccggaaaacctggcgaggacggaaagcctggactgaatggtaaaaacggcgagcccggcgatcccggcgaagatgggcgaaagggcgagaagggggacagcggcgcctcgggacgggaaggacgcgacggccccaagggagaacgcggcgcgccaggaatcttgggaccccaagggccgccgggcctccctggaccagtgggaccgcctggccagggattcccgggggtgccaggaggcaccggaccgaagggtgacagaggagaaactggaagcaagggcgaacagggtttgcctggagaaaggggactccggggagaaccaggatccgtcccgaacgtggatcgcctgttggagactgcaggtatcaaagccagcgcactcagagaaatcgtggaaacctgggacgaatcgagcggcagcttcctcccggtcccagagagacggagagggccgaagggtgactccggtgagcagggacctccgggcaaggaaggtccaatcgggttccctggagaacgcggattgaaaggcgatagaggagatccaggaccacaaggcccgcctgggctggccctcggagaacgcggaccgccggggccgtcagggctggctggggagcccggaaagccgggaatcccgggactgcctggacgcgcaggaggagtgggggaagcgggcagaccgggtgagcggggagagcggggcgaaaaaggcgagcggggcgagcagggaagggatggaccaccaggacttcctggcactccgggtcctccgggaccgcccgggccgaaagtctccgtggacgaaccgggacccggactgtccggggagcaaggaccgccggggcttaagggagccaagggcgaacctgggtcaaacggagatcagggacccaagggcgaccggggagtcccaggcattaagggggaccgcggtgaaccaggcccgagaggccaggatggaaacccaggattgccgggagaacgggggatggctgggcctgaaggaaagccaggcctgcagggaccacgcggcccaccgggacccgtgggcgggcatggggatccgggaccgcccggagcgccgggtcttgcgggacctgccggcccacaggggccatccggactgaagggggagccgggcgaaaccggaccaccgggacgcgggctgactggccccaccggcgcagtgggactccccggtcctccggggccgtctgggctggttggaccacagggaagccccgggttgcctggacaggtgggtgagacgggaaaacctggagccccgggcagggacggcgcgtccggcaaggacggagatcggggctcccccggggtgccaggctccccaggactgccgggaccagtcggaccaaagggagaaccgggccccactggagcccctggacaagccgtggtgggacttcccggggccaagggagaaaaaggagcccctggaggactggctggagatctggtcggcgaaccgggagctaagggcgatcgcggattgccgggtccccggggggaaaagggcgaagcgggccgggccggcgaaccaggcgaccctggagaagatggacagaaaggtgcgccgggacctaaaggatttaagggtgaccctggtgtcggcgtcccaggatcgccgggcccgcccggcccaccgggtgtgaagggcgacctcggacttccgggattgccaggagcgccgggcgtcgtgggttttccgggtcagaccggaccgcgcggtgaaatgggacagccgggcccatctggcgagaggggcctcgctggcccacctggtcgcgaaggaattccaggaccgctcgggccgccgggcccacctggatctgttggacccccaggggcatcaggcctgaaaggagataagggcgaccccggagtcggactgccgggaccgcggggcgaacgcggagagccgggcatcagaggcgaagatggtcggccaggacaggaaggaccaagaggccttactggtccgccgggatccagaggagaacgcggagagaagggggatgtgggatcagcgggtctgaaaggcgacaagggggactccgccgtgatcctcggtccaccaggaccgcggggagcgaaaggtgatatgggggagcgcggaccaaggggtctggacggggacaagggaccacgcggggataatggtgatccgggggacaagggctcaaaaggagaaccgggagacaagggctccgcaggactcccgggtctgcgggggctgctgggaccgcaaggccagccgggagctgcgggtatccccggtgacccgggatccccgggaaaagatggggtccctggcatccggggtgagaagggagacgtggggttcatgggaccgaggggacttaagggagaacgcggagtgaagggggcgtgcggactggacggggaaaagggcgacaagggagaggctggtccacccggacggcctggactggctggacacaaaggtgagatgggagaaccgggagtgccgggacaaagtggtgcaccaggcaaggaaggcctgataggacctaagggtgatcgggggttcgacggtcaaccgggacccaagggtgatcagggggaaaagggcgagcgagggaccccgggaatcggaggtttcccaggtccttccggcaatgatggcagcgcaggccctcctggaccccctgggtccgtgggcccacgcggcccggagggactccaggggcagaagggtgagcgggggccgcctggagagcgcgttgtaggagcaccgggggtgccgggagcgccaggagaacggggagagcaagggaggccaggaccggcgggaccgagaggcgaaaaaggcgaggcagcgctgaccgaggacgacatcaggggctttgtccgccaagagatgtcgcagcactgcgcctgccaggggcaattcatcgcgagcggatctcgcccgctgccttcgtatgcggccgatactgcaggctctcaactgcacgctgttccagtgctgagggtgtcacacgccgaagaagaagagcgtgtccctccggaagatgacgaatatagcgagtacagcgaatacagcgtggaagaataccaagatccggaggcaccctgggattcggacgatccgtgcagcctgccgctcgatgagggatcatgcaccgcatacaccctccgctggtaccatagagccgtcactggatcgaccgaggcatgtcatccattcgtgtatggaggttgtggaggaaacgccaatagattcggaactagagaagcgtgcgagaggcgctgcccgccgcgcgtggttcagtcacaaggaaccggaaccgcccaggat

SEQ ID NO: 1440 - DNA, 8832 bp, Artificial Sequence
  derived and/or modified sequence
atgacccttcggctgctggtggccgcactgtgcgctggcatcctggccgaagcccccagagttcgagcccagcatcgcgagcgtgtcacatgcacaaggttgtacgcggcggacatcgtgttcctgctcgatgggtccagctccatcgggcggtcgaacttccgggaagtgcgtagttttctggaaggtctggtactgccattcagtggcgctgcgagtgcccagggcgtgaggttcgctaccgttcagtattctgacgatccgaggacagagtttgggctcgatgccctgggctctggtggcgacgtgattagggccatccgagagcttagttataaaggggggaacacccggacaggtgcagccatcctgcacgtagctgatcacgttttcctcccgcagctggcccggcctggcgtacccaaggtctgcatcctgataaccgatggaaagtctcaggatctggttgacacagcagcacagcgcctgaagggacagggggtcaaactctttgcagtggggatcaagaatgcagatcccgaggagttaaagcgggtcgccagccagccaacaagcgatttcttttttttcgtaaatgatttttccattttgaggacacttttgccgctggtgagcaggagggtctgtaccacagcaggcggggtccctgtcactcgtccacctgatgacagcacaagcgcgccccgcgacttggtgctctctgagccatcttctcagagtctgcgtgttcagtggaccgccgcatccggccctgtgacaggatacaaggttcagtacacacctttgactggcctggggcagcccttgccttcagaacggcaggaggtgaacgtgcccgctggtgaaacatccgtgaggttaagaggattgcgtcccctgaccgagtaccaggtcacagtgatcgctttatacgctaattccatcggcgaggctgtgagtggtacagcccggactaccgcactggagggccccgagctgacaattcagaacaccacagctcacagcctcctggtggcttggcggagcgtacccggcgctacagggtatcgcgtcacctggagggtactttctggaggaccgacccagcaacaagagctgggtcctggacagggctctgttctcctgcgggacctggagccaggcaccgattatgaagttaccgtcagtactctcttcggcagatcggtcggaccagcaacatcgttgatggccaggactgacgcgtccgtagaacaaactctgaggcccgttatcttgggacccacgtcgattcttctttcatggaatcttgtgccagaagctcgtggctaccgactggagtggcggagggagaccggtctggagcctcctcaaaaagtcgtcctgccttccgatgtgaccaggtaccaactagatggacttcagcctggaacagagtaccgcctcacattatataccttgctggagggtcatgaggtggccacgcctgccaccgtcgtgcctaccggacctgagctgcctgtgtcccccgttacagatctgcaggccacggaattgcccggccagagagttcgggtgagttggtcccccgtcccaggggctactcaatacaggattatcgttagaagcacgcagggagttgaacgcacgttggtactgcctggttcccagactgcgttcgatctcgatgacgtccaggcaggcctgagctacacagttcgagttagcgctagggtgggaccaagggaaggttcggcgagtgtgctgacggtgaggcgggagcctgagacaccgttagctgtgccaggcctgcgcgtggtagtatctgacgccacacgcgtaagggtggcatggggacccgttcctggcgccagcggtttcaggatttcctggagtactggttcaggccctgaatccagccaaacactgcctccagatagcactgcaacagacataacggggttgcagccaggaacaacctaccaggtagcagtctcggtcctgcgcggcagggaggaaggtcccgctgcggtgattgtggcaagaacagatcctctgggtcccgtgaggaccgtacacgtgacacaggccagtagctcctccgtaacgatcacgtggacgcgagtgccaggggcgaccggctacagggtgagttggcattcagcccacggccccgagaaaagccaactcgtctccggggaggctactgtcgcagaactggacgggctcgagcctgataccgagtacactgtacatgtgcgggcccatgtggcaggagtggatggacctccagcgagcgttgtggtgcgaaccgcgcctgagcctgtgggtagggtgtcaaggctgcagattctaaacgcgtctagtgacgtgctgcggatcacatgggtgggggtgaccggagccacggcttatcgactcgcctggggacggagcgaagggggcccaatgcgacaccagatcttgcctggaaacaccgactctgcagaaatcaggggcttagagggcggagtctcttatagcgtgcgcgtcaccgctcttgtcggggaccgcgaaggcacccccgtgtcgattgtagtcaccacacccccagaagcccccccagccctcggtaccttgcatgtcgttcagagaggggagcacagcctgcgcttgcgttgggagcccgtgccgcgggctcaaggcttcctgcttcattggcagcccgaggggggacaggagcaatcccgtgtcctcgggccagagctgtccagttatcatctggacggtctcgaacccgctactcagtacagggtgcgcctgtccgtcctcggtccggcaggggagggcccatctgcggaggtcacggcccgtacagagtcacctcgagtgccaagtattgaactccgtgtcgttgatacctcaatagattcagtgacacttgcatggacccctgtcagccgagcatcctcttatatcctgtcctggcggcctctgaggggtcctggccaagaagtcccaggctccccccagaccctgcctggtatatcatcttcccagcgtgtgactggacttgagcccggcgtctcatatatattttctttgacgcctgtgctagatggggtgaggggcccagaggcaagcgtaacacagacaccggtgtgtccacgaggcctggccgacgtggtcttcctcccacacgccacccaggacaacgcgcacagggctgaagctactcgcagggtgctggaacgcctggtgttggctctggggcccctgggcccgcaagctgtacaggtggggttgctttcttacagccaccgccccagtccattattcccgctgaatgggtctcacgatttgggtataattctgcagcgaatcagggacatgccctacatggatccgtcgggtaataatctggggacagcagtggtcaccgcacataggtacatgcttgcgcccgatgcccccgggaggcgccagcacgtgcccggagttatggtcttgcttgtggatgagcctctaaggggcgatattttttctcctatccgggaagctcaagcatcgggcttgaacgtggtgatgctgggcatggcaggcgcagacccagagcagcttcgacggctggctcccgggatggactctgtacagaccttctttgcggtggacgatggtccctcactggatcaggctgtgtccggtctggccaccgcgctgtgtcaggcgtccttcacaacccagccccgaccagaaccctgtccagtttattgccccaaaggtcaaaagggtgagcccggagagatgggactgcgagggcaagtgggccctccaggagaccccggactcccgggacggacaggggccccgggaccacagggtccccctgggtcagccacagcgaaaggggaaagagggtttccaggagcagatggaagacctggcagtccaggtcgggccgggaatcctggcacacctggcgcaccaggattgaagggatctccaggcctcccaggaccaagaggtgacccaggtgagcgtggccctagaggacccaaaggtgaacctggcgcacccgggcaggtgatcggtggggaagggcccgggctgcccggcagaaagggggatccgggcccctccggtccccccgggcctcggggtcccttgggcgatccaggcccacgtggaccccctgggctgccaggcacagcgatgaagggtgacaagggagaccgaggggaacgcgggcccccaggccccggggagggcgggattgcacccggtgagcctgggcttcctgggctgcccgggagccccggtccacagggtccggtcggtccgcctggtaaaaagggtgaaaagggagattccgaagacggggcacctggattgcctggccagcccggcagtcccggcgaacagggtccacgtggaccccccggcgcgatcggtccaaagggcgataggggcttcccaggacccctcggcgaggccggcgagaaaggagagcgtggaccacctgggccagccggatctcgcggactcccaggtgtggccggcagacccggcgcgaagggccctgaggggccgcccggaccaacagggcggcagggcgagaagggcgagcctggacggccaggcgatcctgctgtggtgggccccgccgtagcgggccctaagggggaaaaaggagacgttggcccagcgggaccccggggagccactggtgtgcagggcgaaagggggccacccggtctggtgttgcccggagacccaggtcccaagggggacccgggcgatcgcgggcccatcggactgacaggacgcgccggtcctcccggcgattctgggcctcccggtgagaaaggagacccgggtcgtccaggaccacctggccccgtgggtcccagggggcgggacggcgaagtgggcgagaagggggacgaggggcccccaggcgatccaggtttgcctgggaaggcaggcgaaagaggtctacgcggcgccccaggggtgagaggaccagtcggcgagaagggagatcagggggatccaggggaggatgggaggaatgggagtccgggctcaagcggtcctaagggggataggggggagccagggcccccaggaccgcctggtcgactggtcgatacagggcctggggcccgggagaagggggagcccggagacagagggcaggagggccccaggggccccaagggcgacccgggactcccaggggccccgggagaaagggggatcgagggctttcggggacctcccggtcctcaaggtgacccaggagtccgcggacctgctggggaaaaaggagacagaggacccccgggccttgacgggagaagcggcctggacggcaagcccggagcagcaggcccaagcggtccgaatggagccgcaggcaaggctggagatcccggccgggacggactgcctggactcaggggtgaacagggcctgccagggccatctggacctcccgggcttcccggaaagcccggcgaagacgggaagcccggactgaatggaaaaaacggagagccgggtgaccccggggaagacggacgcaagggggagaagggggacagcggagcctccggacgggaggggcgggacgggcctaaaggcgaacgtggtgcaccaggcatcttgggtccgcagggcccgccaggactgccaggaccagtgggcccacccggccagggcttcccaggagtgccgggcgggaccggtccgaaaggcgatcgcggcgagacaggaagcaagggggagcaggggctgcccggagaacgcgggctgcgaggggaaccgggctccgtgcccaacgttgatcggctcttggaaactgctggaattaaggcaagtgcactccgagaaattgtggagacctgggatgagtcatctggctcctttctgcctgttccagagaggagacgtggcccgaaaggcgattcgggggaacaagggccccctggaaaagaaggccccattggcttccccggggagaggggactcaagggcgatcgaggggatccgggccctcagggccccccgggactggctctgggcgaaagggggccccccgggcccagtgggctggccggggaacctggtaagcccggcattcctggtctgcccggacgcgccggaggggtgggcgaggcaggtcgacctggtgagcggggagagcgtggagaaaaaggtgagaggggtgagcagggccgtgatgggccccctggtctgccgggcacacctggtccacccggtcctcctggacctaaggtcagcgtggatgagccgggccctggtctgagcggcgaacaggggccaccgggtctcaaaggcgcaaagggagaacctggcagcaacggagaccagggtcccaaaggtgatagaggggtgcccggcattaagggagatagaggcgaaccaggtccaaggggtcaggacggaaaccccggtctccctggcgaaagaggcatggcgggccccgagggaaaaccgggtcttcagggcccccggggaccacccggccctgtgggcggccatggcgacccaggccctcctggcgcccccgggctggctgggccagcggggccacagggtcctagtggtctcaagggggagcccggggaaaccgggccacccggccgcggtttgacaggaccaacaggtgccgtcggtctgcccggtccccccggacctagcggattggtaggaccacagggctcacccggtctccccggtcaggttggtgagacaggaaagcccggtgctcccggcagggatggagcgtctgggaaggacggcgacagaggatcccctggggttcctgggagcccaggcctgccgggccccgtcggccctaagggggagccaggaccaacaggggctccagggcaggcagtggtcggcttgccaggcgccaagggcgagaagggcgctcccggcgggcttgccggcgacctggtgggtgagccgggcgccaagggggacaggggccttcccggccctagaggagagaagggggaggcaggacgagctggcgagcccggagatcctggcgaggacggacagaaaggggcccctggcccaaaaggttttaaaggtgacccaggcgttggagtgccaggcagccccgggccaccagggccccccggggtgaagggtgatctgggcctccccggattgcccggcgctcccggcgttgttgggtttccaggacagactggaccacgaggtgagatgggtcagcccgggccctccggtgaacgggggcttgcgggcccaccagggcgggagggcattccaggccctctgggcccacctgggccccccggctcagtgggaccaccaggtgcctccggcttgaagggggataagggtgacccgggcgtcgggcttcctgggccaagaggcgaaagaggagaacccggaatcagaggagaggacggaagacccggccaggaaggaccccgcggcctgacagggccaccaggatcccggggcgaacggggcgaaaaaggggacgttgggtctgctggattaaaaggggataagggcgactctgctgtcattcttggacctcccggcccaagaggcgcgaagggtgatatgggggagcggggtcctaggggcttagacggtgacaaggggccccgcggcgacaacggagatccaggagataaggggtccaagggcgaacctggcgataaggggagcgccgggctccctggtttgagaggacttctagggcctcagggccagccaggcgctgccggtattcccggcgaccctgggagtcccgggaaagacggggtgcctggcattcggggtgagaagggagatgtaggattcatgggaccacggggcctgaaaggcgaaagaggtgttaaaggagcctgcggactcgacggggaaaaaggggacaaaggcgaagccggaccccccggacgccctgggctggccggccataagggcgaaatgggagagcccggcgtgcccggccagagcggggccccaggcaaggaggggttaatcggccccaagggcgataggggatttgatggccagccaggcccaaagggcgatcagggggagaaaggggaaagaggcactcctggaatcggaggctttcccggaccaagcggaaacgacggttctgctggtcctcccgggccacctggctctgtgggcccaagaggacccgagggcctgcaggggcagaagggtgaacgcggacctcctggtgagagggtggttggcgcccccggtgtccctggcgctcctggtgagcgaggagagcaggggcggcccggacctgcgggccctcggggtgagaagggggaagctgcactgaccgaagatgacattagaggatttgtgagacaggagatgtcccagcattgtgcctgccaggggcagttcatcgccagcggctcccgcccacttccgtcttacgcagccgacaccgctggcagccagcttcacgctgtgccagtgctccgcgtgagtcacgctgaagaagaggagagagtgccccctgaggacgatgaatattctgagtactccgaatattctgttgaggaatatcaggatcccgaagccccatgggactccgatgacccatgcagtctgccgttagacgaagggagctgcaccgcttacacccttaggtggtatcatagagcagttaccggatcgacggaggcatgccacccttttgtatacgggggctgcggtggcaacgcaaacaggttcggtacacgcgaggcctgtgagcgcagatgccccccacgggtggtacagtcccagggaaccggcactgcccaggac

SEQ ID NO: 1441 - DNA, 8832 bp, Artificial Sequence
  derived and/or modified sequence
atgaccctgcgtctccttgttgcagccctttgtgccggcatcctcgcagaggcaccacgcgtgcgcgctcagcacagagagagggtcacttgtaccagactctacgcagcagacattgtgttcctgctcgacgggtcctcgtccatcgggagatcgaacttcagagaagtgcgttcatttcttgaaggcctcgtccttccgttttctggagcagcaagcgcgcagggagtgcgatttgcgaccgtgcagtactcagatgacccccggaccgaatttggactggacgccctggggtcaggaggtgacgtgattcgggcgatccgggaactcagttataagggcggtaatactagaaccggagcagcaattcttcatgtggcggatcacgtgtttctcccacaactggcacggcctggagtgcccaaagtgtgtattttgattactgatgggaaatcccaggatctcgtggacaccgcggcacaaagacttaaagggcaaggtgtgaagctctttgcagtcggaataaagaatgcagaccctgaagaacttaagcgcgtcgcctcgcaaccgacgtccgatttcttcttctttgtgaacgatttttccattcttagaactcttctgcctctggtcagcagaagagtgtgcaccactgcgggcggggttccagtcactaggccccccgatgattcgacctcggcaccacgagatcttgtgctgagcgagccttcgtcccaatcactgagagtccaatggactgcagcatcaggtcctgtgaccggatacaaggtccaatacactcccttgaccggtttgggccagccgcttccatcagagcggcaagaggtgaacgtcccggcaggtgagacgtccgtgcggctgagaggcctgcgtccacttactgaataccaggtgactgtgatagccctttatgcaaactctatcggtgaagccgtgtcgggaactgcccgcactaccgccctggagggcccagagctcaccattcaaaacactaccgcacattcacttctggtggcatggcgctcggtccctggagctactggctacagagtcacttggcgggtgctgtcaggagggccgactcagcaacaagaactgggaccaggtcagggttcggtgcttcttagagatctggagcctgggactgattacgaggtgaccgtgtcgacgctttttgggaggtctgttggaccggccaccagcctcatggcccgtaccgatgcatccgtcgaacaaactcttagacctgtgattctgggacctaccagcatactcctttcctggaatctcgtccctgaggcacgcggatacagacttgagtggcgccgtgaaaccggtttggagccacctcagaaggtcgtgctgccttccgatgtcacgcggtaccaactggatggtctgcagcctggaaccgaataccgcctgaccctgtacactctccttgaagggcatgaggtggccacccccgctactgtggtgccgactggtcccgagctgcctgtctcgccggttaccgacttgcaggcaaccgagcttcctgggcagcgcgtcagggtgtcctggtcccctgtgcccggtgcgactcaataccgaatcattgtgcgctcgactcaaggcgtggaacgcaccctggtgctgccgggatcacagactgcgttcgatcttgatgatgttcaggccgggctttcgtacaccgtcagggtttcggcccgagttggaccaagagaaggcagcgccagcgtgctcaccgtgcgaagagaacctgagactccgttggcagttcctggccttcgggttgtggtatcagatgcaacgagggtgcgggtggcctgggggccagtccctggtgcatccggctttagaatctcgtggtctaccgggtcgggaccagaaagctcgcagactctgcctccagattcaaccgctaccgatattactggactgcaaccaggaaccacttaccaagtggcagtgtccgtgcttcgtggtagggaggaagggcccgcggccgtgatcgtggcaagaaccgatcccttgggaccagtgaggaccgtgcatgtgactcaggcgtcctccagctcggtgactatcacttggacccgagtgccaggtgcgaccgggtacagagtctcgtggcattccgcccatggtcctgaaaagtcccagctggtgtcaggagaagcgacggtggcagaactcgatggattggaacccgataccgaatacactgtgcacgtgagggcacatgtcgcaggtgtcgatggtccgcccgccagcgtggtggtccgcaccgcgccagaacccgtgggaagagtttcaagactgcagatattgaatgcgagctctgacgtccttcgcataacttgggtgggtgtgactggcgcaaccgcgtaccgtcttgcatggggacggtcggagggtgggcctatgcgacaccagatccttcccggaaacacggatagcgcagagattcgcgggctggaaggtggtgtttcatattcagtgagagtcaccgcattggtgggtgaccgggaaggcacccccgtgtccattgtggtcacgacgccaccagaggcccctccagcgcttggaacgctccacgtggtccaaaggggtgagcattccttgcgactgcgatgggagcctgtgccacgcgcacaaggcttcctgcttcactggcagccagagggaggacaggagcagagccgggtgctgggtccggaactgtcatcctaccatttggacggcctggagccagccactcagtacagggtcagacttagcgtgttgggacctgcaggagaagggccttcagctgaagtgacggcccggaccgagagccctagggtcccttcgattgagctccgcgtggttgatacttcgattgattccgtgacccttgcatggactcctgtctcgagagcttcctcatacattttgtcctggcgtccgctgagagggcccggacaagaagtccctggctctcctcaaacgctgcctggaatctcgtcatcgcagagagtcaccgggcttgaaccaggcgtgtcatatatcttctcgcttacgcctgtgctggatggtgtgagagggccagaagcctcggtgacgcaaaccccagtgtgtccccgaggactggcagatgtggtgttccttccacatgccactcaggacaacgcgcatagggctgaggcaaccaggcgggtgcttgaacggctcgtcttggcacttgggcctttgggaccacaggcagtccaggttggactgctctcgtactctcatagacccagcccgctgtttcctctgaacggatcacacgatttgggaattatcctgcaacgtatcagagatatgccttacatggacccgtccggaaataacctcgggaccgcagtggtgaccgcacatagatacatgctggccccagatgcacctggtcgcagacagcacgtcccaggagttatggtgctgctggtggatgaacctctcagaggtgacatattcagccccatcagggaagcacaggccagcggacttaacgtggtgatgcttggaatggccggagccgatccagaacaacttagacggctcgcgccaggaatggattcggtgcagacgttctttgcggtggatgatggcccatcactcgatcaagcagtgagcggcctggcaaccgcactctgtcaagcctccttcactacgcagcccaggccggaaccctgtccagtgtactgtcctaagggtcaaaagggagagcctggcgagatgggactccgggggcaggtgggtccccccggcgaccccgggcttcctggaagaaccggagccccaggtcctcagggccctccaggaagcgccactgccaagggtgaacgtggttttcctggtgcggatggtcgaccagggtcaccgggcagagcaggaaacccggggacccctggagcccccggtctgaagggatcccctggactgcctgggccaaggggagatcctggcgaaagagggcctaggggaccaaaaggagaacccggtgcacctggccaggtcattggaggtgaaggtccgggactgcctgggaggaagggagatcctgggccatcgggaccgcccggacctagaggtcctctcggagatcctggcccccgcgggcctcctggccttccaggtaccgccatgaaaggtgataagggggaccgcggcgaacggggaccccctggcccaggggaaggagggatcgcaccaggggaacctggactgcccggactccctggatccccaggacctcaaggaccggtgggcccccctgggaaaaaaggagaaaagggtgactcggaggacggtgcaccaggcctgccaggccagccaggcagccctggtgaacagggacccagaggtccccccggtgcaattggacccaaaggtgataggggttttccaggacctctcggggaggcaggggagaaaggagagagagggccacctgggcctgccggctcaagaggactccctggagtcgctggtagaccgggtgcaaaggggcccgagggaccacctggaccaactggacggcagggagaaaagggagaacctggtcgccccggtgatccggcagtcgtggggcccgcagtggcaggtcccaagggcgagaagggtgacgtgggacccgcaggcccaagaggagctactggagtgcaaggggaaaggggaccgcccggactggtgcttccaggggatccaggacctaagggcgatccaggagatagaggccctatcggtcttaccgggcgagccggacctcctggggacagcggcccacctggagaaaaaggagatcctggcagacctggcccaccaggacctgtggggccccggggtcgtgatggagaggtcggcgaaaagggggacgagggaccacctggtgaccccggactgccaggtaaggcaggcgaacgtgggctgcggggcgcacccggagtgcgaggacctgtgggtgagaaaggggatcaaggagatcctggagaagatgggcgcaatggttcgcctggaagctcgggccctaagggtgatcggggggagcccgggcctccaggtccgcctggtcgccttgtcgatactggtccaggggcaagagagaagggggaaccaggagatcgcgggcaggagggcccaagaggtcctaagggagatcccggcctccctggggcgcctggagaacggggaattgaagggtttagagggcctccggggccgcaaggagatcccggagtgcgcggccccgcgggagagaaaggcgatcgtggaccaccaggacttgatggtcggtcgggtctggatggaaagcctggcgcagctggaccatccggtccaaatggcgctgcagggaaggccggagatccaggaagagacgggctgccaggtctgagaggtgagcaaggacttccaggaccgtccggcccgccagggcttcctggcaagcccggtgaagatggcaagcctggactcaacgggaagaacggagagcccggtgaccctggtgaggacggacgtaagggagaaaaaggggatagcggtgctagcggacgcgaaggacgagatggtccaaagggcgagcggggagcacctggtattctgggaccccagggacctcctgggcttccgggtcccgtcgggccgccagggcagggattcccgggcgtccccggggggaccggaccgaaaggagatagaggtgaaactgggtccaaaggagaacaaggtctgcccggtgagcgtggacttcggggagagccaggttccgtcccaaacgtcgaccgactgcttgaaactgccggaatcaaggcctccgcattgcgggaaattgtggaaacctgggacgaaagcagcgggtcgttcctcccagtccctgaacggaggaggggacctaagggagactcgggtgagcaaggcccacctggcaaagaaggacctataggatttcctggtgaacggggcctcaagggagatcgaggagatccggggccgcaaggtcctcctggactggccctcggagaacggggccctccaggaccatcgggtcttgccggtgagcctgggaagcctggaatccctggcctgcctggtagggccggaggagtgggggaagcaggtagaccgggcgaaagaggagagcggggggaaaagggagaacgtggagaacaaggacgtgacggtccccctggactgcctggcactcctggcccacctggacctccaggccctaaggtgtcggtggacgagcctgggcccggtctgtcgggagaacaaggacccccaggtctgaagggcgcaaagggagaacctggttcgaacggcgaccagggaccaaagggggaccgtggagtgcccgggatcaaaggggataggggtgagcctggacctcggggccaagatggaaaccctggattgcctggagaacgcggcatggctggaccggaaggaaagcctggccttcaggggcctcgtggtccccctggaccagtcggtggacacggagatcctggacctcctggcgcaccaggtctggcaggacctgcaggccctcaaggaccttcaggtttgaagggagaacctggcgaaaccggcccacccggacgtggactgacgggaccaaccggagcagtcggacttcccgggcctccgggacctagcggactggtggggccacagggaagtcctggattgccaggacaggtgggagagactggtaagcctggtgcaccaggacgggatggggcgtcgggaaaggacggcgatcgtggatcgccaggagtgcctggatccccaggactgcccggccctgtcggtcccaagggagaacccggccctactggagctcctggacaagccgtggtgggtttgccaggtgccaaaggagaaaagggagcaccaggagggctggccggtgaccttgtcggggagcctggagccaaaggagatagagggctcccagggcccagaggagaaaaaggtgaggcaggaagagcaggtgagccaggagatcccggtgaagatggtcaaaagggggcacctggacctaagggatttaagggcgaccctggtgtgggcgtgcctggtagccctggcccgccaggtccaccgggagtgaagggggatctgggtctgcctggactgcctggtgccccaggtgtggtgggattcccgggtcagaccggacctagaggagagatgggacaacctggaccgagcggagaaagaggtctggccggaccccctggtagagaaggtatcccgggtccattgggaccacctggacctcctggtagcgtgggaccaccaggtgcatcaggcctcaaaggggacaaaggagatcctggagtgggtctgcctggacctcgcggcgaacgcggagaacccggtatccgtggagaagatggacggcccggacaggaaggcccgaggggtttgacgggtccacctggatcccgaggagaaagaggtgaaaaaggggatgtcggcagcgcaggtctgaagggagataaaggagactccgcagtgatccttggtcccccaggacctaggggtgctaagggagacatgggagaacgcggtcctcggggacttgatggagataagggccctaggggtgacaacggggatcctggagataaaggatccaagggagaacctggggataaaggaagcgcaggacttccaggactgaggggcctgctcggacctcagggacagcccggagcagcggggattccaggtgatccgggatccccaggcaaggacggagttccagggattagaggagagaagggtgatgtcggattcatgggaccacgcggcttgaaaggcgaacgtggagtgaagggagcttgtggcctggatggagaaaagggtgataagggtgaagccggtccacccgggcggcccggcctggcgggtcacaagggggagatgggcgaaccaggcgtccctggacaatcaggggctcctggtaaggaaggcctgatcggtcctaaaggcgaccgtggcttcgacggacaacccggacctaaaggagatcaaggagaaaagggagaacgaggtaccccagggattggcggttttcccggcccttcgggcaacgatgggtcggcagggcctcctggaccgcctgggagcgtgggacctcgtggtcccgagggccttcaaggtcaaaagggtgaacgcggacccccgggcgaacgagtggttggtgcacctggtgtgcctggggcaccaggagagagaggagaacagggccgcccaggacctgcgggaccacgcggcgaaaaaggtgaagcagcacttaccgaggacgatatccgcggctttgtcagacaggaaatgtcccagcattgcgcctgtcagggtcagtttattgcaagcgggtcccgtccattgccatcttacgctgcagacactgctggcagtcaacttcatgccgtgcctgtgttgcgagtgtcccatgcagaagaggaagagagagtgccgccagaagatgacgaatactcggaatactccgagtacagcgtggaagagtaccaggaccctgaagcaccctgggattccgatgatccttgcagtctcccactggatgaaggatcgtgtactgcatacactttgcggtggtaccatagagcagtgaccggttcgactgaggcatgccatccattcgtgtacgggggatgtggaggaaacgcaaatagattcggtacgcgagaggcgtgcgaaaggaggtgcccaccgagagtggtgcagagccagggcaccggaaccgcgcaggat

SEQ ID NO: 1442 - DNA, 8832 bp, Artificial Sequence
  derived and/or modified sequence
atgaccctgaggctccttgtcgcggccctatgtgccgggattttggccgaagcacctagagtgagggcccagcatagagagagagtaacctgtacccgactgtatgcagcggatatcgtgtttctcctggacgggagttcttctattggccgttctaacttcagagaagtgcgttcatttctggagggacttgtgttgccgttctctggggcagccagcgctcaaggcgtgcgctttgccaccgtccagtattctgacgaccccaggaccgaattcggtctagacgcattggggtccggcggtgacgtcattcgtgcaatcagggagctaagttataaggggggtaataccaggactggagctgcgatactgcacgtggccgaccatgtgttcctccctcaactagcacgacccggcgtccccaaagtgtgcattttgattactgatgggaagagccaggatttggtggatacggctgctcagaggttaaaggggcagggcgtgaaactgttcgcagtgggtattaagaacgccgatccagaggagctcaagcgcgttgcgtcccagcctaccagcgactttttcttcttcgtgaatgattttagcatattgagaacactcctaccactcgtctcccgacgggtgtgtactacagctggaggagtgcccgtgacccggcctcccgatgactcgacatccgctcctagagatctcgttctgtcagaaccaagcagtcaatccctgcgggtgcagtggacagctgccagcgggcccgtaactggctataaagtgcagtataccccattgactgggctgggtcagccccttccatcagaacgacaggaggtgaatgtgccagccggagaaactagcgttcgactgagaggtctccgaccactgaccgaatatcaggtgactgtgatcgccttgtatgctaatagcattggagaagccgtctccggcactgccagaactacagctttagaaggacctgagctgaccattcagaatacaaccgcgcacagcctactggtggcatggagatctgtccctggagccactggttatagggtaacttggcgagttctgagtggcggtccaacacagcagcaggagctcggaccgggacaggggtctgtcctgcttagagacttagagcccgggacggactacgaggtaaccgttagcactctctttggcaggtccgtagggcctgccactagcctcatggccaggactgacgccagcgttgagcagacccttaggcccgttatcttggggcctaccagcattctgctgtcctggaaccttgtacctgaggccagggggtatagactggagtggagacgtgagaccgggctggaaccaccgcagaaggtggttctcccatctgacgtcacacgataccagctggacggcttacaacccggcactgaataccgactgaccctttataccttgctggagggtcacgaggtggctacccctgccaccgtggttcccacagggccagaacttccagtctccccggttaccgacttgcaggcaactgagctgccaggtcagagagtcagagtgagttggtcccccgtccctggagccacacagtatcgaatcatcgtgagaagcactcagggcgtagaaaggactttggtgctaccagggtcccaaaccgcctttgacctggatgacgtccaagctggtcttagctatacggttcgcgtatcagctcgagtaggccctcgagagggatccgcgtctgtcctcactgtgcgtcgagaaccggagacccctctcgccgtgccgggcctgagagtggttgtgagcgatgctaccagggtgcgagtggcttggggcccagttcctggtgcctcgggttttcgaatttcgtggtctaccggaagcggaccagagtcctctcaaaccctgcccccggactcgaccgcgactgacatcacaggtctgcagcctggaacaacatatcaggtggcagtgtccgtattgcgaggacgggaagagggccctgcggccgtgatcgtagcaaggacagatccactagggccggtgcgtacggtgcacgtgacgcaggcttcgtctagctccgtgacaattacctggacacgggtccccggtgccactggatacagagtgtcatggcactccgcccacggacccgaaaagagtcaattggtgtctggtgaagccacagtcgccgagctcgatgggttggagccagacaccgagtacaccgtgcatgtgcgcgcccatgtggctggcgttgatggcccccctgcgagcgtggtcgtgcgaaccgccccggaacccgttggacgtgtgtcaaggctgcagatcctcaacgccagtagtgacgtgcttaggatcacttgggtgggtgtgactggcgctacggcttatcgactggcatggggccgatccgagggtggaccaatgcgacatcaaatcttacccgggaataccgattcagccgagatccgagggcttgaaggaggcgtgtcatatagcgtgagggtaaccgccttagttggagaccgagaaggaacgccagtctctattgtcgtgacgacaccccccgaggccccgccagccctcgggacactacatgtggtccagcgtggcgaacactccctgagattgaggtgggaacccgttccacgcgctcagggattccttctgcactggcagccagaaggagggcaggaacagtctcgagtgctcggcccagagctctccagttaccacttggacggactggagccggctacgcaatacagagtccgactcagcgttctcggacctgccggcgaagggccttctgctgaagtaaccgccaggacagaatccccccgtgttccctctatagagcttcgagtggtcgataccagtatagattctgtcaccctggcctggacccccgtttccagggcctcgagctatattttgtcttggagacccctgcgggggcctgggcaagaggtccccgggtcgccacagacgctccccggtatttcatcctcccaaagagttaccggtctggagcccggtgtgtcatatatcttctcgctgacgccagtactggacggtgtgagaggcccggaagcttccgttactcagacaccggtctgtccccgtgggcttgctgatgtagtcttcctgccgcacgcaactcaggataatgcacaccgagcagaggccacacggagggtattggaaaggttggtgctagctctggggccactgggcccacaagcggtgcaggtgggtcttctttcatactcgcatagaccttcgccactgtttccattaaatgggagccatgacttaggcatcatcctccagagaattcgagatatgccctacatggacccatccggtaataatctgggcacagcagtagtgacagctcacagatatatgctcgccccggatgcccccggcaggaggcaacacgtccccggcgtcatggtcctgctcgtagacgagcctttgagaggagacatattctcccctataagggaggcacaggcttcggggctcaatgtggtcatgctcgggatggctggggcggaccccgagcagctgcgaaggctggctcctggcatggattccgtacagacctttttcgctgtcgacgatggccctagcctggatcaggcagtcagtgggctggctacggccctgtgtcaggcgtcctttaccactcagccgcgccctgagccatgcccagtctactgcccaaaggggcagaagggggagccgggcgagatggggctacgaggccaggttggtccacctggagaccccggactgccgggacgaactggggcccccggtccccaggggccccccggatcggcaaccgctaagggcgaaagaggatttcccggcgccgacggtaggccgggctcccccggtcgcgcaggtaaccccggcactcccggtgcacctggtctaaagggaagtcctggccttccgggacccagaggcgacccaggagaaagaggtccacggggtcctaagggagaacctggagccccagggcaagtgattggtggcgaaggccctggtctccctggtagaaaaggcgaccctggccccagcggaccacctggcccacgaggaccactgggagatcctggtccgcgcgggccacctggcctacccggcactgccatgaagggcgataaaggggatcgaggagaacgaggaccaccgggacccggtgagggcggcattgccccgggcgagccagggctgcccggtttgcccggcagccccgggcctcaggggcctgtgggtccccccggcaaaaagggcgaaaagggcgactccgaagacggtgcccccggtctgcccggccagccgggcagccctggggaacaaggcccgcgagggcctccaggcgcgatcgggcccaagggagacaggggatttcccggcccgctgggagaggccggagagaaaggggaaagaggtccccctggacccgctggcagcagaggactgccaggggtcgccgggcgaccaggcgccaaagggcccgaggggcctcctggcccaacaggcagacagggcgaaaaaggggagcccggcagacccggggaccctgcggtggttgggcctgctgtggctggacctaaaggcgaaaaaggcgatgtcggcccagccggaccacgtggtgccacgggtgttcagggagagcgaggccctcctggtctcgtactgcccggggaccctggaccaaagggcgatcccggagatcgtggccctatcggcctgaccgggagagccggcccaccaggagactccggaccaccaggcgaaaaaggagacccgggccgacctggaccccctggcccggtgggacctaggggacgggacggagaagtcggggagaagggcgacgaaggccctccaggcgaccccggtctgccaggtaaggcaggtgaacgaggactccgaggagcaccgggcgtgagggggcccgtgggcgagaagggggaccagggcgacccaggcgaagacggaaggaacggatcacccggatcatcaggcccgaaaggagatcgtggagaacccggccccccaggccctccggggaggctggtggacaccggaccaggtgcccgcgagaaaggagagcctggcgatcgagggcaagagggtccaagggggcctaagggcgatccaggtctacccggagcgcccggcgagcgagggatagaaggcttccggggcccccccggccctcagggggaccctggtgtgaggggaccagccggggaaaagggtgaccgcgggcctccgggcctagacggccgatccggcttggatggaaagcccggcgcagccggcccaagcggacccaacggggcagcaggcaaagccggcgaccccgggagggatggtctgcctggcctgaggggtgagcaggggttacccggaccctccggccctcccggactgcccggaaaacccggagaggacgggaagccaggcctgaacggtaaaaatggcgaacccggagaccccggcgaagatggaaggaaaggcgagaagggcgactcaggagcctctggccgtgaggggcgagatggaccaaaaggggaaagaggcgccccaggaattctcgggccccagggccctccagggttacctggccccgtgggccctcctggccaaggttttccaggcgtacccgggggtacagggcctaagggagataggggagaaacaggctccaaaggcgaacaaggactgccaggtgagagaggcctgaggggtgaacccggttcggtgccaaacgtcgataggctcttagaaacagccggaatcaaggcctccgccctgagggaaattgttgaaacctgggatgaaagctccggcagtttccttccagtcccagagcggcgccgaggccctaaaggggatagcggagaacagggtccccccggcaaggagggaccaattggctttccgggcgaacgaggattaaaaggagacaggggtgaccccgggccccaggggccacccggactcgcattgggcgagcgagggccccctgggccttctgggctcgccggagagcctggcaaacctgggatcccgggattacctggtcgtgctggtggtgtgggcgaggccgggaggccaggcgaacgaggggaacggggggagaagggtgaacgaggggagcagggtagggacggcccacccggcctgcccggtacacccggtccccccggccctcctggaccaaaggtgagtgtggacgagccaggccccggtctgtcaggcgaacaggggcctccaggtctgaagggggcgaaaggagagccgggctctaacggagaccaagggcccaaaggggaccgaggggttcccgggataaagggggatcgaggcgagcccgggcctcgaggccaggacgggaacccagggctaccaggagaacgtggtatggccggtcccgaaggcaagcccgggctgcaaggacctcgcggtccccccggtcctgtaggaggccacggagatcctgggcccccaggagcccccgggctggcgggcccagccgggcctcagggccccagcggtctgaagggagagcctggggaaacaggccccccgggcagaggactcacgggccccacaggcgccgttggcctcccaggccctccagggccctcaggcttggtagggccacagggaagccctgggcttccaggacaggttggggaaaccggcaagcctggagcacctggtcgagacggtgcctctggcaaggatggggataggggcagcccaggcgtgccaggatctccagggctcccaggccctgttggtcctaaaggggaaccaggtccgaccggcgcacctgggcaggccgttgtcggcctgccgggagctaagggagaaaagggtgctcccggtggcctagcaggggacctggtcggcgaaccgggcgccaagggagatcgcggactgccaggcccacgaggagaaaagggagaagccggacgggctggcgaacccggcgaccccggcgaagatggccagaaaggggcacccgggcccaagggctttaagggcgatcccggagtcggtgtgcctggcagcccagggccccccggccctcccggcgtaaagggcgacctaggcctgccgggacttcctggcgcacctggagtcgtaggatttcctgggcagacagggcctcgtggggaaatggggcagcccggaccatctggcgagagaggactggccggccctcctggcagggaagggatcccagggcctctcggacctcctggcccccctgggtccgtcgggccaccgggagcctcaggactgaaaggcgacaagggggatccgggtgtgggcttgcctggcccaaggggtgagagaggtgagcctggaattaggggggaagatggacggccggggcaggaaggacccaggggcctcacaggccctcccggctcacgtggagaaaggggcgagaagggagatgtgggcagcgccggcttgaagggggacaagggggattcagcagttattctagggccgcctggacctcgcggggcgaagggagacatgggtgaaagagggcctcgcggcctagatggtgacaaggggccccgcggagacaatggcgatccgggtgataagggcagcaagggcgagcctggcgacaaggggtctgccggcctgcctgggctgaggggactgctgggaccccaaggccagccgggcgcggccgggatccccggcgaccctggatcccccggtaaagacggagtccccgggattaggggggaaaagggcgatgttgggttcatggggcccagaggccttaagggggaaaggggggtgaagggtgcctgcggcctagatggcgagaagggagacaagggggaggctgggcccccgggccgaccgggacttgcagggcataagggagaaatgggggaacccggcgtgcccgggcaatctggagctcccggcaaggaggggctaatcggccctaagggagatcgaggattcgatgggcaaccaggccccaagggcgatcagggggaaaaaggggagcgcggcaccccgggcatagggggttttcctgggcctagcggaaacgacggttccgccggtccgcctggccctccgggcagtgtaggaccaagagggcctgaagggctccagggccaaaagggcgaaaggggccctccaggggaacgcgtggttggcgctcccggagttcccggagcccccggcgagcgaggagaacagggccgacccggccccgcgggacccaggggagaaaagggggaagcagccttaaccgaggacgatattagaggattcgtccgccaagaaatgtcccaacactgtgcttgtcaggggcagttcattgccagtgggtcacgacctctgcccagctatgctgccgacaccgctggttctcagctacatgccgttccagtgctgcgagtgagccatgcagaagaagaggagcgagtcccccctgaggacgatgagtacagcgaatattccgagtactccgtcgaagaatatcaggacccggaagctccatgggactcggatgatccctgtagcctccctctggacgagggttcctgcacggcgtacaccttgcggtggtatcatagagcagtgaccgggtccaccgaggcatgtcatccctttgtgtatgggggctgcggaggcaatgccaaccgattcggtactagagaggcttgcgaaagaaggtgcccaccaagagtggtccagtcccagggcaccggaacagctcaggac

SEQ ID NO: 1443 - DNA, 8832 bp, Artificial Sequence
  derived and/or modified sequence
atgactcttagactgctggtggcagcactgtgcgcaggaattctggccgaagcaccccgcgtgagggcccaacatcgggagagagtgacttgtactaggctttatgcagccgacattgttttcctgcttgatggttcctcgtcaattggacggagcaattttcgcgaggtgcggtcctttctggagggacttgtcttgccattttccggagcagccagcgcgcaaggtgtccggttcgctaccgttcaatacagcgatgacccacggaccgagttcggtcttgacgcgctgggaagcggtggagatgtgatacgggccatcagagaattgtcgtataagggcggaaatacgcgcaccggcgctgccattctgcatgtggcagatcatgtctttctgcctcaactcgccagacctggggttcctaaggtgtgtatcctcattaccgatggtaagagccaagatctggtggatactgctgcacagagactgaagggacaaggtgtcaagctgtttgccgtaggtatcaagaacgcagatcctgaggagctgaagcgagtggccagccaacctacgtcggatttctttttcttcgtgaatgacttctcgatactgcgcactctgctgcctcttgtgtcacggcgcgtgtgtactaccgccggcggagtgcctgtgactcggccccctgatgactcaacctccgccccgagagatttggtgcttagcgaaccgagctcacagtcgctgcgagtgcagtggacggcagcatcgggaccggtcactggctataaggtgcagtacacccctttgaccggactcggtcaaccactcccttccgagaggcaagaagttaacgtgccagctggcgagacttccgtgcgcctgagagggcttcgtcctcttaccgaataccaagtcaccgtgattgcactttatgcaaattccattggggaggcagtgtccggtaccgcacgaaccactgcattggagggaccggaactcactatacagaacacgactgcacattcgctgctggtggcctggagatcggtgcctggagctaccggttaccgtgtcacttggcgcgtcctttcgggaggtccaacccaacagcaagagcttggacccggtcaaggtagcgtgttgcttagagatcttgagcctggaaccgactacgaggtgaccgtctcgacgctgttcggccgctcagtggggcctgctacttccctgatggcaagaactgatgcatccgtggaacagacgcttagacccgtcattctcggtcctacctcgattctgttgagctggaaccttgtccctgaagccagaggatacagactggagtggaggcgtgaaaccggtcttgaacctccgcaaaaagtcgtgctgccatcagatgtgacgagataccagctggacggacttcaaccgggtaccgagtaccgactcaccctgtacaccctcctcgaaggacacgaggtggcgacccctgctactgtggtgccgaccggtccagagcttcctgtgtcgcccgtgaccgacctgcaagcaactgagcttcctgggcagcgcgtgagggtttcgtggtcccctgtgccaggggcaacccagtacagaatcattgtgcggagcactcaaggagtcgaaaggaccctggttctccctgggtcccagactgcctttgacctggacgatgtccaggctggtctttcgtacacggtgagggtatctgcacgggtaggccctagagagggctccgcaagcgtgctcactgtgaggcgggaacccgaaacccctctcgcagtgccaggtctgcgagtggtcgtgtcagatgcaacccgtgtccgtgtggcctggggacctgtgcccggagcgtccggcttccggatctcttggtcaactgggtccggacctgaatcatcgcaaactctccctcccgatagcactgcaaccgatattaccgggctccaaccgggaactacgtaccaggtggctgtgtcggtgctccgaggacgagaagaaggtcctgcagccgtcatcgttgcgcgtactgatccacttggtcctgtacgaactgtgcatgtgacgcaggcctcctcctcctcggtgactataacttggacgagagtcccaggcgcgaccggttacagggtgtcatggcacagcgcacacggtccggagaaatcccaacttgtcagcggtgaggcaaccgtggcggagttggatgggctggaaccagacaccgaatacactgtccatgtgagagcacatgtggccggtgtggatggccccccagcctccgttgtggtgagaactgcccctgaaccggtggggagggtatcccgactgcaaattcttaacgcctcgtctgatgtgcttcgcattacctgggtgggagtgaccggtgcgactgcataccgccttgcctggggacgctccgaaggaggacctatgaggcatcagattcttcctgggaacaccgattcggcagagatccgcgggcttgaaggaggggtgtcatactcggtccgggtgaccgcactggtgggtgatagagagggaactccggtcagcatagtcgtcaccactcctccagaggcacctcccgcactggggactcttcacgtcgttcagaggggagaacattcccttcgcctgcggtgggaacccgtgcccagggcgcaaggatttcttctccattggcagcctgaggggggacaggaacaatcacgggtgctcggtccagaactgtcgtcctaccatctggatggactcgaacctgcaactcagtatagagtgcgtctgtcggtgctcggccctgcaggtgaaggccctagcgcagaagtcaccgctagaactgagtcacccagagtgccttcgatcgaacttcgcgtcgtggatacttctatcgattccgtgaccctggcatggacgccggtgtcaagggcgtcgtcctacattctctcttggcgtccgctgcgaggccctggtcaggaagtgcctggatccccgcagacgttgcctggcatctcatcgtcccagagggtgaccggcttggaacccggtgtgtcttacatcttttcacttaccccagtccttgatggagtccgaggtcctgaggcgtcggtcactcagacccccgtctgcccacgcggacttgcagatgtggtgtttctgccgcatgcaacccaagataacgcccatcgcgcagaagctactcgccgcgtgctggaacgtctggtgcttgccctggggcctctgggaccacaggcggtgcaggtggggctcctgtcctattcccaccgcccctcccctctctttcctcttaacgggtcgcacgatctgggcatcatcctgcagcgcatcagggatatgccatacatggacccgtccggaaacaacctcggaaccgcagtggtcacggcacatcgttacatgttggcaccagatgcaccaggacgtagacaacacgtccccggagtcatggtcctgctggtggacgagcctttgagaggcgacatctttagcccaatccgggaggcccaagcatccggactgaacgtggtgatgctgggcatggcaggggcagacccggagcagctgcggcgccttgcaccaggtatggactcagtgcaaactttctttgcagtcgatgatggtccttcacttgatcaagcagtgtctgggttggccaccgcgctctgtcaggcatcgtttactacccagccacgaccagaaccttgccctgtgtactgtccaaagggtcaaaagggagaaccgggagaaatgggacttagaggacaggtaggacctccgggggatcctggcctgccaggcagaactggagcccctggtcctcaaggaccaccgggatccgcaaccgcaaaaggtgaacgaggtttccccggtgcagacgggcgaccagggagccctgggagagcagggaatcctgggacgcctggtgcgcctgggctcaaaggttcacccggattgccggggcccagaggtgacccgggtgaaagaggtccacgcggaccaaagggcgaacccggggctccgggtcaggtgattggcggagagggaccaggactgccaggtcgaaaaggggatcccggaccctccggaccgccagggccacgcgggcccttgggagatccaggccctaggggtccaccaggcctgcctggtaccgcaatgaaaggcgacaaaggagataggggagagcgtggacctccaggaccaggagaaggtgggatagcccccggtgagccaggactgcccggtctgccaggttcgccgggaccccaaggtcctgtcggaccgccgggcaagaagggagaaaagggagattcggaagatggcgccccgggacttcctggacaacctggcagcccaggagaacagggtccaaggggaccacccggtgcaatcggccccaaaggagatcggggatttcctggacctctcggtgaagctggggaaaagggggaacgaggacctcctgggcccgccggctcccgtggactccctggggttgccggaaggcctggtgcgaagggaccagaggggcctccaggaccaactgggcgccagggagagaaaggagaaccaggcagacccggtgatcctgccgtggtggggcctgctgtggcaggtccaaaaggagagaaaggggatgtggggccggcgggaccccgaggagcaaccggggtccagggtgaacgggggccacctgggctggtgctgcccggtgaccccggtcccaaaggtgaccctggagatagaggtccaatcgggcttaccggcagagcaggacctcctggagactccgggccgcctggagaaaaaggtgaccctggacgtcctggaccacccggcccagtcgggcccagaggtcgggatggtgaagtgggcgaaaaaggcgatgaaggacctcccggcgatcctggccttcctggaaaggcaggcgaaagagggctgcgtggcgcgcctggggtgagaggacccgtcggagagaagggtgaccaaggagatcccggtgaggatggtcgaaatggatcccctggctcaagcggtccaaagggagatcgtggagaacctggtcctccgggtcctcctggcaggcttgtggatactggaccaggagccagggagaagggggaaccgggtgaccgaggtcaagaaggacctcggggtcctaagggagatcctggactccccggtgcgcccggtgaaagaggaattgaaggctttcgtgggcctccaggccctcagggagatcccggggtccgcgggccagcaggtgagaagggagacagaggacctccgggactggacggtcgctcgggacttgatggtaagccaggtgcagcgggcccatcaggtccaaatggtgcggcaggcaaagctggagatcctggtagagatggactgcctgggctccgcggagaacagggcctgccagggccgtcaggacctccagggcttcctggtaaacctggtgaggacggtaagcccggcctgaacggaaagaacggcgaaccaggagatcccggagaagatggaagaaagggtgagaaaggggattccggagcatcgggacgggaggggcgggacggaccgaagggagaacggggcgccccgggtattctcggaccacaaggacccccaggactccccggacctgtcggacctcctggacaaggattcccaggagtgcctggaggtaccggcccgaagggcgaccgcggagaaaccggtagcaagggcgaacaaggcctcccaggggaacgcggtttgcgcggcgagcctggttcagtgccaaacgtggatagactccttgaaactgcaggcattaaagcaagcgcactgcgggagattgtggaaacgtgggacgagagcagcgggagctttctccctgtgcctgagaggcgcagaggacccaagggtgattccggcgaacaagggccgccaggaaaggaagggccaataggtttcccaggcgaacggggcctgaagggtgacagaggcgacccgggaccgcagggtccacccggactggcactgggggagagaggtccacctgggccttcgggcctcgccggagaacctggaaagcctggaatcccaggtttgcccggtagggccggtggtgtcggagaggcaggtcgaccgggggaacggggcgaacggggtgaaaagggcgaaagaggtgagcaaggcagggacggaccccctggactgccaggcacccccggaccgcccggcccaccaggtcctaaagtctcggtcgatgagccgggtcctggcctcagcggagagcagggaccgccaggcctgaagggcgctaagggggagcccgggagcaatggcgatcaaggtcccaaaggggaccgcggcgtgccaggtattaagggagatagaggggaacccggccccagaggacaagacggcaatcctggtttgccaggagaaaggggtatggcaggtccagaaggtaagcccggactccaaggaccaagaggacctcccggaccagtcggaggccacggagatcctggacctccaggagcacccggccttgcaggtcccgcagggccccaaggcccatctggtcttaagggggaacctggggaaaccgggccaccaggtagaggtcttaccggaccaaccggggccgtggggctgcccggtccgccaggcccgtctggtctggtgggaccacaaggtagtcctggattgcctggccaggtgggagaaactggaaagcctggagcgcctgggagagacggtgcaagcggaaaagatggtgacaggggttcaccaggagtcccaggttctcccgggctgcctggaccagtgggcccaaagggagagcctggacccactggagcacccggacaagcagtagtgggacttccgggggccaagggtgagaagggagcccctggtggactcgccggtgaccttgtgggggaacctggcgcaaaaggagatcgagggcttcccggaccccgtggagaaaagggggaggctggacgtgccggagaacctggagatcctggtgaagatggacaaaagggagcacctggcccaaaaggatttaagggggatcccggcgttggcgtgccggggtcgcctggtcccccaggccctccaggagtcaagggtgacctgggcctgcccggccttcccggcgcaccgggagttgtggggtttcctggtcaaaccggccctcggggtgaaatggggcagcctggccccagcggtgaacgtggtcttgcgggacctcctggccgggaaggtatccctggcccacttggccctccgggtccgcctggatcagtcggacccccaggtgcctcaggcctcaagggggataaaggggaccctggcgttgggctccctggacctcgtggtgaaaggggcgagcctggaatacgtggagaagatgggcgtccgggacaggaaggtccccgcggactgactggccctcctgggtcacgcggtgaacgcggggagaagggtgacgtcggcagcgcaggactgaagggagacaaaggtgatagtgctgtgattcttggcccgccgggacccagaggggcaaagggtgatatgggagaacgggggcctagaggtttggatggagacaaggggccgcggggcgataacggcgacccaggggacaaaggttccaagggtgagccgggtgacaagggaagtgctggacttcctgggctgagaggacttcttgggccccagggccaaccaggggcagccgggattccaggtgatccaggatccccaggaaaggatggcgtgcctgggattagaggagagaagggcgacgtcggattcatgggtccacgcggcctcaagggcgaacgcggtgtcaagggtgcctgtggactcgatggagagaaaggagataaaggagaagctggcccacccgggcggccaggactggcaggccataaaggggaaatgggcgaacccggggtgcccggtcaaagcggcgcaccaggcaaagaaggtctgattgggcccaagggagatagggggtttgatggtcagccagggcctaaaggagatcagggcgagaaaggcgagcgcggaaccccaggaattggtggctttccaggtccctccggtaacgatggttcggcgggtcctccagggccacctggttcagtcgggcctcgcggacccgaaggcttgcaaggacagaaaggggagcggggtccaccaggcgagagggtggtcggagcgcctggtgtccctggtgcacctggagaacgtggtgaacaaggtaggccgggaccagccggacctagaggagaaaaaggtgaagccgctcttaccgaagatgacattcgtggtttcgtgcggcaagaaatgtctcaacactgtgcctgccaaggtcagtttatcgcaagcggatcgcgccctctcccatcatacgccgcggataccgccggatcccaactgcacgcggtgcctgtgttgagagtgtcgcatgctgaggaagaagaacgtgtgccacctgaggacgacgaatacagcgaatactccgaatactcggtcgaggagtaccaggatcctgaagcgccgtgggacagcgacgatccatgttccctgccacttgacgaaggctcgtgcaccgcatacactcttcggtggtaccacagagcagtgactggctcaaccgaggcgtgtcatccgtttgtgtacgggggttgcggaggaaacgcaaataggtttggtactcgtgaagcatgcgaacggcgttgcccccctcgagttgtccagtcccagggtaccggaaccgctcaagac

SEQ ID NO: 1444 - DNA, 8832 bp, Artificial Sequence
  derived and/or modified sequence
atgaccctgaggctgttggtggccgcactgtgcgcggggattctggcagaagctccaagggtgagggcccagcaccgggaaagggtgacttgtacaaggctctatgcagccgatatagtgttccttctggatggaagctcttccatcggtaggtccaactttcgtgaggtcaggtcattcctagagggcctcgtgctgcctttctctggtgccgcatccgcgcagggcgtgagatttgccactgtacagtactccgacgaccctcgaaccgaattcggactcgacgctctgggctccggtggagacgtgatcagagctattcgcgaacttagttacaaaggaggaaacactcgcacaggtgccgctatccttcacgtggctgaccatgtgtttctgccccaacttgcgagaccgggtgttcccaaagtgtgcattctgatcaccgatggaaagtcccaggatcttgtggacaccgcagcacaacgcctcaagggtcagggtgtgaagctcttcgctgtgggcatcaagaacgctgaccccgaagaactcaaaagagtggcaagtcaacctactagtgactttttttttttcgtgaacgattttagcatcctcaggaccctgctgcctcttgtaagcagacgcgtctgcactacagccgggggagtgccggtgacaaggccgccagacgactctactagtgccccacgggacctcgtcctatctgaaccttcctctcagagcctccgggtgcaatggacagctgcctcgggaccagttaccggatacaaggtgcagtacacgccacttactggcctcgggcagcccctgccttctgaacggcaagaggtgaatgtaccagcgggcgaaacctccgttaggctgaggggcctgcgccccctgactgaataccaggtgactgtgatcgccttatacgctaattctataggggaagccgtatccggaactgccagaacaaccgccctagaaggcccagaattgacgatacagaatactacagcccacagtctgttagttgcttggaggagtgtgccaggggcaactggttatcgcgtgacctggcgtgtgctttctggcggccctactcagcagcaggagttaggacccgggcaggggtccgtcctgttacgggacctcgaaccaggaacagattatgaagtgacagtgtcgactctgtttggcagatcagtcggtcctgcaacgtcactgatggcccggactgacgcctctgtggagcagaccctgcgaccagttatcctaggacctacctcgatattgctctcatggaatctcgtgccggaggctagaggctaccgccttgagtggcgccgcgagaccggactagaacccccccaaaaagtcgttcttccttcagatgtgacccggtatcaactggacggactgcagcccggaacagagtatagacttacattatatactttgttagaagggcacgaggtggctacaccagctactgtagttccaacggggccggaattgcccgtttcaccagtgactgatctacaagctaccgaattacccggccagagggttcgcgttagctggtcacccgtcccaggtgctacccagtaccgaatcattgtgcggtctacacagggagtagaaagaacgttggtcctgcctggaagccaaacggcgttcgacctggacgacgtgcaggccggcctgtcatacactgtccgggtgagtgccagagtcggaccacgagagggctccgcctctgtgctgactgtacgcagagagcccgaaacacctctggccgtgcccggactgagggtggttgtctcagatgcaaccagggtaagagtggcatggggtccagtgcccggcgcctcagggttccgcatctcttggagtaccggatccggtcccgagagttcccagactcttcctccagactctaccgccacagatatcaccgggttgcagcctggaaccacctaccaggttgccgtgtcggtgttgaggggtcgcgaggaagggcctgccgctgttatcgtggctcgtaccgatccacttgggcctgtacgaacagttcacgtgacgcaggcaagtagcagctcggtcactatcacctggaccagagtccccggagcaaccgggtatcgagtttcctggcattccgcccatgggcccgagaagagtcagctggtgtcaggggaggcaaccgttgccgaacttgatggattggaacctgacacagagtacaccgtgcacgtcagagcccacgtagccggcgtagacggacctcccgctagtgtcgtggtccgaaccgccccggagcctgtgggtagagtgagcaggttgcaaatcctgaacgccagttctgacgtgctgaggatcacttgggtgggggtaacaggcgcgacggcatatcgactcgcgtggggacgttcagagggaggacccatgaggcaccaaattctgccaggtaacaccgactctgccgaaattcgcggactggaaggaggagtctcatatagcgtccgggtgacagcgctagtgggtgaccgtgagggtacccccgtgtcaatcgttgtgaccacccccccagaggccccgccggcactggggacacttcatgttgtccagagaggagagcatagcctgaggctccggtgggagcctgtcccgcgtgcccagggctttcttctgcattggcagcccgagggcggtcaggagcagagccgggtgctgggcccagaactgagctcatatcacctcgacggactcgagcctgccactcagtaccgcgtccgcttgagcgtgttaggtcccgcgggcgaaggcccatcggccgaagtaacagccagaacagagagcccccgagtgccctcaatcgaattacgggtcgtcgatacttcgatcgatagcgtcacactggcttggacccccgtctccagagctagttcatatattctgtcttggcgacccctgcggggtcctggccaggaggtacctgggtcacctcagacactacctggcatatcaagttctcaacgggttacaggcctcgaaccgggcgtgtcttatatcttttccctcacccccgttctggatggcgttcggggccctgaagcctcagtcacccagactcccgtgtgcccacggggactggcggacgtggttttcttgccacacgcgacgcaggataatgcacatcgagccgaagccacccgaagggttcttgagcggctagtcctggccttgggacctcttgggccccaagcagtgcaggttggcctcttgagttactcccacaggccttcacctctgttcccactaaacggctcgcatgaccttggtatcattctacagaggatccgagatatgccatatatggacccatccggtaacaaccttggaaccgctgttgtcaccgcccaccggtacatgttagcccctgacgctccagggcgcaggcagcacgtccccggagttatggttcttttggtggacgagccactgagaggagatatctttagtccaattagagaggcccaggcgtccgggctgaatgttgtgatgctaggcatggcgggcgccgacccagaacagctgcgtcgtctagccccaggcatggatagcgtgcagactttcttcgcggtcgatgacggaccaagcctagatcaggcggtttctggtctcgcaacagctttatgccaagcctctttcacgacccagcccaggcccgagccatgccctgtttactgccctaaggggcagaagggggagccgggagagatgggccttagggggcaagtcgggccacccggagatcccgggctaccagggcgcactggtgctcccggcccccagggcccgcccggctccgcaaccgcgaaaggtgagcgcggctttcctggagcagatggacgcccgggctctccaggtagggccgggaaccctggaaccccaggcgctcccgggttaaaaggctccccggggctgccgggtccgcgtggcgaccctggggaacggggaccaagaggtcctaaaggggaaccaggtgcgccgggacaggtgattggaggagagggccccggtcttcctggcaggaagggagacccaggcccctcaggaccccctgggccacgtggcccactaggtgacccagggcctcgagggccgccagggctgccaggcactgccatgaagggtgacaaaggagaccggggagaaagggggccacctgggcctggcgagggaggcatagccccaggcgaacccggcttaccaggtcttcccggttcccccgggcctcagggcccagttggtcctccgggtaaaaagggggaaaagggcgacagcgaagatggagcacccggcctgcccggtcagccaggtagccccggtgagcagggtccccggggtcctccgggtgccatagggcctaagggcgataggggatttcctggtcccctgggcgaggcgggcgagaagggggagaggggcccaccagggccagctgggtctaggggactgcccggagtggcaggcaggcctggagctaagggacctgagggcccccctggccccactggaaggcagggcgagaagggggagccagggaggccaggggatccagctgtggtagggcccgccgtggccggccccaaaggagagaagggggatgtggggcctgccgggccacgcggagctacaggagtgcagggcgaacggggtccgcccggcttggtgctgccaggcgatcctggaccaaaaggggaccccggggatcgtgggccaattggattgacagggcgcgctggaccacccggagattccggtccaccaggagagaagggggatcctggacggccaggtccccctggccctgtggggccgagaggccgagacggagaagtcggcgagaagggggacgagggccctccaggagacccgggtctgcccggcaaggccggcgagaggggactgaggggagctccgggcgttaggggacccgttggcgaaaagggggaccaaggcgacccaggtgaggacgggcgaaacggcagcccaggatccagcgggcccaagggtgatcgcggcgagcccgggcccccaggccccccggggcgactggtggacacaggccccggtgctcgcgaaaagggagaacctggtgaccgcggccaggaggggccgcgggggcccaagggcgatccaggtttgcccggagcaccaggggagagaggcatcgaagggttccggggaccacccggcccgcagggagacccaggcgtgcgaggccctgcaggtgagaagggggatcgggggcctccaggactggacggacgtagcgggctcgacgggaagcccggagccgcggggccatcaggccccaatggagccgctggaaaagccggtgaccccggacgcgatggtctccctggtctgcggggagagcaagggctgccagggccttccgggccacctggcctgcctgggaagcccggggaagatggaaagcccggtctgaatggaaaaaatggtgagccaggcgaccccggggaagatggcaggaagggtgagaagggagatagtggcgcatctggccgagaggggagggacggtcccaagggcgaacgtggcgcaccgggcatcctcggcccccaagggccgccgggactccctggccccgtggggccgccgggtcagggtttcccaggggtgcccggtggaaccggccccaagggggaccgtggcgagacaggcagcaagggagagcagggcctgccaggcgaacgtggcctgagaggcgagcctggatctgtgcccaacgttgaccggctgcttgagacggcgggcatcaaggctagcgcactgagggagattgtggagacgtgggacgagagtagcgggagcttcctacctgtgcccgaacgccgcaggggccccaaaggtgattcaggagagcaggggccccccggcaaggagggacccatcggatttccaggggagcgaggcctgaagggagaccgcggtgatccaggcccccagggacccccaggtctcgccctaggagaacggggccctcctggtccgagcggtcttgcaggtgagccagggaaacccggcatccctggccttccaggaagggcagggggtgttggtgaagccggccgaccaggggagagaggcgagcgcggggagaagggagagcgcggggagcaaggcagagacggcccacctgggcttccagggactccaggaccaccgggacctccaggtccgaaagtgagcgtcgacgagcctggacccggcctcagtggcgaacaggggcctcccgggctgaaaggcgctaaaggcgagccaggctctaatggagatcaaggtccgaagggtgatagaggcgttccaggaattaaaggagaccgtggggaaccaggaccccgcggccaggatggaaatccaggtctgccaggcgaacgcggtatggccggacccgaagggaaacctggtctgcagggcccccgcggcccacctggcccagtgggaggtcacggcgaccccgggcctccaggggcccctgggctggccggacccgctggtccccagggtccttctgggttgaaaggcgagcccggcgagacgggtccccccggcagaggtttaacgggcccaacgggggcagttggactccccggaccccccgggccctccggactcgttggacctcagggctcacccggcctgcctggccaggtaggcgagacaggcaaaccaggcgcccccggccgggacggagcaagtggtaaggacggagaccggggatctcccggagtgccgggtagtccgggattgcccggcccagtggggcccaaaggggaaccaggacccacaggtgctcccggccaggctgttgtcggattgccaggagccaaaggagagaaaggtgcacctgggggactggccggcgacctcgtgggcgaacccggcgccaagggtgaccgaggcctccctggaccacgtggggagaagggtgaggccggccgagccggagagcccggggaccccggcgaggacggccagaagggagccccagggcctaagggatttaagggagacccaggcgtgggcgtgccaggttctcctggtcccccaggtcctccgggcgtgaagggagatctggggctgccaggccttcccggggcccctggggtcgtgggcttcccaggtcagacgggcccacggggggagatggggcagcccggaccctctggggagcggggactggcaggacccccaggacgggaaggcatccccggtccactgggcccccctggtcccccgggctctgtcggaccgcccggagcaagcggtctcaaaggggataagggagatcctggcgtgggcttgcccggacctcgcggcgaaaggggagagcccgggatccggggagaggatggccgaccaggccaggaaggcccccgaggtctgactggcccccctggatcaaggggtgagcgcggagaaaaaggcgatgtgggttcagctggactgaagggggataaaggagacagcgctgtgatcctcggcccacctgggcctaggggagcaaaaggcgatatgggggagcgaggccccagaggactcgacggagataaaggcccccgaggcgacaacggagaccctggcgataagggttcaaagggggagccgggggacaagggctctgcgggactgcctggactgcggggactgctggggccccaaggacagccgggagcagcaggcatcccgggcgatcctgggtccccgggcaaagatggagtccccggtatccggggcgagaagggcgacgtcggttttatgggacctagggggctgaagggggagcgcggcgtgaaaggagcctgcgggcttgacggggagaagggtgacaagggggaggctggcccccctggcaggccaggcctggccggacataaaggagagatgggtgagccgggcgtccccggccaatctggggcacccgggaaagagggacttatcggaccaaagggggacagaggctttgatggacaaccgggcccgaagggggaccaaggggaaaagggcgagcggggcactccgggcatcggaggatttcctggtccttccggaaacgacggctccgccggccccccggggcctccaggaagcgtcgggcctagagggccggagggcctgcaggggcagaagggagagcggggcccaccgggcgagagagtggtaggggcgccaggcgtcccaggcgcgcctggtgaacgcggcgagcaggggagaccagggcctgccggccccaggggggagaagggtgaagccgcactgaccgaagatgacattcgtggcttcgttagacaggaaatgagtcaacactgtgcttgccaaggtcagttcatcgcatccggctcaaggcctctcccgagctatgctgcagataccgcgggaagccagctgcatgctgtgccagtgctgagagtaagtcacgctgaggaggaggaaagagtgccccctgaagatgacgaatacagtgaatactctgagtactcagtggaagaataccaagaccctgaggccccttgggattcggacgacccatgtagcctgccattagatgagggctcctgtactgcctacacgctacggtggtaccaccgcgctgtgacgggaagtactgaggcgtgtcaccccttcgtgtacgggggatgtgggggcaatgcgaaccggtttggcacacgtgaggcctgtgagcgccgttgtccaccccgtgttgtccagagtcagggaaccggaactgcccaggac

SEQ ID NO: 1445 - DNA, 8832 bp, Artificial Sequence
  derived and/or modified sequence
atgacgctgagacttttagtggctgctctatgtgcgggtattctggcagaggctccacgcgtgcgagcgcagcatcgtgagcgggtcacctgtactcgtctttatgctgcagatatagttttcctccttgatggatctagttcaatcggaagatctaattttcgtgaagtaagaagttttctagaaggtctagtactaccgtttagtggagctgctagcgcccagggtgtgagatttgccacagtgcaatatagcgatgatccgaggacagagttcggattggatgcgcttggaagcggtggagacgttattcgggccatcagggagttgtcatataagggagggaatacgagaacaggagcagctattctacacgttgccgatcatgtctttttaccacaactggcccgtccgggagttccaaaggtgtgcattttgatcaccgatggcaagtctcaagatttagtggatacagctgcacagagattaaaaggacaaggagttaagctttttgcagttggaattaaaaacgccgatccagaggagcttaaacgcgttgcttcgcaaccaacctcggatttcttcttttttgttaacgatttctccattctacggaccttgcttccgcttgtgtctcggagagtatgcacgactgctggaggtgtcccagtgacacggccgccggatgattcaacatctgctccacgtgatctagtgctatcagagccatcatcccagtcccttcgggtgcagtggacagcagcttcaggtccagttaccggatacaaagtgcagtacactccgctcacgggtctcggccaacctctcccaagcgaaagacaagaagtaaatgtcccagctggagaaaccagtgtacgattgcgtggtctcagaccacttacggaataccaagttacagtgatcgcattgtatgccaattcgattggagaggctgtttcgggaaccgctaggacaacagcactagaaggaccagaacttacaatccagaacactactgcccattctttgttggtggcttggcggtctgttccaggagccacgggatatcgggttacttggagagttctcagtggggggccaactcagcaacaggagcttggtccaggacaaggctcggtgttattaagagatctcgaacctggaacggattacgaagttacagtctcaactcttttcgggcgatcagttggacctgctacttcgctcatggctcgcactgatgctagcgttgagcaaacacttcgaccagtaattttaggaccgacatcgattctactgtcttggaacttggtgccagaggctcgagggtatcggcttgaatggcgacgggaaacaggtctagagccacctcaaaaggttgtcctgccaagtgatgttacaagataccagctagacgggctacagccaggaaccgaatataggttaactctttatacacttctcgaaggacatgaggtggcaaccccagctacagttgtgccgactggaccagaactgccagtctctccggtgacagacctacaagctacagagctaccagggcagcgagtccgggtttcgtggtcaccagttccaggagcaacccagtatcgaattatagtgcgttcgactcagggagtggagcgtacattggttctaccaggcagccaaactgcttttgacctcgatgatgtccaggctggactctcgtatacagtgcgagttagtgctcgagtgggaccacgagagggtagcgcatctgtacttacagtccgcagagaacccgaaacacctttggctgttcctggattgcgtgtggtagtttcggatgcaactagagtacgtgttgcttggggaccagttccaggagcttcaggattccgaatctcatggagtaccggatctggaccagagtcatcacagactttgccacccgattcaaccgccacagatatcactgggttgcaaccaggaacgacttatcaagtcgctgtaagtgtgcttcgagggagggaggagggtcctgcagctgtcattgtcgctcgaactgaccctttaggaccagttagaactgtacatgtgacgcaggcgtcctcgtcatccgtgacaattacttggacaagagttccgggtgctactggttatagagtgtcgtggcattcagcacatggtcctgaaaaaagtcaattggtcagtggcgaggcgacagtcgccgagcttgatggattggagccagacaccgaatatacggttcatgtacgagcccacgttgctggagttgacggacccccagcatctgttgtggtaaggaccgcccctgaaccagtcggacgtgtttcaagactccagattctaaatgcttcgtccgatgttttgcgtattacttgggtcggagtaactggagctactgcttatagactagcttggggaagatcagaaggagggccgatgagacatcaaattttgccagggaatactgactccgctgagattagaggactggaaggtggtgtatcatattccgttcgggtcaccgcacttgtgggagacagagagggaacgccagttagcatcgttgtgacgacgccaccagaggcaccaccggcactgggaacattgcatgttgtgcaacggggggagcattcgttgagactcagatgggaaccagtgccaagagcccaagggtttttgcttcattggcaaccagagggtggccaagagcagtctcgtgttctcggaccagaactgtccagttaccacctggatggtcttgaaccggcaacgcaatatcgagtccggctttcggtcctcggaccagcgggcgaaggaccaagtgcagaggtaactgctagaacagagtctccgcgggttccaagcattgaactgcgtgttgtggatacaagtattgatagcgtaactctagcttggacgccggtctctagagcgtcgtcatatattttgagctggcggcctcttagaggtccaggacaggaagtgcctggatcaccacagactctcccgggaatctcaagttcacaacgtgttacaggactggaaccaggagtgtcttacattttttcccttacgcctgtgttagatggcgttcgtggacctgaagccagcgttacacagacgcctgtatgtccgcgaggtttagcagatgtcgtgttcttgcctcatgccacgcaagataatgctcatagagcggaggcgacgaggagggtattggagaggcttgttctagcacttggacctcttggaccccaggcagtccaagttggattactaagttattcacaccgcccatcaccactatttccacttaacggtagccacgatttgggaataatcctccagcgtatccgtgatatgccatacatggacccatcggggaataacttgggaactgcagtggtgactgcacatcgttacatgctggcaccagatgcaccgggacgtcgtcaacacgtacctggagtgatggtattgttggttgatgaacctttgcgaggagatattttctccccgattagagaggcccaagctagtggacttaatgtggtcatgttgggaatggcaggggcagatccagagcaacttcgtagattggcccccggaatggatagtgtccagactttcttcgcggttgacgacggaccctcgttggaccaagctgtgtcgggtctggcaacagctctctgtcaggcctcttttacaacacagccacgaccagaaccttgcccagtatattgtccaaaaggtcaaaaaggagagccgggagaaatgggacttcggggccaagtgggacctccaggggatcccggacttccaggcaggacaggcgcgcctgggccacagggaccaccaggcagcgcaactgcgaaaggagagcgaggatttccgggtgctgatggtcgaccaggttcgcctggacgtgcaggaaatccgggtacaccgggagctccaggtctcaaaggcagcccaggtttgccagggccacgaggcgatccaggagagcggggtccaagaggcccaaaaggagagccaggcgcacctggacaggttatcggcggtgaaggaccaggactgccagggcgtaaaggagaccctggtccatctggtccacctggacctaggggaccattgggagatccaggtcctcgcggaccgccagggctgccaggaacagctatgaaaggagataaaggtgaccgtggagaaagaggaccacctggacctggtgaaggaggaattgcgccgggagagccagggcttccaggattgcccggctcgccagggcctcaaggacccgttggtcccccaggaaaaaaaggagagaaaggagactcagaagacggagccccaggactcccaggacaaccgggttctccaggtgagcaaggcccacgaggacctcctggggctattggtccgaaaggagacagaggatttccaggtcctcttggagaagctggagaaaagggagaaagaggaccaccaggtcctgctggatcacgaggactcccaggtgttgcaggaagacctggagcgaaaggaccagagggtcctccaggacctaccggacgtcaaggtgaaaagggagaaccaggaagacctggagatccggcagttgtaggacctgcagttgccggtccaaagggagagaaaggagacgtgggaccggcaggtccacgtggcgctacaggagttcaaggagagagaggaccaccgggattggttctacccggagatccaggaccaaaaggagacccaggagatcgtggaccaatcggcctgaccggacgagccgggccaccaggtgattctggaccaccaggagaaaaaggagatccaggccgcccaggcccaccaggaccagtgggacctagaggaagggacggcgaggtgggagagaagggagatgagggaccaccaggtgacccagggcttcctggaaaggcaggagaaagaggactcagaggtgcgccaggcgtgagaggaccagttggagaaaaaggtgaccaaggggatcctggcgaagacggacgaaatggatcgccaggatcatctggaccaaaaggtgatagaggagagccaggaccgccaggaccaccggggcgattagttgacacagggccaggcgcgcgcgaaaaaggagaaccaggtgatagaggacaagaaggaccaagaggaccaaaaggagatccgggcttaccaggagcccctggagagcggggaattgaaggattccgtggcccacctgggccacaaggtgatccaggggtccgtggtcctgcaggagaaaagggcgatagaggaccaccgggactagacggacgttcaggattggatggaaagccaggcgcggctggaccatctggacctaatggggccgcgggcaaagctggagatccaggtcgcgatggattaccggggttgcgcggggaacaaggtctaccgggtccttcaggaccaccagggcttccaggaaagccgggagaagatggaaagccaggattaaatggaaagaacggagaaccgggtgacccaggcgaggatggaagaaaaggagaaaaaggagattcaggagcctcgggaagagaaggacgagatggacccaaaggagagcgaggtgctcccggaattttgggacctcaaggacctccaggactgcctggaccagtcggaccaccaggtcaaggattcccgggagttccaggaggaacaggtccaaaaggggataggggagagacagggagtaagggagagcaaggtctaccgggcgagagaggtcttagaggtgagccaggctctgtaccaaatgttgatcgtctgttggaaactgcaggaattaaggcatcagctttaagggaaatcgtggaaacatgggacgaatcttctggatcgtttctaccagtcccagaacgtcgtcgaggacctaaaggagattcaggtgaacaaggccctccgggaaaagagggaccaattggattcccaggagaaagaggtctaaagggtgatcgcggtgaccccggtcctcaaggacctccgggtctcgcactaggagaacgagggccgcctggacctagcggacttgcaggagaaccgggtaaacctggaattccaggactgccaggtcgcgcaggaggggtcggagaggccggtagaccaggcgaacgaggggagcgcggagaaaaaggagaacggggagagcaaggaagagacggaccgccgggcttgccagggactccgggacctcccggacctccaggaccgaaagtaagtgtcgacgagccaggacctggcctcagtggtgaacaaggaccacctggtctcaaaggtgctaagggagagccagggagcaacggagatcagggaccaaagggtgataggggagttccaggaattaaaggggaccgtggagaaccagggccgcggggacaagatggaaatcccggattgcctggtgaacgcggaatggctggaccggaaggaaaaccaggattgcaaggccctagaggaccaccgggaccagtggggggacatggagatccaggaccacccggagcgccaggcctggcgggaccagctggaccacaaggacccagtggtttgaaaggagaacctggagagacgggaccacctggacgtggattgaccggaccgaccggagccgttggacttccaggcccgccagggccttcgggactggtcggaccgcaaggttctccgggactcccgggccaggttggagaaacagggaagccgggagcgccagggagagacggtgcttccggaaaggacggagaccgaggatcaccaggagtccctgggtcgcctggtctccctgggccggtagggcctaaaggagaaccaggaccaacaggggctccgggacaggcggtagtaggattaccaggagccaaaggcgagaaaggtgccccgggaggcctcgctggagacttagtgggagagccgggagctaaaggagatagaggattgccaggaccaagaggagagaaaggagaggccggaagagccggagagccaggagatccaggagaagacggacaaaaaggtgctccgggccctaaaggatttaaaggggacccaggagttggggtcccaggatctccaggcccaccgggaccaccaggagtaaaaggagatctgggtctgccaggactgccaggagctccaggagtggtgggttttccgggacaaacgggaccacgaggcgaaatgggacaacctggacccagtggagagcgtggtctggctggaccaccgggcagggaaggaataccggggcctttggggccaccaggtccaccgggatcagtggggccaccaggagcttctggattaaaaggagataagggtgatccaggagtcggtcttccgggcccaagaggagagcgaggagagccaggtatccgtggggaggatgggcggccaggccaggaaggacctagagggcttacagggcctccgggatcccgaggagaacggggagagaaaggtgatgtcgggtctgcaggcctaaaaggagataaaggcgattcagcagttattttaggaccaccaggaccacgtggtgccaagggagatatgggagaaagaggacctcgaggacttgacggagataaagggccacgaggagataatggagatccaggagacaaaggctcaaaaggcgaacccggtgacaaaggctccgctggtttgccaggtcttagaggacttttaggaccacaaggacagcctggagctgccggaattcctggagacccaggatcaccagggaaagatggagtgccaggtattcgcggagaaaagggagacgttggattcatgggaccacgtgggctgaaaggagagcgcggagttaagggagcatgtggattggatggcgagaaaggagataaaggagaagctggaccgccgggacgtccgggtttggctggacacaaaggagaaatgggagaacccggtgttccaggtcaatcgggtgctccgggaaaggaagggttgataggaccaaagggagatcgaggatttgatggtcaacctggaccaaaaggtgatcaaggagagaagggtgagcgcggaactccaggaattggtggattcccgggcccatcaggtaatgacggctctgctggacctccagggccaccaggttcggtcggaccacgcggacctgaaggcttgcagggccaaaaaggtgagcgtggaccaccgggagaacgtgttgttggagctccaggagtaccaggagctccaggtgaacgtggagaacaaggtcgaccagggcccgctggaccaagaggagagaaaggagaagcagctctaacagaggatgatattcgaggctttgtacgacaagaaatgagccaacactgcgcctgtcaagggcaatttattgccagtggatcccgacctcttcctagttacgctgctgatacagctgggtcgcagttacatgccgtcccagtccttagagtcagtcatgcagaagaagaagaacgggttccgccagaggatgatgaatattctgaatattcggaatactccgttgaagaataccaagatccagaggcgccatgggattcagatgatccttgctcccttccactcgatgaaggatcctgtacggcttatacactcaggtggtatcatagggcagtaactgggtctaccgaagcttgtcaccctttcgtctatggaggatgtggaggtaatgcaaatcgctttggaacacgtgaggcctgcgagcgtcgatgtcctcctagggtggttcagtcacaaggaactggaactgcccaagat

SEQ ID NO: 1446 - DNA, 8832 bp, Artificial Sequence
  derived and/or modified sequence
atgacccttagactcttggtggctgcactttgtgcaggtattttggcagaagctccacgggtgcgggcccagcatagggagcgtgtgacctgtactcgattgtacgccgcagacatagtgttcctccttgatggttcctctagcattggaagatcgaactttcgcgaagtgcgatcgtttcttgaaggtctggtgctgccttttagcggtgcggcgtccgcacaaggagtgagatttgctactgtgcaatacagcgatgaccctcggacggaatttggactggatgcactcgggtcgggtggtgacgtgatacgtgcaatcagagaactctcctacaaaggaggaaacactcgcactggagcggcaattcttcatgtggcagaccatgtgttcctgccacaactggcaagaccgggtgtgccaaaggtgtgcattcttataactgatggcaaatcgcaagatctggtcgataccgcagcgcagcgccttaagggtcaaggagtgaagctctttgcagtcggtatcaaaaatgcagaccccgaagaactgaagcgtgtcgcatcgcaacctacctcggatttcttcttttttgtgaacgatttttcgatcttgagaactcttctgccacttgtgtcaagacgcgtttgcactaccgcgggtggtgtgcctgtgacccgaccaccagacgatagcacttccgcaccacgcgatcttgtgctcagcgagccttcgtcacagtcccttagagtgcaatggacggcagcctcgggcccagtgaccggatataaggtgcagtacacccccctcaccggacttggacagcctcttccgtcggagcgccaggaagtgaacgtccccgcgggtgaaaccagtgtgcggctgcgcgggctgcgcccactgacggagtaccaagtcacggtgatcgcactttacgccaactccattggagaagcagtgtccggaactgcgaggactactgctctcgaaggacctgaactcactattcaaaacactaccgcacactcgctgcttgtggcctggagatccgtgccaggagcaacgggttaccgggtgacttggcgcgtgctgagcggcggtcctacccagcaacaggaattgggtcctggtcaaggatcggtgctcctgcgagatctcgaacctggaactgattacgaagtgaccgtgagcactctcttcggccgctcggtcggtcctgcgacctcccttatggccagaacggatgcctcggtggaacaaactctgcgaccagtcattcttggccctacttcaatcttgctgtcgtggaaccttgtccctgaagcgcgcggttatcgcctggaatggcggcgagaaaccggcctcgagcctcctcaaaaggtcgtgctgccgtctgacgtgaccagataccaacttgatggtctgcaaccaggcaccgaatacagactcactctctacactcttcttgagggacatgaagtggcaacccctgccactgtcgtgcccactggacctgagctcccagtgtcgcccgtcacggatctccaggcgacggagctgcctggtcagcgagtgcgggtcagctggtcccctgtgcctggagcaacccagtacagaatcatagtgcgtagcactcagggagtggaaaggaccctcgtgttgcccggttcacaaactgcctttgatctggatgacgttcaagcgggcctgtcctacactgtcagggtttcggctagagtgggtcctcgagaggggtcggcatccgtgcttaccgtgaggcgcgagcctgaaacccctctggctgtgcctggactgcgtgtcgttgtctcggatgcaactcgtgtgagggttgcatgggggcccgtgcccggtgcctccggctttcgcatatcatggtccactggatcgggacccgaaagctcgcaaactctccctccagattcaactgccaccgacatcaccggccttcaacccggtacgacttatcaggtcgcagtgtcggtgctgcggggaagagaggaaggtcctgcagcagtgattgtggcacggaccgacccacttgggccagtgcgcaccgtgcacgtcactcaagcctcgtcgtcgagcgttactataacttggacccgcgtgcctggggcaaccggttacagagtgagttggcactcggcacatggtcctgaaaaatcgcaactggtgtcgggagaggcaaccgtcgctgaactggatggcctggagcccgacactgagtataccgtgcacgtccgagcacatgtggcaggcgtggacggacccccagcatccgtcgtcgtgcgcaccgcccctgagcctgtgggtcgggtcagtcgcctgcaaatccttaatgcgtcaagcgatgtgctccgcatcacctgggtcggcgtcactggcgcgacggcataccgactggcatggggtcggagcgagggaggacctatgagacaccaaatcctgcctggcaacaccgattcggccgagattcgtggactggaagggggtgtgtcatacagcgtgcgggtgactgctctcgtcggggatcgcgaagggaccccggtgtcgattgtggtcaccactccgcctgaagcacccccggcactgggtactctgcacgtggtgcagcgcggagaacactcgctccgactcagatgggagcctgtccctagggcccagggtttcctcctgcattggcaaccagaaggcggacaggagcaaagcagagtgcttggacctgagctttcctcctaccatctggatggacttgaaccagccacccagtacagagtgcgcctgtcagtccttggcccagcaggagaagggccatcggccgaagtgactgcgagaaccgaatcccctagggtccctagcatcgagctccgagtcgtggacacttcaattgattctgtgactctggcgtggacccccgtctcacgggcatcatcgtacattctgtcctggaggcccctcagagggcctggacaagaagtgccgggaagcccacaaactctcccaggtatctcatccagtcaaagagtcaccgggcttgagcctggagtgtcctacatcttttcccttacccctgtgcttgacggcgtgcgggggcctgaagccagcgtgacgcaaaccccagtctgtccccgcggccttgcagatgtggtgtttcttccgcatgcgactcaggacaacgcccaccgcgccgaggctacccgacgcgtcctcgaaagacttgtgcttgcactggggccactgggaccccaagcagtgcaagtggggcttctctcatatagccatcgcccttccccgctgtttccacttaacggctcgcatgaccttgggattattcttcaacgaattcgagatatgccatatatggatccttccggaaacaacctcgggactgcagtggtcactgcccatagatacatgctcgcaccagacgcccccggacgtagacaacatgtgccaggggtgatggtgctccttgttgatgaacctttgcgcggtgacatctttagccccatacgcgaagcccaagcctcaggactcaacgtggtgatgcttgggatggccggggccgacccagaacagctgagacgcctggcacctggcatggactcggtccagacctttttcgccgtggacgacggaccgtcactcgaccaggcggtcagcggccttgcaaccgccctttgtcaggccagcttcaccacccagccacgacctgagccttgtccggtgtactgtcctaaaggtcagaaaggagagcccggagaaatgggactcagagggcaagtgggacctcctggggacccaggactgcccggacgaaccggcgctcctgggccgcagggccccccgggttcggccactgctaagggagaaaggggctttcccggagcggatggccgtccgggatcccctgggcgtgcaggtaacccaggaactccaggggcacccgggctcaagggatcacctggtttgcctggaccaagaggtgacccgggagaaagaggacctaggggacctaaaggcgaacccggagcaccaggccaagtcattggaggagagggtcctggactcccaggacgcaagggcgatcctgggcccagtgggcctcctggtcctagaggccctctcggagatccgggtccacgcggtccacctgggcttcccggtactgccatgaagggagataaaggtgacagaggcgaacgaggcccgccgggcccgggcgagggaggtattgcaccaggagaacctggtctgccaggtttgccgggatcgccaggaccgcagggtcccgttggtccaccaggtaaaaagggtgaaaagggtgacagcgaggatggcgcacccggcctgccaggacaacctggatcacccggggagcagggaccacgggggccccctggggcaattggacctaagggagatagaggctttcctggccctcttggtgaggcaggagaaaagggagagcgcggtccaccaggacctgcgggttcaagaggtctgcctggggtcgcaggccgacctggtgcaaaaggtcccgagggtccccctggacccactggtagacagggggaaaagggagaacccggacggccaggcgatccagctgtggtgggtccagcagttgcaggccctaagggagaaaaaggtgatgtgggccccgcaggaccacggggtgctaccggcgtgcaaggagaaagaggtccgccaggactggtgctgcccggagatcccgggcctaagggggatcctggtgatagaggacctatcggactgactggccgtgcaggtccccccggagactcaggtccccctggggagaaaggggaccccgggcggccaggcccacctggcccggtgggtccaagaggacgcgacggagaagtgggagaaaagggcgatgaaggtccacctggagatccagggcttccgggtaaagccggagaacggggtctgcgtggtgcccccggagtccggggtcctgtgggcgagaagggagatcaaggtgacccaggtgaagatggacgcaacggttcgccgggtagcagcggacccaagggtgaccgaggtgagcctggaccacctggtccgccaggccgcctcgtcgatacgggtcctggagccagagaaaagggtgagccaggagatagaggtcaagagggcccacgtggtccaaagggagatcctggactgcctggagcaccaggggaaagaggaatcgagggattcagggggccaccagggccccagggagatcctggagtgaggggtccagcaggcgagaagggagatcgggggccaccaggtctggacggtagatcaggactggatggtaagccaggtgcagcggggccatcgggacccaacggagcagctggtaaagctggtgatccaggaagagacgggcttcctggactgagaggagaacaaggtctgcccggaccatcgggtccgcctggcctgcctggtaagccaggggaagatgggaagccaggtcttaacggaaagaatggtgaacccggagatcccggcgaagatggacggaagggcgagaagggagattcgggagcctcgggaagagaaggacgtgacgggcctaagggcgagcgcggcgccccgggaattctcggaccacagggacctccaggacttcctggacccgtggggccgccaggccaagggtttcccggagtgccaggcgggaccggtcctaagggtgaccgcggagaaaccggatccaagggtgaacagggcttgcctggagagcgaggcctgaggggagaaccaggatccgtgccaaacgtcgacaggctgctcgaaaccgcaggtattaaggcctccgcacttagagaaattgttgaaacctgggacgaatcctcgggtagctttcttcctgtccctgaaagacgccgaggccctaagggagatagcggcgaacaaggtccacctggcaaggagggaccgataggttttcctggtgaacggggtcttaaaggggaccggggagatccaggacctcagggacccccggggctcgcacttggagaaaggggacctccaggaccttcgggacttgcgggcgaacctggcaagccaggcattcccggactccctggaagggccggaggggtgggagaagcaggtagacctggagagcggggagaaaggggcgaaaagggtgaaagaggtgaacaaggacgcgatggaccaccgggcctcccagggacccctggcccaccaggcccacctgggccaaaagtgtccgtggacgaacctggtccaggcctctccggtgaacaaggacctccgggacttaagggtgccaagggagaacctggatctaacggtgatcagggtcccaagggcgacagaggtgtgcctggtatcaagggggataggggagagccaggacctcgtggacaagatggcaatccaggtctgcccggagaacgtggaatggcgggaccagagggtaagcccggtctgcagggtcctcggggtccgccaggacctgtgggtggccatggggacccagggcctcctggtgcaccgggccttgcaggaccagccggaccgcaaggaccctccgggcttaagggtgagcctggagaaaccggcccccctggaagaggacttaccggtccaactggcgcagtgggactccctggaccccccggccccagcggacttgtcggcccacagggatccccaggattgccaggtcaagtcggagaaactgggaaacctggagcacccggaagggatggggcaagcggaaaggatggggatcgtggatctcccggtgtgccaggatcaccgggtctgcctggacccgtcggtcctaagggtgaacctggtccaactggcgcaccaggccaagccgtggttggacttcctggagcaaaaggtgaaaagggtgcccctggaggactcgctggtgatcttgtcggagaacctggggcaaaaggggatcggggactgcccgggccgagaggagagaagggagaggccggtcgggctggggagccaggtgacccaggagaggacggacagaagggtgccccgggaccaaaaggttttaagggtgaccccggagtgggtgtgcctggatcccctggcccgcctggacctccaggggtgaagggagatctgggactgccagggcttccaggagccccgggtgtggtgggcttccccggtcaaaccgggccccgcggtgaaatgggacagcctggtccttcgggtgaacgcggacttgcagggccgcctggtcgtgaaggaattccaggccccctcggtcctccaggtcctcccggatcggtgggtccccccggagcatcaggtttgaagggtgataagggcgatcctggggtcggtttgccaggcccccgtggagagcgaggtgaacccggaatacgcggagaagatggtcgaccagggcaagaaggacctagagggttgaccgggcctccgggatcgcgtggagaacgcggggagaagggcgacgtcggatcggcaggccttaaaggcgacaagggagattccgcagttatcctgggtccccctggtcctagaggtgcaaagggcgatatgggggagaggggacctcgcggtctggacggtgacaaaggtccgcgtggagataatggtgatccaggagacaaggggagcaaaggggaaccaggtgataagggaagcgcgggattgcccggactgagaggattgctgggccctcaaggtcaacctggagcagcaggaataccgggggatccaggaagcccaggcaaggacggcgtccctggtatacgtggcgaaaaaggggatgtgggatttatgggccctaggggtctgaagggagaacgcggagtcaagggggcatgcggtctggatggtgaaaagggtgacaagggagaggcaggaccccctggacgaccaggactggccggacacaaaggggagatgggcgaaccgggggtgccggggcaatcaggcgcacccggcaaggaaggacttattggaccaaagggcgatcgaggttttgatggccagcccggaccgaaaggtgatcaaggagaaaaaggggaacgcggtactcccggcattggtggatttcctgggccgtccggaaatgacggctctgccgggcctcctggaccaccaggttcagtcggtccccggggacctgaaggtctgcaaggacaaaagggtgaaagaggtccaccaggggaaagagtggtgggggcacctggggtgcctggggcacccggagaacggggggaacagggacggccggggcccgctggaccaagaggagaaaagggcgaagcagcactcactgaagatgatattcgcggatttgtgcgtcaggaaatgagccaacattgtgcctgtcaggggcagtttattgcatcggggtcacggcctctgccatcatacgcagcagatactgcaggatcccaacttcatgccgtgccagtcttgagggtcagccatgcagaggaagaagagcgagtgccgcctgaggacgatgaatactcggagtattcggagtactccgtggaagagtaccaggaccccgaagcaccatgggattcggacgatccatgctcactgcctcttgatgaggggtcctgcactgcatacactcttagatggtaccatagagctgttactggctcgactgaagcatgtcatccattcgtgtacggtgggtgcggcggtaacgccaaccgctttggtacccgagaagcctgtgaaaggaggtgtccaccaagagtcgttcaatctcaaggtacgggaaccgcacaggat

SEQ ID NO: 1447 - DNA, 8832 bp, Artificial Sequence
  derived and/or modified sequence
atgacgctgcgactgctggtcgctgccttgtgcgctggcattctggcagaggcaccgcgagtccgtgcacaacaccgagagagggttacttgtactcgtctatatgcggcggacattgtgttcttgcttgacgggtcctcatcaatagggcgaagtaacttccgagaggtgagatcattcctggaggggctcgtccttccattctccggcgcggcctcagcccagggtgtaaggttcgcaaccgtacaatacagtgacgatcctcgaacggaatttggactggacgcgcttggatccgggggcgacgtgatccgcgccattagagagctgtcttataaaggggggaacactcggaccggagcagccattctacatgtggcagaccatgtcttcttgccacaactcgccagaccaggcgtgccaaaggtctgtattctgattactgacggtaaatctcaggatttagtcgacactgctgcccagaggctaaagggtcaaggggtaaagcttttcgccgtgggcatcaagaacgccgaccccgaagaactgaagagagtagctagtcagccaacaagcgatttctttttctttgtcaatgatttcagcatcttaaggaccctgttgccactggtcagtaggagggtgtgtaccactgcgggaggagtgcccgtaacacgaccccctgatgatagcacctcggccccaagggacctggtcttgagtgagcctagttcacagtcccttagagtgcagtggaccgctgctagcggccctgtaaccgggtataaggtgcagtacactcctctaaccgggttaggacagccactgcccagtgagagacaggaggtaaacgtcccggcaggagaaacttcagtgagactgaggggattacgcccacttactgaataccaggtaaccgttatcgcactttacgctaatagtatcggagaagccgtctcaggcaccgccagaactacggctctcgaaggacccgagctgactattcagaacacgaccgctcacagtctgctggttgcttggcgatctgtgcccggagccacaggatacagagtgacttggcgcgtgttatccgggggcccaacgcaacaacaggaactgggtcccggacaggggtccgtactgttaagggacctggagcctggtactgactacgaggtgacagtctctactttatttggccgaagcgtgggaccagcgacctccctgatggcaagaacggatgctagcgttgaacaaactttgagacctgtcatcctgggtcctacatctatccttctgtcatggaatctggtgcccgaggctcgtggctatcgcctcgaatggaggagggaaactggactggaaccacctcagaaggtcgtccttccatcagacgtaacgcgataccaactggacggcttgcagcctggcaccgagtataggctgacactgtacactttgctggagggccatgaagtggcaactccggcaactgtggtgccaacgggccccgaattacccgtctcccctgtcactgaccttcaggccactgaacttcccggccagagggtaagagtgagctggtcccccgtgcccggagcaacccaatacaggatcattgtgagatccacccagggggtggaaagaaccctcgtgcttcctggctcccagacggcgttcgacctggacgacgtgcaggccggcctcagttacacagtacgggtgtccgctcgggtcggaccacgtgaaggatctgcatctgtgctcacagtcaggagagagcctgaaactcctcttgctgtgcccgggctccgagtggtggtttcggatgccactagagtaagggtggcgtgggggcccgtgcctggagcttcggggttccggatctcttggagcaccgggtcaggcccagagagctctcagactctgcctcctgatagcaccgccaccgacataacaggactgcagccgggtacgacttatcaggttgcagtcagcgtcctccgtggtagagaagaaggccctgccgcagtcatagtcgcgcgcacagaccccctgggaccagtgagaacggtgcacgtcacacaggccagcagttctagtgtgaccatcacatggacccgagtacccggcgccaccgggtacagagtttcatggcacagcgcccacgggcccgagaaaagtcaactggtttctggagaggcgaccgtggccgagcttgacggactggagccagacacggagtacaccgttcacgtgcgagcccatgtagcaggagtggatggaccacccgcctctgtggtggtgcgaaccgcccctgagcccgtcgggagagtgagcagattgcagattctcaatgcttcctctgacgtactcagaatcacatgggtgggcgtcaccggggcaaccgcctaccgacttgcctggggccgaagtgagggggggcccatgcgccaccaaatcctacccggcaataccgatagtgcggaaatcagaggtttagagggcggtgtctcatattcggtgagggtaacagccctggtcggagatcgagagggaacacctgtcagcattgtcgttaccacgccacccgaggccccgcctgcacttgggacattgcatgtcgtgcagagaggggagcatagcctgaggctgcgatgggagccagtgcccagggcccaaggctttttactccactggcagcccgagggaggccaagagcagtcccgtgtcctgggcccggaactgtcatcatatcatcttgacggactagagccggctactcagtacagggtgagactgagcgtgcttggccctgcaggtgaaggcccatccgcagaagtcactgctagaacagagtcccccagggttccatctattgagctgcgtgtggtggatacctccattgactccgtaacactagcctggaccccagtgtccagagccagcagttatatcctgtcttggcgacccttacgtggcccaggtcaggaagtgcccggcagtcctcagaccctcccggggatctctagttcccagagagttacgggactggaacccggtgtgagctatattttttcacttacgccggtgctcgacggagtgaggggccccgaggcctcagtaacgcagactccagtgtgccctcgaggcctggctgacgtggtattccttccacacgcgacccaggataacgcacacagagccgaggccactcggagggtgctagagcgactagtccttgctcttggacccctgggtccccaggctgtccaggttggccttctgtcctattctcaccgacccagcccactatttcccctgaacggctcccatgacttaggcatcatcttgcagcggatccgcgacatgccttacatggacccctcagggaataaccttggaactgcagtggtgaccgcacaccgttatatgcttgcgccggatgcacccggtagaaggcagcatgtgcctggcgttatggtgctcctcgtggacgagccactgaggggcgacatcttctcccccatcagggaagcgcaggcgagtggtctgaacgtcgtcatgctgggtatggctggcgcagatccggagcagttgcgcagattagccccagggatggacagcgtgcaaaccttttttgccgtggatgatggtccttcactagaccaagcggtatctggccttgcaactgccctgtgccaagcctcttttacaacccaaccaaggccagaaccgtgtcccgtgtattgcccaaagggtcagaagggcgaacctggtgagatggggctaaggggtcaagtggggcctcccggcgatcccgggctgccgggacgcaccggtgcgcccggaccacaggggccgccaggctcagctactgccaaaggcgaacgtggatttccgggtgcagatgggcgacccgggtcacctgggagagcgggtaaccctggaacacctggagcccccggcctgaaaggttcgcccgggctgcccgggccccggggagacccaggggaacgaggaccccgtggccccaagggggaaccaggggcccctgggcaagtgattggcggcgaaggccccggactcccaggccggaagggggatcctgggccgagtggccctccaggtccacgaggccctctgggtgacccaggaccccgtggccccccaggcctccctggaaccgctatgaagggcgataagggagatagaggagagcgagggcctcctgggcccggggaaggtggaattgcaccaggagaacccggtctgccggggctgccaggctcacccggcccccagggtcccgtaggcccccctggaaagaaaggggaaaaaggggattctgaagacggagcccctggcctccctgggcagcctgggtctcctggggaacagggcccaagagggcccccaggcgccataggcccaaaaggcgataggggattccctggccccctgggcgaagccggcgagaaaggcgagcgtgggcccccaggtccagctgggagcagggggcttcccggagtggctgggagacccggagctaagggacccgaggggcctcctggccccactggaaggcagggtgagaaaggagagccaggacgccctggagatcccgcggtcgtgggtccagctgttgcgggacctaaaggcgagaagggagatgtgggacctgcaggaccacgaggcgcaacaggagtgcaaggtgaacgagggccaccaggcctggtgctgcccggagacccgggtccaaaaggagatcccggggacagaggtccgattggtctgaccggccgagccggcccaccaggagactctggtccacctggcgaaaagggtgacccaggcaggcccgggcccccaggaccggtcggcccccgaggcagggacggagaagtgggtgaaaagggcgatgaagggccacccggggacccaggccttcctggtaaggccggggaacgcgggctgcgcggggcgccgggggtgagagggccagttggtgaaaaaggcgaccagggagacccaggcgaagacgggcggaacggatccccgggttcaagcggtccaaagggagatcgaggcgaaccaggcccacctggcccgcctgggcgcctagtagatacagggcctggagcccgcgaaaagggtgagcccggcgatagaggccaggaggggccgcgaggaccaaagggcgatcctgggctgcctggagcacccggcgagcgcggaatagaagggtttaggggaccgcccggacctcagggcgatcccggggtacgcggaccagccggagagaagggagatagaggtccaccagggctggatggaagaagcggcttagatgggaagccgggcgcggccgggccttctggacccaatggcgcagcaggcaaagcaggtgaccctggccgagatgggctaccaggactaaggggagaacagggtctgcctggaccatctggcccaccagggctaccaggcaagcccggcgaagatggaaaaccaggactgaacggcaaaaatggtgagccgggggatccgggcgaggacggtcgaaagggggagaagggagactccggagcttccgggagggagggcagggacgggccgaaaggcgagagaggtgcccccgggatactgggaccacaaggaccacccgggctccctggaccagtgggccctcccggtcagggatttcctggcgttccaggtggaactgggccaaagggcgacagaggcgagactggttctaaaggggagcagggactcccgggggagagaggtctccgcggtgaaccagggtcagtgcccaacgtcgataggcttctggagacagccggaatcaaggcgtctgccttacgagaaattgttgagacctgggatgagagcagcggtagctttttaccagtccctgagcgacgccggggccccaaaggcgacagcggcgagcagggcccacctggcaaggagggacccattggctttcccggcgagcgcggactgaaaggggaccgaggcgacccaggcccacaagggccccccggccttgccctgggagagcggggtccaccaggaccatccgggttggctggggaaccaggaaaaccgggaattcccggtcttcccggtcgggcagggggggtgggcgaagccggccgacccggcgaaagaggcgagagaggtgagaaaggcgaacgaggtgaacagggcagggatggcccccctgggctgcctggcacccccggaccacccggacctcctggcccaaaggtgagcgtggatgagcctggccctggactctccggggagcagggccccccagggttaaaaggggctaagggcgaacccgggtcaaatggcgatcaaggacccaaaggtgacaggggagtccccgggattaaaggggatcgtggtgagcctggaccgcgaggccaggacgggaatcccggtctgcctggagaacggggaatggccggtccggagggtaaacctggcctgcaggggccccgagggcctcctggccctgttggcggccacggggaccctggccctccgggtgcgcctgggttggctggacctgccggcccacaagggccaagcggcctgaaaggggaacccggcgagaccggccctccgggccggggactgaccggtcccacgggtgccgtgggtctgccaggccctcctgggcccagcgggctggttggaccccagggctctcccggactgcctggacaggtgggtgagactggaaagccaggcgcaccagggcgagacggagcaagcggaaaggatggggatcgagggagtccgggagttccgggctctccaggtcttcccggaccagtgggccctaaaggcgagcccgggcctactggggcgcctggccaagcagttgtcggtctccccggagccaagggcgaaaaaggtgctcccgggggcctggcaggcgatctggtgggagagcccggcgcaaagggggatcggggactgccgggccccaggggcgaaaaaggcgaagctggcagggccggcgaacccggtgatcctggcgaagacggacaaaaaggcgctcccgggcctaagggatttaaaggagatcctggggtcggagtgcctggttcgcccggccctcccggcccgccaggagtcaagggcgatctggggcttccagggttaccgggcgcacccggagtggtggggttccccggccagacaggtcctaggggggagatggggcaacccggaccttctggcgagcgggggttggccgggccgcctgggagagagggcatccctggcccccttggacctccaggtcctccaggtagtgtggggcctcctggtgcatctgggcttaaaggcgataaaggcgaccctggggtagggttacctggtccacgaggggagcgtggcgagccaggaatccgaggggaagacggacgacccggtcaggagggacctagaggcttgaccggacctcctggatccaggggggaacgcggagaaaagggggacgtggggagcgctggactaaaaggagacaaaggggactcagctgttatccttggcccaccaggccctagaggtgctaaaggggacatgggcgaaagaggccctaggggtctggatggagataagggccctagaggcgataatggggaccctggcgacaaaggcagcaagggagaaccgggggataaggggtccgctgggctgcctgggctgcgaggactactcggaccccaaggccagccaggagccgcaggtattccgggcgacccaggctctcccggcaaggacggtgtcccaggtattaggggggaaaagggggatgtggggtttatgggtccaaggggattgaaaggcgagcgtggggtgaagggggcctgcggccttgacggtgagaaaggcgataagggagaagcgggcccacccggcaggcctgggctggcaggccataaaggagagatgggcgagccgggggtgcctggccagagtggggcaccgggtaaggagggtttaatcggcccaaagggtgacagaggatttgacggccagcccggaccaaaaggggaccaaggggagaaaggcgagcgcgggacccccgggataggcggtttccccggacctagcggcaatgacggttctgctgggcctccaggcccaccagggagcgttgggcctcgaggcccggaagggttacagggccagaaaggagagaggggaccccctggggagagggtagtgggcgctccgggtgtgcccggcgcacccggagaacgaggcgagcaaggccgccctggtcccgccgggccaaggggcgagaagggggaagccgccctgactgaagatgatattagggggttcgtgcgtcaagaaatgtcacagcactgtgcctgccaggggcagttcatagcctccggatcaaggcccctgcccagttatgccgctgatactgcggggtctcaactacatgcagtgcctgtgctgagggtgtcacacgccgaagaagaagagcgagttccgcccgaagacgacgaatattctgagtattctgagtactccgtggaggaataccaggacccagaggcgccctgggatagcgacgacccatgttcactgccccttgatgaggggtcctgcaccgcttacacgctgagatggtaccatcgggcggtaacaggaagtacagaagcatgtcacccatttgtctatggagggtgtggcggtaatgccaatcgctttggcacgagggaagcctgcgagagaagatgccccccacgagtggttcagagtcaaggaaccggaactgctcaggat

SEQ ID NO: 1448 - DNA, 8832 bp, Artificial Sequence
  derived and/or modified sequence
atgactctgagactgctcgtggctgcactgtgtgctggcatcctcgctgaggcccccagagtcagggcccaacaccgcgaaagggtaacttgcacaaggttatacgctgccgacatcgtcttcctgctcgatgggagctctagtatcggcagaagcaatttccgtgaggtcaggtctttcctagaaggacttgttctaccattcagcggtgcagcatctgcacagggcgtacgcttcgctaccgtacaatattccgacgatcccagaacagaattcggcctggacgcgttggggagcggcggagacgtaatcagggccatacgggaactgagctataaggggggcaacactcggacaggcgctgcgatcctacacgtggccgaccacgtgttcctaccccagcttgctcggcccggtgttcccaaagtatgtatactgattacagatggcaagagccaggacctcgtggatactgctgctcagcgactgaagggccagggcgtgaaactgtttgccgttgggataaaaaacgccgaccctgaagagcttaaacgtgtagcttctcagcccacttccgacttcttcttttttgttaatgatttcagtatcctcagaacactgctgccacttgtatcacggcgggtctgtaccactgctggaggtgtgccggttacacggccaccagacgattctacatctgctcccagagatctagtgctctcagagcccagttcccagtcactccgggtccagtggaccgccgcctccggacccgtgacaggttataaggtccagtatactccccttaccggactgggacagcctttaccctcagagcgtcaagaggtgaatgtcccggctggggaaactagtgtgcggcttcgcggactgaggcccctgaccgagtatcaggttacagtgattgccctgtacgctaattccattggtgaggccgtgagcggtacggcccgaactactgccttggaaggccccgagctgacaatccagaatacaaccgcacactcgctgctcgtcgcatggcgctctgtaccaggagccacgggataccgcgttacctggcgggtgctgtccggaggacccacacaacagcaggagctcgggcccggtcagggcagcgtattattaagagatctcgagcccggcactgattacgaagttaccgtgtccaccctgttcggcagaagtgtgggcccagccacttcccttatggcacgcacagacgcgtcggtggaacagacattgcgacctgttattttagggcctacttctattctgctctcttggaacctcgtgcctgaggcgagaggctacaggctggaatggaggagagaaaccggtctcgaaccaccacagaaggtagtgttgccaagcgatgtcacacggtatcagttggacggtctgcagccaggcactgagtaccggctgaccctctacaccctcctggaaggtcacgaggtcgctacacccgctaccgttgtgcctactggccctgagttgcccgtgtcccccgtgactgatttgcaggccacggagctgccggggcaacgcgtgcgtgtttcctggtctcccgttcctggggccacccagtatcggatcatagtgcgaagcacgcagggtgtggagagaacgctggtactccccgggagccaaaccgcgttcgatctggacgacgtccaggctggactgtcatatactgtgagggtatctgctcgcgtcggccctcgggaaggctccgccagcgtgctgacagtacggagggaaccggaaactccactcgccgttcctgggttgcgtgtggtcgtaagcgatgcgacacgtgtcagagtcgcctggggcccagtgcccggtgcttcaggcttccgcatttcttggagtactggatcaggacccgaatcaagccaaaccttacctcccgacagtactgcgaccgacataaccggcctacagccaggcacaacttaccaagtggccgtgtctgtcctaagagggagggaggagggtcccgctgccgtgatcgtggcccgaactgaccccctggggcccgtccggactgtgcacgttacccaggctagttcttcatcagtcacgattacttggactagagtgccaggcgctacaggatatcgagtgtcctggcactccgcacacggacctgaaaagtctcagctggtgtcgggcgaagcaaccgtggcagagctggatggtcttgagcccgataccgagtatactgtgcacgtaagggctcacgtggccggcgtggatggccccccagcctccgtggttgttcgcacggcgccagagccagtcggacgcgtcagcaggctccaaatactgaatgccagttcagacgtgctgcgaatcacgtgggttggggtgacaggggctaccgcctatcgcttagcatgggggaggtcggagggcggccccatgcgtcatcagatcctgccaggcaatacagactcagctgagatcagggggctggaagggggggtgtcttatagcgtgcgggttaccgctctggtgggagatagagagggcactccagtaagtattgtggttacaaccccgcctgaagcaccgcccgcactgggcacactgcatgtggttcaaaggggggaacacagcctccgactccgctgggaaccggtcccaagagctcaaggctttttgctccattggcagcctgagggcgggcaggagcagtctagggtgctaggcccagagctgtcatcgtaccatctggatggcttggagccggcgacccagtacagggtgcgtctctctgtgctagggcctgcgggagagggccccagtgcagaggtcactgctcgcacagagagtcctagggtgccctctattgaactcagagtggtagatacatccatcgatagcgttacactagcctggactcccgtgtcacgagccagctcttacatactatcttggcggccgctccgtggtccaggccaggaagtcccgggatccccacagactctgcctggaatctctagttcacagcgagtgactggtctagagcctggggtcagctatatttttagtcttacacctgtcctcgacggcgtgcgggggcctgaggcatccgtgacgcagacaccggtatgcccccgggggctagctgatgtggtgttcctgccccacgctacacaggacaatgcccaccgcgcagaagcgacgcgccgggtgctggagcggctggtgctcgctttgggcccactgggtcctcaggcagtgcaagtgggcctgctctcttattcacaccgtccgtccccattgtttccgctcaacggaagccacgatctgggcatcattctccagcgcataagagatatgccttatatggacccatctggaaataacctggggacagccgtcgtgaccgcgcatcgctatatgctcgcccctgacgctccgggtcggagacaacacgtgccaggcgtgatggtactacttgtggatgaacctctgcgcggcgacatcttctcacccataagagaagcccaggcttctggtttgaatgtagtcatgctggggatggctggcgcggatccagagcagttgcgacgtctggcaccgggcatggactctgtgcagacgttcttcgcggtggatgatggcccctccctcgaccaggcggttagcgggttagctactgccctgtgccaggcctctttcacgacccagcctaggcccgaaccttgcccagtttactgtcccaagggccagaagggggagccaggcgaaatgggtcttaggggacaggtcggccctcccggcgaccccggactaccagggcgcacaggtgctcccgggccgcagggaccacccggcagcgccacggctaagggggagaggggttttccaggggcggatggacggcctggcagcccaggccgagccggtaatccaggcacacctggagcgcccggacttaaggggagcccaggattgcccggaccccggggagaccccggagagcggggacctagggggccaaagggcgaacccggcgcaccagggcaggtgatcgggggcgagggcccagggctgccgggtcgtaaaggcgaccccggtcctagcgggcctccgggacccagaggtcctctgggcgaccccggaccacgcggccctcctggcctgcccggaaccgcaatgaaaggcgacaaaggcgatcgtggagagaggggaccaccaggtccaggcgagggaggtattgcaccaggggaacccggattgcccgggctcccaggcagtcccggcccccaaggccctgtggggcctcctggtaaaaaaggtgaaaagggagatagcgaagatggggctcctggactgcccggccagcccggatccccaggtgaacaggggcccagagggcccccaggggctataggccccaaaggagatcgagggtttcccgggcctttgggcgaggccggggaaaagggcgaacgcggaccccctgggcctgctgggtcacgcggactgcccggggtcgcggggagacctggcgcaaagggtccagagggaccacctggccccaccgggaggcagggagagaaaggggagccagggaggccaggcgacccggcggtggtggggcccgcagtggcagggccaaagggtgaaaagggcgatgtaggccccgccggtcccaggggtgccacaggcgtccaaggagagcgcggccctccaggactggtgcttccaggcgaccctgggcccaagggtgacccaggggacagggggcccattggactaaccggccgcgccggccctcccggcgatagcggccccccaggcgaaaaaggagacccaggccggcccggccccccgggtcctgtaggccccagaggaagagatggggaagtcggagaaaaaggcgatgaagggcccccaggagaccccggactccctggcaaagctggcgaaaggggtctgcgtggtgcccctggggtcagaggtcctgtcggcgagaagggagaccaaggcgatccgggagaggacggcagaaacggaagcccagggtcatccggacctaaaggagacaggggagaaccagggcccccagggcctcccgggcgactcgtggatacaggacccggtgcaagggagaagggcgagccgggggacagaggccaggagggaccaagagggccaaaaggcgatcctgggcttcctggggctccaggcgagcgcggcatcgagggtttcagaggtccccctggccctcagggggatcccggcgtgcgagggccagccggggagaagggggatcgtggacctcccgggctggacggcaggtccgggctagacgggaaacccggcgcagctggacctagcggccctaatggggccgcaggcaaagccggcgatcctggccgagatggcctgcctggcctgcgtggtgaacagggcttgcctggtcctagcggtccccctgggctccctggtaaaccgggcgaagacggtaaaccaggtctcaatggcaaaaatggcgagcctggcgacccaggcgaagacgggagaaagggggaaaagggagactccggcgctagtgggagagaaggacgtgacggacctaaaggtgagcggggcgcaccaggtattttgggaccccaaggaccgccagggctgccaggcccagttggacctcccggacagggcttccccggagttccagggggaacagggcccaaaggcgatagaggagagactggatccaagggtgaacaggggttgccaggtgagaggggcttaagaggggagcccggctcagtgcccaatgtagacaggctcctggagactgcaggaattaaagcctcagccctgcgtgaaatcgtagaaacctgggatgaatcatctggaagttttcttcctgtgcccgagcgacggagaggccctaagggcgatagcggcgagcaaggcccacctggaaaggagggtccaattgggttcccaggagagagaggcctcaaaggcgacaggggcgaccccggcccgcaggggccgcctgggctggcgttgggtgaaagaggcccacccggcccttcaggcttagccggagagcctgggaaaccggggattcctggcctccccggaagggccggaggcgtgggagaagctgggcggcccggtgaacggggggagcggggggaaaagggtgaaaggggtgaacagggtcgtgatggaccacccggtctcccaggcacacccggcccgcccggtccaccagggccaaaagtgtctgtggatgaacctggcccaggtctgtctggagagcagggaccccctggcctgaagggagccaaaggtgagcccgggtcaaatggggaccagggccctaagggggacagaggggtgcctgggatcaagggcgatcggggggagcccggcccccgcggccaagatggcaaccccgggctgcccggggaaagaggaatggccggtcccgagggtaaacccggtctacagggtcccaggggcccaccaggccccgtcggaggacacggtgaccctggcccacccggagccccaggactcgctggccccgctggaccccagggcccaagcgggctaaaaggagagcccggagaaactggacctcccggtcgcggactgactggacccacaggtgccgtgggcctgcccggaccgcccggcccgtcagggctggtgggcccacaaggatccccgggactaccaggacaggtgggcgagaccggcaaacctggcgctccaggccgtgatggggcctcgggaaaagacggagaccggggatcacccggggtgcccgggtctccaggactgccaggtcccgtcggtccaaaaggggagcccgggccaacaggagccccaggccaggcagtcgtaggcctcccgggtgcgaagggcgagaaaggagcaccaggtgggttggccggggatctcgttggtgagccaggcgcaaaaggggacagagggctcccggggccccgcggggagaagggagaggcaggcagggccggcgagcctggagatccaggtgaagatgggcaaaaaggggctcccggaccaaagggctttaaaggcgacccaggagtgggcgtgcccgggtcaccgggccctcctgggcctccgggggtaaagggggatttgggtcttcccgggctgccgggggctccaggcgtcgtcggatttcctggccagaccggcccacggggagagatgggccagccgggcccgtcgggtgaacggggactggccgggccccccggccgggaggggatacccggccccctgggcccgccgggtcccccgggctcagttggaccccccggcgcaagcgggcttaaaggggacaaaggtgatcccggggtggggctgccgggccctcggggggagaggggcgaaccaggcattcgcggggaggatggcaggccaggccaggaaggaccgcggggccttacagggcctcctggctccagaggcgagcgtggggagaagggagacgtgggatcagccgggctcaaaggggacaagggggactcggctgtaatactcggccctcccggaccaaggggagcaaagggagatatgggagagaggggaccgcgcggattagatggggataagggccccagaggggataacggggaccccggcgacaagggcagtaagggcgaacccggagacaaagggtccgctggtctgccagggctcagaggactgctggggcctcagggccaacctggggccgccgggatccccggggatcctggatctccagggaaagacggcgtccctgggatacgcggggaaaagggggacgtgggctttatgggacctcgtgggctaaagggcgagagaggagtcaagggagcatgtggacttgatggggagaaaggcgacaaaggggaggctggccccccagggaggcccggcctcgctgggcacaaaggagaaatgggggagcctggagtgccaggacagtcaggtgctccaggaaaggaaggactgataggccctaagggagatagaggcttcgacggacagcccggcccaaaaggagatcagggagagaaaggagaacgcggaacacccggaattggcggattccccggtccgtctggcaacgatggctccgctgggcccccaggccctcctggaagcgtgggacctaggggtcccgaggggctgcagggccaaaagggggagcgcgggccccctggggagagagtagtgggggcccctggggttccaggagcacctggagaaagaggcgaacagggacggcccgggcccgccggtcctcgcggagaaaagggggaggctgcactgacggaggatgacattagaggattcgtgcgccaggagatgtctcaacactgcgcctgtcagggccagttcatcgccagtggtagcaggcctctacccagctacgctgctgataccgccgggtctcagctgcacgcggttccagtgctcagggtgtcccatgccgaggaagaagagagagtgccaccggaggatgatgagtacagcgagtacagtgagtatagcgtcgaggagtatcaggacccagaagccccatgggactcagacgatccttgttctctgccactcgacgaagggtcttgtacagcatataccttgaggtggtatcatcgtgcggtgaccggctctaccgaagcttgtcacccgtttgtgtatggcgggtgtggcggaaatgcaaacaggttcggcactagagaggcctgtgaacgcaggtgtcctccaagagttgtccagtcccagggcaccggcaccgcacaggat

SEQ ID NO: 1449 - DNA, 8832 bp, Artificial Sequence
  derived and/or modified sequence
atgacgctgaggcttcttgtggcagcactgtgtgccggtattctggcagaagccccaagagttcgagcacaacatcgggagagagtcacttgtaccaggctgtacgcggcagatattgtattccttctggatggtagctcatcaatagggaggtcgaactttcgtgaagtgcggagctttctggaaggacttgtcctgccgttctccggggcagcgagcgcgcagggtgtccgctttgcaacggtccaatactcagacgatccgagaactgaatttggtctggacgccctgggttccggtggagacgtgatcagagcaattagagaactttcatacaagggtgggaatactcgtaccggtgcggcaattctccatgtggcggaccatgtgttcctgcctcaacttgcacgaccgggtgtgcccaaggtgtgtattcttatcaccgatggcaagtctcaagaccttgtggataccgccgcccaacgcctcaagggccaaggagtgaaactgtttgcagtggggatcaagaacgcagaccccgaggagttgaagcgcgtggcatcgcaaccaaccagtgactttttcttttttgtcaacgatttctcgatccttcgcactcttctccctctcgtcagcagaagagtctgcaccactgcaggaggggtgcccgtgacccgtccccccgatgattctacctcggcaccgagagacttggtgctctcagaaccgtcgtctcagtctctcagagtgcagtggaccgcagcatccggacccgtgacgggctacaaggtgcaatacacccctcttaccggactgggccagcctctgcctagcgaacgacaagaagtcaacgttcctgcaggggaaacttccgtcagactccggggactgcgtcccttgactgaataccaagtgaccgtgattgccctgtacgcaaactctatcggggaagctgtgagcggaacggcacgaaccactgcactggagggtcctgagcttaccattcaaaataccaccgcccattccctgcttgtcgcttggagatccgtcccaggagccaccggatacagagtgacctggagagtgctgagtggagggccaacccaacagcaagaactgggaccgggacaaggatccgtgcttcttcgcgaccttgagcctggcacggactacgaagtgaccgtctcaaccctgttcggacgcagcgtcggccctgcaacgtcactcatggcccggactgatgcgtctgtggaacagactcttcggccagttatcctcggtccaacttccattcttttgtcttggaacctcgtccctgaagctcgaggctacaggcttgaatggcggcgagaaaccggactggagcctccacaaaaggtggtgctgccttccgatgtcacgcgctaccagctggacggcctccaaccaggaactgagtaccggttgaccctctacactcttctcgaggggcatgaggtcgcaactcccgcaactgtggtcccaacgggtcctgaactcccagtgtcccctgtgaccgatcttcaggcaactgaattgcctggacagcgcgttcgcgtgtcctggtcgccagtgcctggtgccacccagtaccgaataatcgtccgcagcactcagggtgtggagagaaccctggtgctccccggatcccagacggcatttgatttggatgatgtgcaagctggactttcctacaccgtgcgggtgagcgccagagtggggcctagagaaggatcagcatcggtgcttaccgtccgcagagaaccagagactcctttggccgtccctggactgcgagtcgtggtgtcagatgcaactagagtgagagtcgcctggggaccagtgcccggcgcatcgggttttcgaataagctggtcgacgggttccgggccagaatcctcccaaacccttccgccagatagcactgcaaccgatattactggactgcaacctggaaccacctaccaggtcgccgtgagcgtgctcagaggtagggaagaaggccccgcagcagtgatcgtcgcacgtactgatcccctcggtcctgtgagaactgtgcatgtgactcaggcatcgtcgtcctcggtgaccataacgtggacccgagtgcctggggccactggctacagagtctcgtggcactcggcgcacggcccggagaaatcgcaactggtgtccggagaagcgaccgtggcggaactcgatggacttgaaccagacaccgaatacaccgttcatgtgagagctcacgtcgccggagtggatggaccgcctgcatcagttgtcgtccggaccgctcctgagcctgtgggaagggtttcccgcctccaaattcttaatgccagctcagatgtccttcgcattacttgggtgggagtcaccggcgcaactgcatataggttggcctgggggagatcggaaggaggtcctatgcggcatcaaattcttcccgggaacaccgattcggccgaaattagaggactggagggaggagtgtcgtactcggtgagagtcactgccctggtgggagacagggaggggacgcctgtctccatcgtggtcaccaccccacccgaagcaccaccggctctgggaactttgcacgttgtccaacggggtgaacattccttgcgactgcgttgggaacccgtccccagagcacaaggtttcctgctgcattggcaacctgaaggcgggcaggaacagtcgagggtgctgggacctgaactctcatcctaccatcttgatgggttggaacctgcaacccagtacagggtgagactgagcgtcctcggtcctgcaggtgaaggaccttctgccgaggtgactgccagaactgagagcccaagagtcccttccatagaactgagagttgtcgatacctccattgattcggtgacgctggcgtggacgccagtgtcgcgggcatcgtcttacatcctctcgtggcgaccgctgcgaggtccaggccaggaagtcccaggtagcccccaaaccctccctggaatctcgtcaagccagcgcgtcactggacttgaacctggtgtctcatacatattcagtctgaccccagtcttggacggtgtacgcggacccgaagcgagcgtgacccagactccagtttgtccgcgaggtctggcagatgtggtgtttctccctcacgcaactcaagataacgcacatagagcagaagcaactcggcgggtgcttgaacgtcttgtgcttgcactggggcctctcggccctcaagcagtgcaagtgggacttcttagctattcacataggccttcccccctttttcctctgaacggatcccatgatctcggcattattcttcagagaattcgcgacatgccatatatggatccgtccggcaataatcttgggaccgcagtggtcaccgcacaccggtacatgctcgcaccagacgcaccggggcgtcggcaacacgtgcctggggtgatggtgcttctggtcgacgagccgctgcgcggcgacattttctccccgattcgcgaggcgcaggcctcgggactcaacgtggtgatgctcggtatggccggtgcggatcccgaacaactccggcggcttgcacctggaatggattcagtgcagactttctttgcggtggacgatggcccatcgctggaccaggcagtgagcggacttgccaccgcactttgtcaggcctcgtttactacccagccgaggcctgaaccgtgtcctgtgtattgtccaaaaggacaaaaaggagaacccggtgagatgggtcttagggggcaggtcgggccaccaggggaccccgggcttcccggaagaaccggtgcacctggtccacaaggaccccccgggagcgcaacggccaagggagagcgcggttttcccggtgcggatggacgtcctgggtcgcctgggagagcaggtaaccctgggactccaggggccccgggactgaagggatcccccggactcccaggacccagaggggaccccggagaacgaggaccgcgcgggcccaaaggtgaaccaggtgcccctggacaagtgatcggtggggaaggtcccgggctccctgggagaaaaggagatccaggaccgtcggggcccccgggtccgagaggtcctcttggcgaccctggtccaagaggaccgccaggcttgcccgggactgcaatgaagggcgacaagggcgaccgcggtgagagggggcccccaggacccggagaagggggcatcgcacccggtgagccgggcctccctggattgccaggatcccccggacctcagggacccgtaggtccgcccgggaaaaagggcgaaaagggagactcagaagatggtgcaccagggctgccaggtcaacccggatcccctggagagcagggtcctagaggaccccctggagccataggtcctaagggcgaccggggcttcccaggtcctctcggcgaggccggagagaagggagagcgaggacctccaggcccagcaggtagccgcggactgccgggtgtggcggggcgcccgggggccaagggacctgaaggaccgcctggacccaccggcagacagggggaaaagggagaacccggtcggccaggtgatcccgcagtcgtgggtcctgcggtggcaggacctaaaggcgagaagggagacgttggacccgctggccctcgcggggcaactggcgtgcaaggcgagcggggtccacccggactcgtccttcctggtgacccaggccccaaaggtgatccaggcgacaggggaccaatcggtttgaccggtcgggccgggccgcctggggactcgggtccgccaggagagaaaggtgacccgggtagacccggtccccctggaccggtgggaccgcggggcagggatggagaagtcggagaaaagggagatgaaggcccacccggtgatcccggtctgccaggaaaggcaggagagcgtggcctgcgcggagcaccaggagtccgtggtcctgtgggagagaaaggggaccagggggatcctggagaagatggccgcaatggatcaccgggttcatcgggcccgaagggtgatcggggtgaaccgggccctcccggacctcccgggagactggtggatactggcccgggtgcccgggaaaagggcgagcccggtgacaggggacaggaaggtccccgcggtccaaagggagatccggggttgccaggagcgcctggtgaacgaggaattgagggttttcggggaccgcctgggcctcagggagatccaggagtgagagggcccgcgggagaaaagggggatcggggaccgccaggacttgatgggagaagcgggctggacggcaagccaggtgctgcgggaccttctggccctaatggagcggccggaaaggcaggggaccccggcagagacgggctgcccggcctgcgcggagaacaaggactgcccggtccttcggggcctcctggcctgcccggtaagcctggcgaagatggtaagccaggccttaatggaaaaaacggtgagccgggggatcccggtgaggatggaagaaaaggcgaaaaaggcgacagcggtgcatccggtagagaaggccgtgacggcccaaagggggaacgcggtgctccgggaattctcggaccccagggcccgccagggcttcccggacccgttggaccccctggccaaggctttcctggtgtcccaggggggacgggccctaaaggtgatagaggagaaactggatcaaagggagaacaggggcttcccggggagcgggggctgagaggagaaccaggatcggtgccaaacgtggataggcttcttgaaaccgcaggcattaaggccagcgcgcttagagaaattgtcgaaacgtgggatgagtcgtcgggatcctttctccccgtccctgagcgaaggcgcggtcccaagggtgattctggtgaacaaggtcctcccggaaaggaaggtcctatcggatttcctggagaacgcggcctcaaaggagacaggggtgaccccggcccacaagggcctccaggcctcgcacttggggagcgtgggccaccaggcccatccggcctcgcaggtgaaccgggtaagccaggcattcctggccttccaggcagggccggaggagtcggagaagcaggacggccaggcgaacggggggagcgaggggaaaagggcgaacgaggtgagcagggacgggatggcccaccaggccttcccggaactccaggcccgccaggtcctccggggcctaaggtgtcggtggatgagcctggaccaggactgagcggtgagcagggcccccctggacttaaaggcgctaagggcgaacctggttcaaacggtgatcaaggacccaagggtgataggggcgtccctggcatcaagggggatagaggtgagcctggtcccaggggccaggatgggaatccgggattgccaggggagagaggtatggcgggcccggaaggtaagccaggattgcagggacctcgtggtcctccaggcccagtaggcggacatggtgacccaggcccgccaggagcaccaggtcttgccggaccagctgggcctcaagggccatcgggactcaagggagagcctggcgaaactggacctccgggtagaggacttaccggtccaactggtgccgtgggactgccaggtccccccggcccttcgggactggtcggaccacagggaagccctggacttccaggccaagtgggcgaaactggtaagcctggagcacctggacgggatggggcgtcaggaaaggatggagatcgaggtagcccaggtgtgccagggtcacccggactccccgggcctgtggggcccaagggggaacccggtccgaccggagcacctggacaggctgtggtcggacttcctggcgcaaagggcgaaaagggcgcaccaggaggcctggcaggggatttggttggtgaacctggcgctaaaggcgaccggggcctcccaggaccgagaggagaaaaaggagaggcaggacgcgcgggagaacccggggatccaggagaagatggacaaaagggcgcacctggccctaagggtttcaagggtgatcccggagtgggagtccctggtagccctggaccgccgggaccacctggtgtgaagggggacctcggtctgcctgggctgcctggagctcccggagtggtggggttcccaggtcaaaccggcccgaggggcgaaatgggtcaaccaggaccatcaggagagcgcgggttggctgggcctccaggtcgagaaggtatcccaggtcctcttgggcccccaggccctccagggtcagtaggaccgccgggcgcgagcggactgaagggggataagggcgatccaggcgttggcctgcctggacctcgtggggagcgaggggagccaggcattagaggtgaagatggccgacctggacaagaagggccaaggggactgactggtccaccaggaagcagaggcgaaagaggagaaaaaggggacgttggaagtgctggactgaagggagataagggtgactccgccgtcatactgggtccgccagggccacgcggcgccaagggcgacatgggtgaacggggtcctagggggctggatggagataaaggcccacgcggagacaacggagatccgggagataagggttcaaagggtgaacccggcgacaagggatcagcaggacttcctggactgagaggacttctgggacctcaagggcaacctggagccgccgggattcctggtgatccgggtagccccggtaaggatggtgtgcccggtatccgcggagaaaaaggggatgttggatttatggggccaagagggctgaaaggagagagaggtgtgaagggtgcctgcgggcttgatggggaaaagggagacaagggtgaggctgggccacctggcaggcctggccttgcaggacacaagggtgagatgggggagcctggagtgccaggtcaatccggagcgcccggaaaagagggtctgattggtcctaaaggggatcgaggatttgatggccaacctggccccaaaggggaccaaggtgagaaaggagaaagaggcactcccggtatcggtgggtttccgggcccatcgggcaacgacggatccgccggaccacccggacctcccggttcagtgggtccccggggtccagagggtctgcaagggcagaaaggggaacgcggaccacctggagaacgtgtggttggtgcacctggcgtgcctggtgcaccgggggaacgaggcgaacaggggcgtcctggtcctgctggtcctcgcggagaaaaaggtgaagcagcactcactgaggatgacatccgcggattcgtccggcaagaaatgtcccaacactgtgcctgccaagggcagtttatcgcttcgggctcgcggcctcttccttcctacgccgcagacactgcaggtagccagctgcatgcagtgcccgttctgagagtgtcgcacgccgaggaggaggaaagggtgccaccggaggacgatgaatacagcgagtactccgagtacagcgtcgaggaataccaggaccctgaggcgccatgggatagcgatgatccgtgcagcctgccacttgatgaaggctcgtgtaccgcgtacaccctgcgttggtaccatcgggctgtgacgggatccactgaggcgtgtcaccctttcgtgtacgggggctgtggaggtaatgcaaacaggtttggaaccagggaggcctgcgaacgcaggtgcccgccaagagtggtccagagccaaggcactggaactgcgcaggat

SEQ ID NO: 1450 - DNA, 8832 bp, Artificial Sequence
  derived and/or modified sequence
atgaccctgagacttctcgtggcagcactctgcgctggtattcttgcggaggcaccgcgagtccgcgcgcaacatagggaacgtgtgacctgtaccagactctacgcagcagatatcgtgtttctgctggatggatcctcctcgattggtagatcgaattttcgcgaagtgcgatcctttctcgaaggcttggtgctgcctttctctggtgccgcctcagcacagggagtccgctttgcaaccgtccagtacagcgacgatcctaggaccgaatttggactggatgcccttggctccggaggagacgtcatccgagcaatccgggaactctcatacaaaggcggaaacaccagaaccggtgccgccatcctgcatgtggcagatcatgtctttctgccacaactggcaaggccgggtgtgcctaaggtgtgcattctcataactgacggaaagtcgcaagacctggtggataccgcagcacaaagactcaaaggtcaaggggtgaagctgttcgcagtgggaatcaagaacgcagatcctgaagagctcaaaagagtggcaagccaaccgacttcagatttcttctttttcgtgaacgatttttccatcctccgtacccttctgcctctggtgtcgcgaagagtgtgtaccactgcaggcggagtcccagtcaccagacccccagatgatagcacgtcggccccacgggatcttgtgctctcggagccttcatctcaatccctcagggtgcaatggactgcggcgagcgggcccgtgactggatataaggttcagtacactcctcttaccggcctcggacaaccccttccaagcgaacgccaggaagtgaatgtgcctgcaggagaaacgtccgtgcggctccggggactgcgacctcttaccgaataccaagtcactgtgatcgcgctgtacgccaactccattggcgaagccgtgtccggaaccgcccgtaccaccgcactcgagggacctgagctgactatacaaaataccaccgcacattccctgcttgtcgcatggcgcagcgtgcctggggctaccggttacagagtcacctggagagtcctttccggaggacctacccaacagcaagaactcggtcctgggcaaggatcagttcttttgagagatcttgaaccaggaaccgattacgaagtgaccgtgtcgactttgtttggacgctccgtcggtcctgcaaccagccttatggcaagaactgacgcatcagtggaacaaacccttcgcccagtcattcttggtcctaccagcattcttctgtcctggaacctcgtgcctgaagcacgcggataccggcttgaatggcgtcgggaaactggcctggagcctcctcaaaaggtggtgcttccatccgatgtgacccgttaccaactcgatggactccagcctggtactgaatataggcttactctctacaccctgcttgagggccacgaagtggcaaccccggccactgtggtgcctactggaccggaactgcctgtgtcacctgtcaccgaccttcaggcaaccgagctgcctggccagagagtccgcgtctcgtggtccccagtgccaggagccacccaatatcgaataatcgtgagatccacccagggagtggaaagaactcttgtgctgccaggatcccaaacggccttcgacctggatgacgtccaagccggcctgtcatacaccgtcagggtttcggccagagttggtcctagggaagggagtgcatcagtgctgaccgtgcggcgcgaaccagaaaccccacttgcggtcccaggactgagagtcgttgtgtcagatgcaacgcgcgtgagagtggcatggggaccagtgcctggagcaagcggatttagaatctcctggtctactggctccggaccagaaagctcacagactctccccccagatagcactgccaccgacatcaccggccttcaacccggcactacttaccaagtcgccgtgtcagtgctgcggggtcgcgaagaagggcctgcagcagtgatcgttgcgcgtactgatccgcttggacctgtcaggacggtccatgtgactcaagcctcctcgtcgagcgtgaccatcacttggaccagagtgcctggcgctactggttaccgcgtctcgtggcattctgcacacggcccagaaaagagccagttggtgtcgggagaagcgactgtggcagagcttgatgggcttgaacctgataccgagtacactgtgcacgtgcgggcacatgtcgcaggagttgacggaccacccgcctcggtggtggtgagaactgctcccgagcctgttggtagagtctccagactgcagatccttaacgccagctcggacgtcctgcgcatcacttgggtcggcgtgactggggccactgcataccgtctggcttggggacgttcagagggaggccctatgagacatcaaattcttccaggcaatacggattcagcagaaatacgaggacttgagggtggtgtcagctactccgtcagagtgactgcactcgtgggtgatcgggaaggtactcctgtgtccattgtcgtcaccactcccccggaagcaccaccagcactgggaactcttcatgtggtgcagaggggggaacactctcttagacttcggtgggagcctgtgcctagagcgcagggattccttcttcactggcaacctgaaggaggacaagaacagagccgcgtcctcgggcctgagctgtcctcgtaccatttggatggtctggagcctgccacccagtaccgggtccgcctcagcgtgctggggcccgccggcgaaggtccatcggcagaagtaacggcacggactgaatcacctcgggtgccgtcgatcgagctcagagtggtggacactagcatcgattcagtgaccctcgcgtggaccccggtgtctcgggcatcgagctacatactgtcgtggcgtccacttaggggtcccggtcaagaggtcccgggtagcccacagaccctccctggtatctcgtcgtcacaaagagtgaccggacttgaaccaggggtcagctacattttctcgcttacgccagtgttggatggagtcaggggaccagaagcaagcgtgacccagactcctgtgtgcccaagaggcctggcagatgtggtgttcctgccccatgcaactcaagataacgcccacagagctgaggcaactcggcgggtgctggaacgtttggtgctcgcccttggccccctgggtccccaggctgtccaggttggacttctgagctactcccacagaccatcccctctgtttccactgaacggatcccatgatctgggaattatcctgcagagaataagagatatgccttacatggacccttcgggaaacaatcttgggactgcagtcgtgacggcgcatagatacatgctggccccggatgcacccggccgtcgccagcatgtccctggagttatggtccttctggttgatgaacccctccgcggcgacattttcagtccaatacgggaagcgcaagcatccggtctgaatgtggtgatgctgggcatggctggcgccgatccggagcagcttcggcggctggcaccaggcatggattccgtgcaaacctttttcgcagtggacgacggaccttcccttgatcaggcagtgagcggactggccaccgctctttgtcaggctagcttcactacccaaccacgaccagaaccttgtcctgtttactgtccaaagggacaaaagggggagccgggagaaatgggactgcgaggccaggtgggccctccaggcgacccgggactgcctggccgaaccggtgccccgggtccacaagggccgcctgggagcgcaaccgcaaagggtgaacgcggctttcccggtgcagacgggcgacccggttcgccgggacgcgcaggaaatcccggtacccccggtgcacctggactcaagggtagcccaggtctgccaggaccaaggggtgacccgggggagagaggtcctcggggtccaaaaggagagccaggggctccaggacaagtgatcggcggcgaagggcctggcttgccgggtaggaaaggggatccggggccttcgggcccacctggaccgcgcggcccgttgggagatcccggacctagaggaccgccagggctgcccggtaccgcaatgaagggcgataagggggatcgtggtgaacggggacccccaggtccaggagagggaggtattgcgcccggagaaccaggcctgcctggactgccagggtcaccaggacctcaaggtcccgtgggtcccccgggcaagaagggagagaagggagatagcgaagatggggcgcctggcctgcccggtcagcccggttcccctggcgagcagggtcccagaggaccaccgggtgctattggaccgaagggagatcgcggatttccggggccacttggcgaagcaggcgaaaagggagagaggggtccccctggcccggcaggttcccggggtttgccaggggtggcaggacgccccggagcgaagggtccagagggcccacctggtcccaccggtcggcaaggtgaaaagggggagcccggacgcccaggggatcccgctgtcgttgggcctgcagtagcaggccctaaaggtgaaaagggagacgtcggtcctgcagggcctcgaggcgctactggtgtgcaaggagaaaggggtcctcctgggctcgtgctccccggagatcctgggccaaagggagatccaggagatcgtggccctattgggcttactggcagagcgggaccacccggggactccgggccgcctggggagaaaggcgatcccggaaggccagggcctcccggcccagtaggtccgcgcggacgtgacggtgaggtgggagagaaaggagatgagggacctccaggtgaccccggtctgcccggaaaggccggtgagcggggacttaggggtgcgccaggcgtccgtgggcccgtgggcgagaagggcgaccaaggggatccaggcgaggatggacgaaacggatcgcctgggtcgtccggtccaaaaggtgataggggagagccagggccacctggaccacccggtaggctcgtcgacactggtccaggagcaagggaaaagggggaacccggtgatcgcggacaggagggtccacgggggccgaagggtgaccctggacttccaggagccccaggggagagaggaattgaaggatttcgaggaccacctggcccccagggagatccgggtgtccgaggtcccgcaggagagaaaggggatcgagggcctccaggactggacggtcgctcgggactcgacgggaaacccggtgcagcaggtccctcgggtcctaacggtgctgcaggaaaggcaggggacccgggacgtgatggtttgcctggtctgaggggggaacaggggcttccaggtccatcaggaccccctggacttcctggtaagccgggtgaggatgggaagccgggcctgaatggaaagaatggagagccaggcgatcctggcgaagatggacggaaaggtgaaaagggagattccggcgcatcaggtcgggaaggaagagatggacctaagggagaacggggtgcaccaggcattttgggcccacagggacctccgggacttccaggccccgtgggacctcctggacagggctttcccggagtccctggcggcactggtcctaagggggaccgaggagagactggatctaaaggcgagcagggtttgccaggtgagcgaggacttcgcggagagccgggatcagtgcctaacgtggatagactgctggagactgccggaattaaggcctcggcactccgggagatcgtggaaacctgggatgaaagcagcggatcatttctgcctgttcctgagcgtcgccggggacctaagggcgattcgggggagcaaggtcccccgggtaaggaaggtcccattggtttcccgggagaacgtggcctcaaaggcgacagaggagatccaggtcctcaaggtccacctggattggcactgggcgaaagagggcctccgggtcctagcggtcttgcgggtgagccggggaaaccgggaattccggggcttcctggtcgcgcaggtggagttggggaagcaggacggccaggcgaaaggggagaacgaggggaaaaaggtgaacgaggagagcagggcagagacggtccccctggactccctggcacccctgggccaccaggccctccgggaccaaaagtgtcagtggatgaaccaggtcctggactgtctggcgagcagggccccccaggacttaagggtgcaaaaggagaacctggatccaacggagatcagggtcctaagggagatagaggagtgcctggaattaagggggacagaggagaaccagggcctaggggtcaagatggtaaccccggccttcctggggagcgcggaatggccggccctgaagggaaaccaggacttcagggtcctagagggccccctggccccgtggggggacacggagatcctggtcctcccggagcaccgggccttgcaggcccggctgggccacaagggccttcgggtctgaagggagaaccaggagaaactggtccacctgggcgcggacttacgggcccgactggcgctgtgggactgcccggacctcccgggccaagcggtcttgtcggtccgcaaggctcgccgggacttcctggccaagtgggagaaaccggtaaacctggggcacccggtagagacggggcatcgggtaaggatggtgacagaggttcgccaggagtacccggctcccccggacttcctgggcccgtggggccgaagggcgaaccgggacctacgggagcaccgggtcaggctgtggtgggtttgcccggagcaaagggagagaagggtgccccgggagggctggcaggtgacctggtaggtgaaccaggcgccaagggtgaccgtgggctccccgggccgcggggagaaaagggcgaagccggtcgtgcaggagaaccgggtgatccaggagaagatggtcagaaaggagctcctgggcctaagggcttcaagggcgatcctggtgtgggagtcccaggatctccgggtccgcctgggcctcctggagtgaaaggggacctgggcctgccgggcttgccgggggcacctggtgtggtcggatttcctggccaaactggacccagaggggaaatgggacagcccggaccaagcggagagcgcggacttgcagggcctccgggaagagagggtatccctgggcccctcggaccccctggtccacccggttccgtgggacctccaggcgcatccggtcttaagggagacaagggggatcccggtgtcggcctgcctgggcccagaggtgagagaggggagcccggtatcagaggcgaggacggtcggcctggacaggaaggtcctaggggtctgacgggacctcctggctctcggggagaaagaggagaaaaaggagacgtggggtccgccggactgaagggcgataagggagattcagcggtcattttggggccaccagggccaagaggagcaaagggcgacatgggcgagagaggacctaggggactcgatggagataaaggacctagaggtgacaacggtgacccaggcgacaaaggatcgaaaggtgaacccggagataaaggttccgcgggccttcccgggctgcggggccttcttgggcctcagggtcaacctggggcggctgggattcccggggacccagggtcaccgggaaaagatggtgtgcctggtattcggggagaaaagggagatgtgggatttatgggacctcggggccttaagggtgaacgaggagtgaagggagcatgtggcctcgatggcgaaaaaggggacaaaggcgaggcaggaccgccgggtcgtcccggcctggcaggacataaaggcgagatgggcgagcccggggtgcctggacaatccggagccccaggcaaggaagggctgattggccctaagggtgatagaggatttgacggccaaccaggacccaagggggaccaaggagagaaaggcgaacgggggacgccagggatcgggggcttcccaggaccgtcgggaaatgatggtagcgcagggcctcctggaccccctggttcagtgggaccgaggggccccgaagggctccaggggcagaagggcgagcggggcccccctggtgaacgggtggtgggagcacctggtgtccctggagccccaggtgagagaggggagcagggacgccccgggcccgcaggtccaagaggtgaaaagggcgaagcagcgcttactgaggacgacattcgtggcttcgtccgacaagagatgtcgcaacactgtgcgtgtcagggccagtttattgcctcgggttcgcgaccgctgccaagttacgcagccgatactgcgggctcccaactccacgcagtgccagtgctccgggtgtcccatgcagaagaagaagaacgagtgccacctgaggatgatgagtattcagagtattccgaatactctgtcgaggaataccaggatcccgaggcaccatgggattccgatgatccttgttcgcttccccttgacgagggttcgtgtaccgcttacaccctccggtggtaccatcgcgctgtgaccggttcaaccgaggcttgtcatccatttgtgtacggcggttgcggcggaaatgcgaatcgctttggtaccagggaggcgtgtgaaagaagatgtccaccaagagtggttcaaagccagggtaccggaactgcacaggat

SEQ ID NO: 1451 - DNA, 8832 bp, Artificial Sequence
  derived and/or modified sequence
atgacattgaggctattggtcgccgccctgtgcgcaggtatattggccgaggctccaagagtaagagctcaacacagggagcgggtgacctgtacacgcctgtatgcggcagatatcgtgttcctgctggacggatccagttcaattggccgaagtaattttcgggaggtgagatcctttcttgagggcttggtgctgcctttctccggggctgcctccgcccagggggtgaggttcgcaaccgtacagtactctgatgatccgcgcacagagttcggcctagacgccttgggctctggcggcgacgtgattagggccataagggaactgagctataagggcgggaacactaggactggcgctgcgattttgcacgtggccgaccacgtcttccttcctcaactggccaggcctggggtgcccaaagtctgcatattaatcaccgacggaaagtcccaagatctcgtggacaccgcagctcaaaggctgaaaggacagggggtcaaactcttcgcggttggaataaagaacgccgatcccgaggagctgaagcgggtagcaagtcagcctacgagcgacttttttttttttgtgaatgatttcagcatccttaggactctcctccccttggtgagtagaagggtatgcactaccgcggggggtgttcctgtgacacgtcccccagatgactcaaccagcgccccccgggatctggttttgagtgagccgtctagtcaaagccttcgagtgcagtggactgcagcctctggccccgtcaccggctacaaggtgcagtataccccactcacgggactgggccaaccccttccctccgaaaggcaggaggtcaacgtcccagccggcgagacatcagttaggctgcgcggcctgagacctctcaccgaataccaggttacggtgatagccctctatgccaattccattggggaggccgtctctggtacagctcgtacaaccgctcttgagggccctgagctgaccatccagaatacgacagctcactcactcctagtcgcctggagatctgtgccgggagcgaccggctatagggtgacatggagggtgctgagcggcggacctactcagcaacaagaattagggccaggacagggatctgtgctgttgagagacttggaaccagggacagactatgaagttacagtgtcaacacttttcgggcgctctgtggggccagctacttccctgatggctcgaaccgatgcttctgtggagcagaccctcagacccgttatcctcggccccaccagtatactgttaagctggaaccttgtccctgaggctcgcggataccgcttggagtggcgaagagagactggactggaacctccacagaaagtcgtgctgccaagcgatgtaactcgctatcagctggacggccttcaacccggcaccgagtacagattgacattatacacattgctggagggccatgaagtggctacccccgctactgtagtgccaacgggtcccgaattgccagtctcccccgtgaccgacctacaagccacagaactccctgggcagcgcgtgcgggtgtcctggagtcccgtcccaggcgccacacagtaccggatcattgtacgtagcacacagggagtggaaaggacgctggttctacccggctcacagacagcgttcgatctggacgacgtacaggctgggctgtcatatacagtgagagtcagtgcaagggtaggtccaagggagggttcagcttctgtgctgaccgtaagacgcgagccagaaacccccctggccgtgcccggactgcgtgtagtggtgtccgacgctacccgtgtgagagtggcctgggggccagtgcccggcgcttctggatttagaatttcatggagcacgggctctggtcccgagagttcccagacactgcccccagattcgaccgctactgacatcactggactgcagcccggcaccacataccaggtcgcagtgagcgttctgaggggccgggaagagggcccggcagccgttatcgtcgctaggacagatcccctggggcccgtgagaacagtccatgtaactcaagcaagttcaagcagcgtgaccattacctggaccagggtgcctggagctaccgggtaccgcgtgagttggcatagcgcccacggaccagagaagagtcaattggtcagcggtgaggcaacagtggctgagctcgacggccttgaacctgatactgagtatactgtgcatgtgcgggctcacgtcgccggtgtagacggccccccggctagtgtggtagtgagaactgcccctgaacctgttggaagagtcagtagactccagattctaaacgccagctcagacgtgctcaggatcacttgggtgggggtcacaggggctactgcctatagattggcgtggggccgctctgaggggggacccatgcgtcaccagatactgcccgggaacacagattctgctgaaattaggggcctggaaggaggggtctcctattccgttcgggtcaccgcgttggtcggcgaccgggaagggacgcctgtctcgattgtcgttacaactcctccagaagcccccccggcattgggtactttgcatgtggtgcaaagaggcgagcacagcctaaggctccggtgggagcctgtcccgcgggcacaaggcttcctgttgcattggcagcccgaaggcgggcaggaacagagcagggtcctggggcctgagttgagctcctaccacctggacggactggagccagctacccagtaccgggtaaggctctctgtcctggggccagcgggtgagggccctagcgcagaagtgaccgctaggacagagtcacctcgcgttcctagcattgagctgcgcgtcgtagacactagtatagactctgtgacactagcttggacacctgtctcacgggcttctagctatatcctgtcatggagaccgttaaggggtccgggccaggaagtacctggtagccctcagacactccctggaatttctagtagccagcgcgtcacagggctggaacccggcgtgagttacattttctccttgactccagtgttagacggtgttaggggacccgaagccagtgtgacccagaccccagtgtgtccccgaggactcgccgacgtggtgtttctgccacacgcgactcaggacaacgctcatagagcggaagccactcggagagtgttggaacggctggtgcttgccctcggccccctagggccgcaagccgtacaggtcggcctgctctcttattcacacaggcctagtccactcttccctttgaatggtagtcacgacttgggaatcattctacagcggattagggacatgccttacatggatccctcaggtaataacctgggtacagccgtggtcaccgcccacaggtatatgctggcccctgacgcgcctgggcgcaggcaacatgtgcctggggtgatggtgctcctggtagacgagccactgaggggcgatatattcagtccgatcagagaggcgcaggctagcgggctcaacgttgtgatgctggggatggcaggtgcagatcccgaacagctaaggaggcttgctcccggcatggattcagtgcaaacgtttttcgccgtcgatgacggcccctcgctagaccaggccgttagcgggctggccacagccttgtgccaggcttcatttaccacacagcccaggccggaaccctgcccagtgtattgtcccaagggccagaagggtgagcctggggagatgggccttcgcggccaggtcgggcccccaggtgaccctggtctacctggccgtacgggggcaccaggaccgcaaggacctcccggatccgccacagctaaaggtgagagggggttccccggagcagacggtcggccagggtccccagggagagccgggaacccgggcaccccaggggcaccagggctgaagggttcgcctggactaccaggacccagaggtgaccctggggagcggggcccccgtggcccaaaaggtgaacccggcgccccggggcaggtcatcggtggtgaaggccccgggctgcccggccggaaaggtgatccagggccctccggtccccccgggccgcgaggccctctgggggacccgggaccgaggggtcccccaggacttcctggaacggcgatgaaaggcgataaaggagacagaggtgagagaggaccacctgggcctggcgaaggcgggatagccccgggtgagcccggcctcccaggcttgcctggcagccccggtccgcagggccccgttggccctccaggaaaaaaaggggagaagggcgattctgaggatggcgctccaggccttccaggacaacccggctcccctggtgaacaaggacctcggggaccccctggcgccattggcccaaagggggataggggattccctggaccccttggtgaggccggtgaaaaaggcgagcggggccccccaggccccgctgggtctcgcggtctgcctggagtagctggacgacccggagccaaaggacccgaaggtccaccaggtcccacagggcgccagggggagaagggagaacccggcaggccaggcgatcctgctgtggtggggcctgccgtggcggggcctaaaggggaaaagggggatgtggggcccgctgggcctagaggagccacaggcgttcaaggagaaaggggaccaccggggcttgtgctgccgggtgaccctggcccaaaaggcgaccctggcgaccgcggcccgattggtttgaccgggcgggcggggccccccggggattctggtccaccaggtgagaaaggcgatccaggacggccagggccccctgggcctgtgggcccccgcggccgggacggtgaggtgggagaaaaaggcgatgagggcccgccaggagatccaggactgcctgggaaggcgggtgagcgcgggttgcggggtgctcccggtgtgagaggcccagtgggtgaaaagggtgaccagggagatccaggggaggatggccgcaatgggtctccaggctcctcagggcccaaaggcgaccgcggcgagcccggaccccctggcccacccgggcgtctggtggacacaggccctggagccagggagaaaggagaacctggggatagaggacaagaagggccacgtggcccaaaaggagatcctggccttcctggtgcccccggcgaaagagggatcgaggggttcagaggacctcctggaccccagggggacccaggcgttagggggccagccggcgagaaaggagacagaggccccccaggattagacggcagaagtggtctggatggcaagccaggcgcagcaggtccaagcgggccaaatggcgcagccggcaaagcaggcgatcctggtcgggatggtctgcccggcttacgtggggagcagggtcttcccggtccctccgggccgcccggtcttcccggcaagccaggcgaggacgggaagccgggactcaacgggaagaacggggaacccggagacccaggcgaagacggcagaaaaggagagaagggggactccggagcatcaggtagggaaggcagagacgggcccaagggggaaagaggagcacccgggatattgggaccccagggacctcccggactgccaggtcccgtaggccccccaggccagggattcccaggcgtacccggaggtacaggccccaagggtgatcggggagagacaggtagtaaaggggaacagggactacccggggagcgagggctcaggggagagcccggctctgttccaaacgtagataggctgctcgagacggctggaataaaggcaagtgccctgcgggagatcgtggaaacctgggacgaaagcagcgggagcttcctcccggtgcctgagcggcgcagaggtcccaaaggcgattcgggcgagcaaggacctcccggcaaggaagggcccataggattcccaggggagcgcgggctcaagggtgatagaggcgaccctggcccacaaggcccaccaggattagcacttggggagcgtggaccgcctggtccatcagggctggccggcgaaccgggtaaacccggaattccaggcctcccaggccgtgctggcggagtgggtgaagcaggacgccctggcgagcgtggcgagcggggcgagaagggcgaacgcggcgagcagggacgagatggcccacccgggcttcctggaaccccaggcccgccggggccccccgggccgaaagtatctgttgatgagccgggaccaggccttagcggggaacagggacctccaggtttgaaaggggccaagggtgaacccggttctaacggcgatcagggccctaagggcgacaggggtgtgccaggcatcaaaggagatagaggtgagcccggcccacgaggacaggacggcaacccaggcttgcccggcgagcgggggatggcagggccagaaggcaaacctggactccagggcccgagagggcctccaggcccagtcggcggccatggggatcccgggccacccggcgcacctgggctagccgggcctgctggtcctcagggtccctctggattgaaaggcgagcccggcgaaaccggcccgcctggaaggggattgactgggcctactggcgcagtgggcctaccagggccgcctggcccttctggacttgtgggtcctcagggcagtccaggacttccaggacaggtgggcgagaccggcaagccgggtgcacccggacgcgatggagctagcgggaaagatggagaccgcggtagtcccggggtgccagggagtccagggctgccaggcccggtcggcccaaagggtgaaccggggcctaccggggctccgggccaagctgtggtagggttgcccggggcgaaaggtgaaaagggagcccctggcggcctcgccggtgacctagttggcgagcccggagctaaaggcgatagaggcctgcctggtcctcgtggtgagaagggggaagccggcagagccggcgaaccgggcgacccaggagaggatggacagaagggagctcctgggccgaagggcttcaaaggtgaccccggcgtgggcgtgcccggcagtcccgggccaccgggccccccgggcgtgaagggggacctcggtctgcctgggctgcccggggcccccggggtagttggcttccctggacaaacgggccctaggggtgagatgggtcagcccggcccctccggagaacgcggactcgccggtcctccaggcagagaggggattccaggtcccctcgggcctcctggtccacctgggtcggtgggaccaccaggagcctccggcctaaagggagacaagggggaccccggagtgggactccccgggccacgaggggagagaggagagccaggcatccggggggaggatgggcgtccaggtcaggagggccctcgcgggctgacgggcccacctggaagcaggggcgagcggggagagaagggagacgtgggaagcgcgggtttgaagggggataagggggactcagccgtgattttaggcccgccgggcccgagaggcgccaaaggtgacatgggcgagaggggcccaaggggactggacggggacaaaggaccccggggcgataacggtgatccaggagacaagggctcaaagggcgagccaggggataaaggttctgctggcctcccgggcctgcgaggactgctgggccctcagggacagcccggcgccgccggtatccctggcgacccaggcagtccaggcaaggacggtgtccccgggatccgtggcgaaaagggagacgtaggctttatgggccctaggggcctgaagggggaacgcggagtgaagggcgcatgcgggctagatggtgagaagggtgacaagggcgaagccggccctcctggcagacctgggctagccgggcacaagggtgagatgggagaacctggagtccccggccagtcgggcgctccaggtaaggaaggcttaatcggccctaagggggatcggggatttgacggacagcctggaccaaagggagatcagggagaaaagggcgagagaggaaccccgggtataggcggctttcctggaccttccggaaatgacggatcagcaggcccaccggggccgcccggctctgtgggaccaaggggacccgaaggcctgcagggccagaagggtgaaaggggtccccccggcgaacgggttgtgggcgccccaggggtccccggagcccccggcgagcgaggcgagcaggggagacccgggccggctggacctaggggtgagaaaggagaggccgcgctaaccgaagatgacatccggggattcgtgcggcaggagatgtcacagcattgtgcctgtcaggggcagttcatcgcaagcggatcacggccacttccttcgtacgcagcagataccgcaggatcccaactccacgccgtcccagtcttgagagtttcccacgcggaggaagaggagagggtgccacctgaagacgacgagtacagtgaatacagcgaatactccgtggaggaataccaggatccggaggccccatgggatagcgacgatccgtgtagccttccactggacgaggggagttgtaccgcctacactttaagatggtaccaccgagctgtcaccggcagtaccgaggcatgccatcccttcgtgtatggtggctgtggcggtaatgctaatagatttgggacacgtgaggcatgtgagcgccgttgtcctccacgcgtggtccagagccaagggaccggtacagcccaagac

SEQ ID NO: 1452 - DNA, 8832 bp, Artificial Sequence
  derived and/or modified sequence
atgaccctgcgattgctggtggccgctctgtgtgcaggaatattagcggaagccccccgggttagagcacagcacagagagcgtgtgacatgtaccagattatacgccgcggatatagtgtttctattggatggttcgtcttcaataggtcgttcaaacttccgggaagttaggtccttcctcgaaggcctcgtgctgcctttttcaggggcagctagcgcacaaggggtgcggtttgccacggttcagtatagtgacgatcctcggacggagtttggactggacgccctcggcagcggaggcgacgtgatcagagccatacgcgagttaagttataagggcgggaacactcggacaggcgcagccatcctgcatgtggctgaccacgtgttcctccctcagctggcacgcccaggtgttcctaaagtgtgtattctaattaccgacggcaagtcccaggatcttgtcgacacagccgcacagagactgaaaggtcagggcgtgaagctcttcgccgtgggaatcaaaaacgccgatcccgaagaacttaaacgtgtagcttcccaacctacctccgatttctttttcttcgtcaacgacttctcaattttaaggactcttctgcccctcgtctcccgtcgggtgtgcactacggctggcggcgtgccggtgaccaggcctccggacgatagcacatctgccccccgcgacctcgtactgtccgaaccctcttctcagagcctgcgagtccagtggaccgctgcctcaggacctgtgacaggttacaaagtacagtacactcctctgactggactcgggcaacccttgccctcagagaggcaggaggttaacgtgcccgcaggagaaactagcgtaagactgcgggggttaaggccgctgactgagtatcaggtaactgtgatcgcactctacgcaaatagcatcggggaggcagtcagtggtactgcgcgcacaaccgctttagaggggcctgagctaactatccaaaataccacagcacactctctgctggtggcgtggagaagtgtccccggcgcgacaggctacagagttacttggagagttctttccggaggaccaacccagcagcaggagctgggtccaggacaggggagcgtgttactgcgagatctcgagccaggtacggactacgaagtgacggtgtccacactttttggacgctcagtgggccctgcgacgagtctgatggccagaactgacgcgtctgtggagcagaccctgcgccccgtgatccttggacccacctccatcctgctgagctggaacctggtgccagaggcccgcggataccgcttggagtggcgacgcgagacaggcctggaacccccccaaaaggttgtcctcccgtccgacgtcactagataccagctggacggtctgcagcccggaacagaataccggctgactttgtacactctgctggagggccacgaagtggccactccagccaccgtggtccctactggcccagagttgcccgtttctcccgtcacagatcttcaggctaccgaacttccaggccagcgagtccgtgtgagctggagccctgtaccaggggccactcagtataggataatcgtgcggtccactcagggggtggaacggaccttggtcctgcccggtagccagaccgctttcgatctcgacgacgtacaggctggcttgtcttacacagtgcgcgtgagcgctcgggtcggtcccagagaggggagcgcctccgtcctcacggtaagacgcgagcccgaaacaccgttagccgtcccaggtctgcgcgtggttgtttcagatgctacgcgggttagggttgcctggggacctgttccaggtgcaagtggcttcagaatcagctggtctacagggtcaggccctgagtctagtcagaccttgccgccggacagtaccgcgactgatataaccggactccaacctggcaccacctaccaggtagcagtgtcagtgctgcgcggtagggaggaaggccccgccgcagtgatagttgctcgcactgatcctctgggccctgttaggacagtgcatgtgacacaggccagtagcagttcagtgacaatcacttggacgcgagtcccgggagccaccggctatagagtgtcctggcactctgcccacggtccagaaaaatcccaactggtctcaggagaagcaaccgtggccgagctagacggcctggaaccagataccgaatacacagtacatgtcagggcccatgttgctggcgttgacgggccacctgccagcgtggtcgtgaggactgcccctgagcctgtagggcgcgtgtctcgacttcagattcttaacgcttcatcagacgttctgcgaattacatgggtgggagtcacaggtgcaactgcataccggctcgcctggggcagatctgagggcggcccaatgcgccatcagatcctgcccggtaatactgactctgcagagatccggggtctggagggaggagtatcttatagcgtgagggtgaccgcactggtcggggatagggaaggtacgccagtctctatagtggttacaaccccccctgaggcgcctccagctttgggcaccctgcacgtagtacagcggggcgaacacagcttgaggctgcgatgggagcccgtacctcgtgcgcagggattcctcttgcattggcagcccgagggggggcaagagcagtcgcgtgttttgggaccggaactgtcctcataccatctagacggactggaacccgcaacacagtaccgggttcgcctcagcgttctgggacccgcaggagagggacctagtgcggaggtaaccgcacgcaccgaaagtccccgagttccctccattgagttacgggtggtggatactagcatagactcagtcactctggcgtggacccctgtaagccgagcctcttcatacatcttgagctggagacccctacgggggcctggacaagaggtgcccggttccccccagacactgcctgggatttcttcctctcagcgcgttaccgggctggagcctggcgtcagttacattttcagtctgaccccggtcctggatggtgttcggggtccagaagcatcagtgacccagactccagtttgcccgcgggggcttgctgatgtggtgttcctccctcatgccacccaggataacgcacaccgtgccgaagccacgagaagagtactcgagcgtctggtgctcgcactaggcccactgggtccccaggcggtccaagtgggacttcttagctattctcaccggcctagtcccttattcccattgaacgggtcgcatgacctgggaattattctccagcggatccgagatatgccatacatggaccccagcggaaacaacctggggaccgcagtggttaccgcacatcgttacatgcttgcccccgatgccccaggtagacgtcaacacgtgccaggggtgatggttctccttgtagatgagcctctgaggggggacatcttttcacctatccgcgaggctcaggcctcaggcctcaatgtcgtcatgttaggcatggcgggagcagacccggagcagctccgccgattggcgccaggtatggactcggtacaaacatttttcgccgtcgacgacggcccatcgctagaccaggccgtcagcggactcgctacggccttatgccaggcctccttcacaacccagcccagacctgagccctgccctgtctactgtccgaaggggcagaaaggggaacctggagagatgggactcagagggcaggttggaccaccaggcgatccaggccttccaggacgaacgggcgctcccggccctcagggccctccaggaagcgccaccgccaagggcgaacggggctttccaggcgcagacggtagacccggctccccgggacgggcagggaatcccgggaccccgggggctccaggactgaaaggaagccctgggctgccaggtccgcggggtgacccaggcgagagaggacctagaggacccaaaggcgaacccggggcgcccggtcaggtgattggaggcgagggacctggcctgccgggtaggaaaggcgaccctgggccgtcaggccctccaggaccccgggggcccttaggcgatcccggaccgagggggccacctggactccccggaacagctatgaagggcgataaaggagacagaggggaacgcgggccccctggacccggtgaaggcggcattgctccaggggagcccgggttaccagggttgcccggcagtccagggcctcaagggccggtgggcccccctggaaagaaaggcgagaagggggatagtgaagatggcgcccccggcttacctggtcaaccaggaagccctggagagcaaggaccccgcgggccacctggcgcgatcggaccaaagggggataggggattccccgggcctcttggtgaggctggcgaaaagggcgagagggggccacctggaccagccggatccaggggcctcccgggcgtcgccgggagaccaggggctaagggcccagagggtccaccgggccccactggccggcagggcgagaaaggagagcctggcaggccaggcgatcccgccgtcgtgggaccggccgtcgcggggcccaaaggcgagaagggtgacgtggggccagccgggcctcgtggcgctactggcgtgcagggagaaaggggtcccccgggtctggtgctgccaggagatccagggcctaaaggtgatcctggtgaccgcggacccatcggtctcactgggagagctggtcctcctggcgacagtggtccaccaggcgagaagggcgaccctggacgcccaggaccgccaggacctgtgggccctcgcggacgggacggggaagtgggcgaaaagggcgatgaaggaccacccggggatccaggcctgcccgggaaagctggtgagaggggactgagaggtgcccctggtgtccgcgggcccgtgggggaaaagggagaccagggggacccaggcgaggacggccggaacggctctcctggatcgtccgggcctaagggcgacaggggcgagcctggaccccctggaccgccaggcaggttagttgacactggccctggagcacgcgagaagggcgagccgggtgatcgcgggcaggagggtcctagagggcccaagggcgatcccggtttacctggcgcccccggggagaggggaatcgagggttttagaggacctcccggaccacagggcgaccccggagttcgcgggccagccggggaaaagggagaccgtgggcctcccggtctagacggtaggtccggactcgatggaaaaccaggcgcggccgggccatctggtcccaacggggcggccggcaaagctggtgacccaggacgagacggcctgccagggctgcggggcgagcaaggactgccaggcccatccgggcccccgggcctacccggcaaaccaggggaggatggcaaacctggactaaatggcaagaatggggagcccggggatcccggggaggacggtaggaaaggcgaaaaaggtgactctggagctagcggccgcgaaggtcgcgacggacccaagggtgaacgtggtgcccccggcatcctcggaccacagggcccacctggactcccagggccagtcggtcccccaggccaggggttcccaggggtgcccgggggcactgggcctaagggcgacagaggagagacggggtcgaaaggcgagcaagggctccccggtgagagagggctgcggggtgaacctggatccgtgcccaacgtggacaggttgctggagactgcgggcatcaaggcctcagccctgagagagatagtggaaacttgggacgagagcagcgggagttttcttcccgtccctgaacgaaggaggggccccaagggagactcaggtgagcagggtccacccggcaaagaggggccaatcggattcccaggtgaaaggggtttgaaaggtgaccggggcgatccaggtccacagggcccccctggtctggcactcggggaaagaggtcctcctggcccatccgggctagccggtgagcctgggaagcctggcattccaggactgccagggagggccgggggtgtaggggaagccgggcggccaggcgagcggggtgagaggggtgagaaaggcgagaggggcgagcaagggagggatggcccaccgggtcttcccggaacacctggtcctcccgggcccccaggacctaaggtgagcgtggatgagcccggccccggattgagcggggaacaggggccaccaggccttaagggcgcgaagggtgagccgggcagtaatggcgatcagggaccaaagggtgaccggggagtgccaggcataaagggagaccgcggcgaacccgggccccggggccaggatgggaatcccgggctgccgggagagaggggtatggcgggccccgagggcaagccaggtttacaggggccgcgcggacctcccgggcccgtcggaggacatggggacccaggccctcccggtgcccccggattagccgggcctgccgggccccagggccccagcggtctcaagggtgaacccggtgaaaccggacccccaggaagagggctaactggccccaccggcgccgtagggttgcccggaccacctggcccatctggcctggttggtccgcaggggtctcccggactccccggacaggtaggagagacggggaaaccgggagctccaggccgagacggagcgagcggaaaggacggcgaccgcggctcacccggcgttcctgggtcgcccggtttacctgggcccgtcgggcccaaaggggaacccggccctacaggtgcccctggacaggcggtggtcggactgcctggcgcaaaaggagagaagggcgcccccggtggactcgctggagacctggtcggcgagccaggagctaaaggtgaccgtggtctgccggggcctcggggggagaaaggtgaggcaggacgggccggcgagcccggtgatcctggcgaagatgggcagaagggagctcctggaccaaagggtttcaaaggcgaccccggtgtgggagtccctggttcaccgggcccccccggcccccccggagtcaagggcgacctcggccttccgggtttacccggagcccccggggtagtggggttcccaggacagaccggccctcgtggcgagatgggccagccagggcctagcggcgagagagggctggctggccctcccggtagggaaggtatcccgggcccactagggccaccaggccccccaggatcagtcgggcccccgggagccagcggcctcaaaggggacaagggagatccaggagtgggacttcccggccctcgtggggaacgtggagagcctggcattaggggggaagatggtcggcccggccaggagggcccacggggcttgaccggcccaccaggttcccggggggagaggggggagaagggagacgtgggcagcgccggactcaagggcgacaaaggggatagcgccgttattctggggcctcctggcccacgaggggctaagggtgatatgggggaacgggggcctaggggcttagatggagataaggggccccgcggagataatggggaccctggtgacaagggctctaagggggagcccggtgacaagggctcagcgggacttccaggcctacgcggattattgggcccgcaaggccagcccggcgccgcaggcattcccggtgatcccggctctcctggcaaagatggcgttccgggaatccgaggcgagaaaggcgacgtaggctttatggggcccagagggctgaagggtgagcgcggagtgaagggtgcttgcggtcttgatggtgagaagggggataaaggcgaagctggtcctcccggacgcccaggtcttgccggccacaaaggcgagatgggcgagccgggcgtgcctggacaatctggggccccagggaaggaggggcttattgggcccaaaggtgaccgtgggttcgatgggcagcctggacctaagggcgatcagggggaaaagggagaacgcgggacccctggcataggcggattccctggaccaagtgggaatgacggcagcgccgggccgccggggccaccagggagcgtggggcctagaggtcctgaaggtcttcaggggcagaagggcgaaagaggaccccccggagaacgagtagtgggagcgccaggagtaccgggcgcccctggggaaagaggcgagcaagggcgccctggaccagctggcccacgcggggaaaagggggaagccgctctgacagaggatgacattagaggtttcgtgcggcaggagatgtcccaacactgcgcctgtcagggtcaattcattgcgtctggttctcgcccactgccaagttatgccgctgacacagcaggctcccaactgcatgccgtgcccgtcctcagagtgtctcatgccgaggaagaagagagagtgccacccgaggatgatgaatattctgagtatagtgaatactccgtggaagaatatcaggacccagaagcaccctgggattcggatgacccatgttcactgccccttgacgagggatcttgtaccgcttacaccctcagatggtaccaccgcgctgttaccggctcgacggaagcatgccaccccttcgtgtacgggggttgtggtggaaatgccaacagattcggcactagagaagcttgcgagagacggtgtccacctcgcgtggtccagtcacagggtaccggcaccgcccaagat

SEQ ID NO: 1453 - DNA, 8832 bp, Artificial Sequence
  derived and/or modified sequence
atgacccttaggttgttggtcgccgcactgtgcgcaggaatactcgctgaggcccctcgggtgcgcgcgcaacatcgtgagcgggtgacttgtacccgcttatatgcagctgacattgtgttcctgctcgatggctctagctccatcgggaggagcaacttccgggaggtacgctcctttctcgaagggttggtccttcccttcagtggagccgcaagcgcgcagggcgttcggttcgccaccgtgcagtacagcgatgaccctagaaccgagttcggcctggacgcactggggtctggcggagatgtcattagggcaatacgcgagctgtcatacaaaggcggcaacacccgcaccggcgccgccattcttcacgtggctgatcatgtgttcttgccccagctcgcccgaccgggagttccaaaagtgtgtatcctgattaccgatggaaaatcacaggacctggtcgacaccgcagctcagcggttgaagggtcaaggtgttaagttgttcgccgtcggcattaagaacgccgacccagaggagctgaagagggtagcctcacagcctacgtctgattttttcttttttgtgaacgacttctctatcctcaggacactgctacccttagtgtccaggagggtgtgtaccacagcggggggagtgcccgtaactaggccgcccgatgactctacctcagcccctcgggatctcgttctctccgagcccagcagtcaatccctaagagtccagtggaccgcggctagcggaccggttacggggtacaaagtccagtatacacctcttaccgggctggggcagccattaccaagcgagaggcaggaagtcaatgttccagccggagaaacttccgtgcgcctccgcggactgcgtccattaacggagtatcaggtgaccgtgatcgccctgtatgcaaattccatcggcgaagccgtcagcggcacagcaagaacaactgccctggaggggcctgaactaacaatccagaacaccaccgctcatagtctgctagttgcatggcgttccgtgcctggtgctaccgggtatcgggtgacatggagagtcctcagtggtggccctactcagcaacaagagttgggcccgggccagggctcagtacttctgcgggacctggaacctgggacagattatgaggtcacagtgtccaccctctttggtcggtcagtcggccccgctacctcattgatggccagaacggacgctagtgtggagcagaccctcagacccgtgatcctggggcccacaagcattctgttaagttggaatttggtgcctgaggcccgcggttatcgcctggaatggcgtcgggagaccggcctcgagccaccccaaaaagtagtactgccatcggacgtaacccggtaccagcttgacggcctgcagcctggaacggagtatcgcctgacattgtacactctacttgagggacacgaggtcgcaacccccgccaccgtcgttcccaccggacccgagcttcccgtcagtccagtgacggatctgcaggctacagagctgcccgggcagcgtgtgcgggtgtcatggtctcctgtgcccggagcaactcagtacaggattatcgtaaggtccacgcagggggtggagcgcactctggtccttcctggcagtcagacagcgtttgacttagatgacgttcaggcaggcctctcttatactgttagggtcagcgctagggtgggccccagggaaggctccgcaagcgtactgactgtaagaagggagcctgagacgcccctggccgttccaggcttgcgagtcgtggttagcgatgccacaagagtgcgagtggcctggggaccagttccgggcgccagtggctttagaatctcctggtctacaggatctggccccgagtcttctcagacgttaccccctgactccacggccactgacattactggattgcagcccggaacgacctaccaggtcgctgtgtccgtcttgagaggaagagaggagggtcctgctgctgtgatagttgcgcggacagaccctcttggccctgtgcgcacagtgcatgtgactcaggccagttcctcctccgttactatcacctggacccgcgtccctggggccacaggctatagagtgagctggcactccgcacacggacctgagaaaagtcaattagtaagcggggaggccaccgtcgccgagctcgacggacttgagcccgacaccgagtatacagtgcacgtgcgggcccatgtggcaggggtggacgggccccctgcaagcgtcgtcgtaaggaccgcccctgaacctgttggaagggtgtctaggctccagatcttgaacgcatctagcgatgtgcttagaatcacttgggtcggggtcactggagcaaccgcctatcgcttagcctgggggcggtcagagggtggccctatgcggcatcagatactacccggaaatacagactcagcagagattcgaggattagagggaggggttagctatagcgtccgcgtaaccgcactggttggcgacagagaagggactcctgtcagcattgtagtaacgacacctcctgaggcaccgcccgcacttggcacactccacgtagtgcaacgcggagagcattccctgaggctgcggtgggagcctgtgcccagagcccaagggtttttgctgcactggcaaccagagggcggacaagaacagtcccgggttctgggtccggagctctcttcgtatcacttggatggtctcgagcccgccacacagtatagggtaagactcagtgtgctcggccccgcaggcgagggccccagcgccgaggttactgcccgcacagaatctccacgcgtgccgtcaattgagctgagggtcgtcgacacttccattgacagtgtgacattggcatggactccggtgtcgagggcgagctcatacatactcagttggcgacctctgaggggccccgggcaagaggtgccagggtcacctcagacattgccaggtatcagctcttcccagagagttactggcctggagcctggagtatcgtacatttttagcttaacgccagtcctggatggagttagaggccctgaggcatcagttacccagacccccgtgtgtccaagggggttggcagatgtggtgttcttgccgcatgcgacacaggataatgctcatcgggcagaagctactagaagagtgcttgagaggttagtgctggcactcggcccactcggcccccaggctgttcaggtaggactgctgtcctactcccatcgaccaagccctctgtttccactgaacggctcccatgatcttggcatcatccttcagcgcattcgagacatgccatatatggatcctagcgggaataacctggggacggccgtcgtcaccgcccatagatatatgcttgcccccgacgcgcctgggcgaaggcagcacgtccccggggtaatggtattgctcgttgatgagcctctcaggggcgatatcttttcccccatcagagaagcccaggcctccggcctcaacgtggtaatgctgggaatggccggcgccgatcccgaacagctgcgccgcttagccccaggcatggactctgtacaaactttctttgccgttgacgacggtccctcactagatcaggcagtgagcggattggccacagcgctgtgtcaagcgtctttcactacgcagccacgtccagagccctgtcccgtgtactgcccgaaaggtcaaaaaggagagccaggagagatgggcctccgaggccaggtggggccccccggcgatcccggcttgccagggagaactggcgcaccgggaccacaaggcccaccggggtctgccacagcgaaaggtgaacggggctttcctggtgcagacggaaggcccgggagccccggacgcgccggtaacccaggcacccctggggcccctggcctgaagggttcaccaggccttcccggccctcgaggcgaccctggtgagcggggccctcggggcccgaaaggcgagcccggtgcacccggacaggtaattggcggagagggccctggattacctggtaggaagggagatccaggacctagcgggcctcccggtccacgcgggcccctcggtgatcccggaccccgcgggcccccagggctgcccggcaccgccatgaagggcgataaaggcgaccgaggcgaacgcgggccgccaggtcccggtgaggggggcatagccccaggtgagccaggactcccgggtcttcccggaagccccggtccgcaaggccctgtggggccacctggaaagaaaggggagaaaggcgactctgaagacggagcccccggcttgccaggtcagcccggttcacccggcgaacagggcccacgaggtccccccggggccatcggacctaagggagatcgggggtttcccggacctctaggcgaggccggcgagaaaggcgaacggggccccccggggcccgcaggtagccgcggattgccaggggtcgcaggtaggcctggggccaagggcccagaaggtcctcctggacctaccggaagacagggcgagaaaggcgaacctgggcggcctggagaccctgcagttgtgggccctgccgtggccggccctaaaggggagaaaggggatgtaggcccagcgggaccccggggggcaaccggagtccagggtgagcgaggtcctcccgggttagtgctgccaggcgatccagggcccaaaggggaccccggtgaccgcggacccataggcttgacaggccgggctgggccaccaggggactcgggaccgcccggggagaaaggagaccctgggcgacccggaccacccgggcctgtgggtccaagagggagagacggggaggtgggagaaaagggagatgaaggccctccaggggatcctggactcccgggcaaggctggcgagcgcggtctcaggggagcacctggtgtgcgcggaccggttggggagaagggggatcagggcgatcccggagaggacggcagaaacggttctcctggtagttcagggcctaaaggggaccggggggaaccaggccctccagggcctccggggagactcgtagatacaggtcccggtgcgagggagaaaggggagccaggcgataggggacaggagggccccagaggccctaaaggcgatcccggtctgccgggtgcgcctggcgagagaggaatcgaaggctttcgtggaccgccaggacctcagggagacccgggggtgcggggccccgcaggggagaaaggcgaccgtgggccgcccggactggacggaaggtcgggattagacggcaaacctggagcagcaggcccaagcggccccaacggcgccgccggaaaggcaggcgacccaggccgagatgggcttccggggttaaggggggaacagggcctgcccggacccagcggtcctccaggcctccctgggaaacccggggaggacggtaagccaggcctgaacggtaagaatggcgaaccaggtgatcctggcgaagacggccggaaaggggaaaaaggagattcaggcgcctccggacgggagggccgcgacggacccaagggagaacggggggcccccgggatcctcggaccccagggcccacctggcctccccgggcccgtaggcccccctggtcaggggttccctggcgtgccaggaggcactggacccaagggggaccgaggagaaactggatcaaaaggcgaacaggggttacctggggagcggggcttaaggggcgagcccggcagcgtgcctaacgtggaccgcctgcttgaaaccgccggaatcaaagccagtgcccttcgggagattgtcgaaacttgggatgagtcaagcggctcattcctgcctgttcctgaaaggcgtcgaggccccaaaggcgatagcggtgaacagggacctcccggaaaggaggggcccatcgggttccctggggaaagagggctgaaaggcgatcgcggagaccccggtcctcaaggcccaccaggtctggctctgggtgagagagggcccccaggcccttccggcctggccggagaacctggcaaacctgggattccggggctgccaggcagggcaggcggtgttggagaagctggaagaccaggagagcgcggagagagaggggagaagggtgagaggggcgagcagggacgagacggccccccaggcttgcctggcacgcccggtccgcctggacctcccggtccgaaagtgtccgtggacgagcctggaccaggactgtccggagaacaggggccacctgggcttaagggggcaaagggtgagccaggtagcaacggcgaccaggggcctaagggcgacagaggagtgcccggcattaaaggagaccgcggcgagccaggcccccgggggcaggatggaaacccagggctacccggggagcggggaatggctggtcccgaaggcaagcctggattacaggggcctagggggcccccgggccctgttggagggcatggagaccctgggccacctggcgcacccggactggccggtcctgctggaccccaggggccctccggcctgaaaggcgaaccaggcgagacgggccccccaggcagaggacttacgggccccactggagctgtgggccttcccggcccacccggtccttcaggtcttgtcgggccccagggttcccctgggctccctggccaggtgggggagaccggaaaacccggcgcccctggcagagatggagcaagcgggaaggacggggatagagggtctccaggcgtaccaggatcacccgggttacccggtcccgtcggcccaaaaggcgaacctggacccaccggcgccccgggtcaggcggtagtaggcttgcctggagcaaaaggagaaaagggcgcccccggaggcctagcaggcgacctggtaggcgaaccaggggccaagggagatcgaggtctgcctggaccaaggggagagaaaggagaagccgggcgcgctggcgagccaggcgaccctggtgaagatggccagaaaggagcccctgggcccaaggggtttaaaggtgaccccggagtgggtgtccctgggtccccaggtcctcctggaccaccaggagtgaaaggagacctcgggctgcctggcttgccgggtgcgccaggtgtcgtgggattccctggacagacgggacccagaggggagatggggcagcctgggccatcgggcgagcggggactggccggaccacctggaagggagggtattccgggccccctcggaccaccgggtccccctggctccgttggcccccctggtgctagcgggctcaagggagataagggagaccccggtgtgggactgccagggcccagaggggaacgcggcgagccgggcatcaggggtgaggacggtaggccgggacaggaaggacctagaggcctaacgggaccaccggggagcagaggcgaaagaggcgaaaagggcgatgtaggcagtgctggactgaagggtgacaagggagacagcgccgtgatactaggcccaccaggaccgagaggggcgaaaggagatatgggagagcggggccctcgggggctggatggggacaaggggccacgtggagataacggcgatccaggtgataaaggatcaaagggggaacctggcgacaaaggaagtgccggcctacccggcctgcggggcctgctcgggccacaggggcagcccggcgcagctggcatcccgggagatcccgggtctccagggaaggatggagttcctggaatcaggggagagaagggagatgtcgggtttatgggcccccgggggctgaaaggtgagcggggcgttaagggggcatgcggcttggacggtgagaaaggtgataagggagaggccggccctcccggtcggcccggactcgctggacataagggagaaatgggcgagcctggagttcccgggcaatccggggctcctgggaaggaggggcttatcggccctaagggagaccgtggtttcgacgggcaaccgggacctaaaggggatcagggcgagaaaggtgaaagggggacccccggcatcggcggcttccctgggccatccggcaacgatggctctgctggccctccaggcccaccggggagtgttgggccccgtgggcctgagggactccaaggccagaaaggtgaacgcggtcccccaggagaacgcgttgttggggctccaggcgtgcctggggcaccgggagaacggggcgagcaggggcggccaggtcccgccggtccaagaggggagaagggcgaggcagctttgaccgaggacgatatcagaggcttcgtaagacaggagatgtctcagcactgcgcttgtcagggacagttcatcgcctccggcagcagacccctaccatcatatgccgcagataccgctggatcccaattgcacgcagtgccggtgctgcgcgtgagtcacgcagaggaggaagagcgcgtgcctcccgaggacgacgaatattccgagtatagtgaatactctgttgaggagtatcaagatccagaggccccttgggacagcgacgacccatgttctctgccattggatgaaggctcttgtacggcatataccctgcggtggtatcatcgagcagtgacggggagcaccgaggcgtgccacccttttgtgtacggtggctgtggtgggaatgctaatcgattcggaacacgagaagcctgcgaaagacggtgtccccctcgtgtcgtgcagagccagggtaccgggactgctcaggat

SEQ ID NO: 1454 - DNA, 8832 bp, Artificial Sequence
  derived and/or modified sequence
atgactttgcgcctgcttgtcgccgccctgtgcgcaggaattctcgcagaggctccacgcgtgcgcgcccaacacagagagagagtcacctgcacacgactctatgctgccgacatagtctttcttctcgacgggtcctcatccatcggtcggtccaacttccgggaagtccggtctttcttagagggtctcgtgctcccattcagtggcgctgctagtgctcaaggtgtgcgctttgccacagttcagtacagcgatgacccacgcactgagttcgggctcgatgccctgggctctggtggcgacgtgatcagagccatacgggaactcagctacaagggaggaaacacccgaactggtgctgccatccttcatgttgcagaccacgtgttcctgccacagctggctcggcctggagttcccaaagtgtgtattctgataaccgacggaaagtctcaggacttggtggacaccgcggcccagagactgaaaggacagggcgtaaaactcttcgccgttgggatcaagaatgctgacccggaagagctgaagagagtggcgtcgcagcccacatcagactttttcttcttcgtaaacgatttctccatactaagaacattacttcccctggtcagtagaagagtgtgtacgactgcagggggagttccagtgactcgaccccccgacgacagtacgtccgcccctcgggatctcgtgctgtccgagcctagctctcagagcctcagagttcaatggacggccgcctctggtcccgtgactggctacaaggtccagtatactccattgacaggactagggcagccgctccctagtgagcgccaggaggtgaacgtccctgctggggaaacaagcgtcaggctgcgtggactgcgccctctgacagagtatcaggtgactgtcattgccctatatgctaactctatcggagaggccgtgagcgggacagccaggacaaccgccctggagggaccggaactcaccatccagaacaccacagcgcattcactgttggtcgcatggcggtccgttcctggcgctacagggtacagggtgacctggcgcgtgctgtcaggcgggcccactcagcaacaggagcttggcccgggccaaggtagcgtgttactccgggacctggaacccggcacggattatgaggttaccgtctctactctgttcggaaggtccgtcgggccagcgaccagcctaatggccaggaccgatgctagtgttgaacagacactgcggccagtgatcctcgggccaacatcgatccttctgagttggaacctggttcctgaagcccgcggatatcgccttgagtggcgacgcgaaacaggcctcgagcccccgcagaaggttgttctcccttccgatgtgactaggtaccagctggatggcctgcagcctggtacagaatatcggctgaccttgtataccctattggagggtcacgaggtagcaacccctgctactgtggtcccaaccggccccgagctacccgtttctcccgtgaccgaccttcaggcgacggagttacccggtcagcgcgttagagtgagctggagtcctgtgcctggagcaacccagtacaggataatcgttcgatcaacacagggcgtggagcgaactcttgtgcttcccggttctcaaaccgctttcgacctggacgacgtgcaggccggtctgagttacacagtgagggtctccgctcgggtaggtccacgagagggatcagcatccgtgctgaccgtgaggagagaacccgagacacctctcgcagtacctgggctgagagtggtagtttcagatgccacccgggtgagagtggcttggggccccgtccccggcgcctcaggtttccggattagttggagtacaggttcaggacccgaaagctcgcagacacttccgcctgatagcaccgccacggacattaccgggctgcagcccggcaccacctaccaggtggcagtgtctgtgctccggggaagggaggagggccccgccgcggtgatagttgctagaactgatccccttggccctgtccgcactgtgcacgtaacccaggccagctcatcctccgtcactataacatggaccagggtgcccggggccacaggatatcgggtctcatggcacagcgcccacggcccggaaaaaagccaactagtatctggcgaggcgacagtggccgaactggacggcctcgagcccgacaccgagtacacggtgcatgtgcgagcccacgtcgccggcgttgacggcccccctgcatctgtagtggtccgcaccgcccctgaacccgtggggcgggtgtcccggttgcagattctcaatgcaagcagtgacgtcctgcggatcacctgggttggcgttacaggcgcaacagcttaccggcttgcctgggggaggagtgaagggggaccaatgagacaccagatcttgccgggaaacactgattccgccgagatccggggcctggagggcggcgtgtcatatagcgtgagagtgacagcccttgtgggtgaccgtgaaggcactccggtttccatagttgttacaacaccacccgaagcacctcctgctctaggaactctgcatgttgtccaaaggggcgagcatagtcttagactcagatgggagcctgtaccccgcgcacagggcttcctacttcactggcagccggaaggaggtcaagagcagtctagagtcctgggcccagaactgtcctcgtatcacctcgacgggttggagccagccacccagtatcgcgtgagactgtctgtgttgggtccagccggggagggtccttcggcggaggtcaccgcgaggacagagagccccagagtgccctccatcgagctcagggtggtcgatactagtattgactctgtcaccctcgcttggaccccagtaagtcgtgcaagtagctacatcctctcatggaggccgttgcgggggcctggacaggaggtaccagggtcaccgcagacgcttcctggcattagcagttcacagcgcgtgactggcttggaaccaggagtgagttatatattttcactgacacccgtgctggacggtgtcagggggcccgaggcttcggtcacacaaacaccagtctgccctcgtggacttgcagacgttgtttttctcccccatgcaacacaggataatgctcaccgcgccgaggcaactaggcgtgtcctcgagagactggtattagccttgggccccctggggccacaggccgtgcaagtcggtctcctaagctattcgcatagaccctcaccactgtttccattaaacgggtcccatgatttaggtatcatactccagaggatcagggatatgccttacatggaccctagtggtaataatttgggtacggccgtcgtgactgcacacaggtacatgttggcccccgacgctcctggacggagacagcatgtgccgggtgtgatggtcctattggtcgacgaaccactcagaggcgacatcttctcaccaatacgcgaagctcaggcgtctgggctgaacgtggtgatgctcggcatggcgggggcggatccagagcagctcaggcggctggcgcccggaatggattcggtgcagacttttttcgccgtcgacgacgggccaagcctggatcaggcagtatccggcctcgccacggcgctgtgtcaagcgtcttttactacccagcccaggcctgagccatgtcctgtatactgcccgaaggggcagaagggcgaaccgggcgagatgggattgcgggggcaggtgggacctcctggggaccccgggttaccaggacgaactggcgcccccgggccacaaggacctcctgggagcgcaactgcaaagggagagagagggttcccaggagcagacgggcggcccggctcaccggggagagctggtaatccaggtaccccgggggctccagggttgaaagggtctcctgggctgcctggacccagaggagacccaggcgagcgaggcccaagggggccaaaaggtgaacctggggcaccaggacaggtcatcggaggcgaaggcccaggcttgcctgggaggaagggagacccaggtccaagtggcccccctggcccgagaggaccactgggcgaccccggcccccgggggcctcccgggttgcctgggacagcaatgaagggtgacaagggagataggggggagcggggccccccgggacccggggaagggggaatcgcacctggagagcctgggctgcccggtcttcctggtagcccaggtccacagggcccagtgggtccaccgggcaagaaaggcgaaaagggtgactccgaagacggagccccaggattgccaggccagccggggtctcctggagagcagggaccgagaggtccccctggggctattgggccaaagggagatcgaggatttcctggtcccctgggtgaagcgggcgaaaaaggtgagaggggaccccccggacctgccgggtccaggggcctgcccggcgtggcaggtcgacccggagctaagggtcctgaaggacccccaggacccacaggtcgtcaaggcgagaaaggcgagccaggcagacctggcgacccagccgtggtaggcccagccgtggccggaccaaagggcgaaaaaggcgacgtgggcccagctggtccacggggagccaccggggtgcagggagaacgcggaccccccgggctggtgcttcctggtgaccccggcccaaagggggatccgggagatagaggcccgatcggcctgaccggccgggcagggccacccggggattccggacctcctggagaaaaaggggaccccggacgccccggaccccccggacccgtgggaccccgtggaagggacggggaggtgggggagaagggggacgaaggacctcctggagatcctggacttccaggaaaggcgggggagcgaggccttcgcggcgcgcctggggtccgggggccagtaggagagaaaggcgatcagggtgatccaggggaagacggaaggaatggtagcccgggctccagcggcccaaagggtgaccgtggagagcctggtccacctggccctcctggccggttggttgatactggccctggagcaagagagaaaggtgagcccggagatcgcggccaagagggacccagaggaccgaaaggggaccccggactccccggagcaccaggcgaacgcggaattgagggttttaggggcccacctggccctcagggcgacccaggtgtccggggaccagctggggaaaaaggcgatcgtggtcctcccggactggatggacgatctggactggacggcaaaccaggtgccgccgggccgtccggacctaacggggctgctggcaaggctggtgaccccggaagggacgggctgcctggcttgcgtggggaacaaggcctgccaggtcctagtggtccacccggtctaccaggtaaacccggcgaagacggaaagccagggctcaacggcaagaacggtgagccaggtgatcccggggaggacggccggaagggagagaaaggggactccggtgccagtggacgtgagggccgggatggacctaagggggaaagaggggcgcccgggatcctcggtccccagggcccgcccgggttacccgggcctgtgggaccgccggggcagggattccctggcgtgccgggaggcactggacctaagggtgacaggggggaaacagggtcgaagggggagcagggcctcccgggagaacgggggttacgtggcgagcctggctcagtacccaacgttgaccgccttttggaaaccgcaggtatcaaagccagtgcgctgcgtgagattgtggagacatgggatgagtcttcagggtccttcctccccgtaccagaacgaaggcgcggacctaagggagattccggcgagcaggggcctccgggaaaggaaggacctatagggtttccgggagagcgtggactgaagggtgatcgtggtgacccagggcctcaaggaccccctgggctggctttgggcgagcgcggacctcccgggccttcggggctggctggcgagccaggaaaaccagggatcccgggcctgcctggtcgcgccggaggagtcggagaggccggacgcccgggggagcggggagaacggggcgaaaagggcgagagaggcgagcaagggagggacggccctcctggcctgcccgggacaccaggcccccccggccctccaggcccaaaggtaagtgtggacgagccaggtcccggcttgtctggggaacaggggcctcctggcttgaaaggtgccaaaggggagccaggctcaaacggcgaccagggcccaaaaggcgataggggagtccctggaatcaaaggcgacagaggcgaaccaggcccccgcggacaggatggaaatccagggctgcctggagaacggggaatggctgggcccgagggaaagcctgggctgcagggtcctaggggaccaccaggcccagtggggggacatggggacccaggccctcccggagcccccggactcgcagggcccgccgggccccaggggcctagcggactgaagggcgaacccggagaaacagggccacccggccgcggcctgacagggccgaccggcgcagtgggtctccccggaccacccgggcctagcgggctggtggggccccaggggtccccggggctcccgggccaggtgggggaaacgggaaagccaggggcacccggaagggacggtgcgagtggaaaggacggagataggggatcgccaggtgttcccggatcgccaggcctccctgggcctgtcgggccgaagggggagccgggccctacaggagcccctggccaggccgtggtgggtctgcctggcgccaaaggagagaagggtgccccagggggcctagctggcgacctggttggcgaacctggcgctaagggggataggggtctgcctggaccccggggagagaagggagaagcaggccgtgctggagagccgggagacccaggcgaggacggccagaagggtgcgcctgggccgaaaggcttcaagggcgacccaggcgtcggcgtgccgggtagccccggacccccgggtcctccaggcgtgaaaggcgatctcggccttcccggcctgccaggggctcccggggtggtaggtttcccgggtcagaccgggccgcgaggggagatgggacagccaggcccgtccggcgagcgagggctggcaggaccaccaggccgagaggggattcctggaccgctaggtccccctggacctccaggatctgtgggcccacccggcgcttccggcttgaagggcgacaagggggacccaggggtggggttacctggaccaaggggagagcgtggcgagccaggcataagaggggaggatggaaggcctggacaggagggacctcgcggattgacaggccctcccgggtcccgaggtgagagaggggaaaaaggcgacgtcggttccgcgggtctaaagggggacaagggagacagcgctgtgatcttgggtccaccaggccctcgaggtgcaaagggagatatgggggagcgtggcccccgtggcctcgacggggacaaaggaccacggggcgataacggcgatccaggcgataagggctcaaagggagagccgggcgacaaagggagtgcgggacttccgggcttgagagggctgcttggcccacaggggcagccaggagctgctggaattccaggggacccaggcagcccaggtaaagacggcgtcccaggaatccgaggagagaagggggacgttggattcatgggtccacgcggcttaaagggagagcggggcgtgaagggggcctgcggactggatggcgaaaaaggcgacaagggggaggccgggccgccgggacgccccgggctggcaggccacaagggtgagatgggtgagcccggagtgccagggcagtctggagcccccggcaaggaaggtcttattgggccaaagggggaccggggattcgatggtcagcctggtcccaaaggggaccagggggagaaaggtgagcgcgggactcctggcattggaggcttccctggtcctagcggtaatgacggatctgccggaccaccagggcccccggggtccgtcggcccaagaggcccggaaggtttacaaggccaaaaaggcgagagagggcctcctggcgagcgtgtagtgggagccccaggagtccccggcgctccgggggagagaggcgaacagggccgccccggccctgcgggcccccgcggcgaaaagggcgaagccgccttaaccgaggacgatatccgggggttcgtgcggcaggagatgtctcagcactgtgcgtgccaaggtcaattcatcgcatccgggtctaggcccctgccttcctatgcagcagacacagcgggcagtcagctgcatgccgttcccgtgctgcgcgtgtcacacgcagaggaagaagaaagggtaccccccgaggatgacgagtactcagagtattctgagtattcagtagaagagtaccaggatcccgaggcaccctgggactccgacgatccttgcagcctgccactggatgagggcagttgcaccgcttataccctccggtggtatcatagagctgtgaccggtagcactgaggcctgccatccttttgtgtacggagggtgtggggggaacgctaatcgcttcggaactcgggaagcctgcgagcgcagatgcccaccacgggtcgtgcagtcccagggcacaggcactgcccaggat

SEQ ID NO: 1455 - DNA, 8832 bp, Artificial Sequence
  derived and/or modified sequence
atgaccctgcgtctgctggtagctgccctgtgcgccgggatcttggctgaagctccccgtgtcagggcccagcatcgggaacgagtcacatgtacacgactgtacgccgcagatattgtctttctattagacggttcatcttccatcggccggtcaaattttcgggaggtacggtccttcttggagggcctggtcttgcctttctcgggcgccgctagcgctcagggtgtgcgcttcgctaccgtccagtattcagacgaccccagaactgagttcgggcttgatgccctcggctccggcggggatgtcattagggcgattagagagctgtcttataaaggcggcaatacgagaaccggtgcagcaatcctgcatgtggctgaccatgtgttccttccacagctggctcgcccaggggtgccgaaggtctgtatcttgataaccgacggtaagtcccaggacctggtcgacacagccgcacagcgcctgaagggtcaaggagtcaagcttttcgctgtggggataaagaatgctgacccagaggagttgaagagagtggcttcccagccgacatctgacttttttttttttgtcaatgacttttcaatactgaggactctattacccctggtctctcgcagagtctgcacgacagccggcggagtgcctgtgactcgccccccagatgacagcactagtgctcctcgggatctagtgctgtcggagccatcttcccaatctttgagggtccagtggacagctgccagcggcccagtaaccggctacaaggtgcagtatacccccctgaccggactggggcagcctttgccatccgagcgtcaggaggtcaacgttccagccggggagacctccgtgcgcctaagaggccttcggcctttaacagagtatcaggtgaccgtaatcgcgctgtatgccaatagcattggggaggccgttagtggaaccgccagaacaaccgccttggaagggccagagttgacgatccagaacactacagcccatagcctcctagtggcgtggcgttctgtacccggggcgactggttaccgagtcacctggagggtgctgagtggagggccaacccagcagcaggaactcgggcccgggcagggctcagttcttctgcgagacctggagccggggactgactatgaagtgactgtgtccacactgtttggtcgtagtgttggccctgccacaagcttgatggcccggacagatgcttctgtcgaacagacgctgaggcccgtgatcctcgggcctacgtccattctgctgtcatggaacttagtgccagaggccagaggctaccggctggaatggcggcgcgagaccggacttgagcctcctcaaaaagtggtgcttccttctgacgtgacacgctaccagcttgatggcctgcaacctggtacagagtacagacttaccctgtataccctattagaaggccacgaggtggctacacccgccaccgtggttcctacgggtccggagctgccagtgtctccggtgacggaccttcaagcgacggagttaccggggcagagggtcagggtctcgtggtctccagtgcccggcgccactcagtaccggataatcgttagaagcactcaaggcgtcgaacggacactggttcttcctgggtcccagacggcttttgatctggatgacgtgcaggcaggacttagctacactgtgagagttagcgctcgggtcggcccacgcgaggggtcagccagcgtgctgaccgtgaggcgcgagcctgagacaccactggccgtgcctggcctgcgcgtcgttgtcagtgacgcaactcgagtgcgtgtggcatggggaccagtaccaggagccagcggcttccgcatcagctggagtacgggcagcgggccagaatcctcacagaccctacccccagattcgaccgctactgatatcaccgggctgcaaccaggaacaacataccaagtggcagtctcagtgctgcgcggacgtgaggaagggcctgcagcagtgattgtcgcacgtaccgacccgctcggccccgtgagaaccgttcatgtcacccaggcttcctccagctcggtgacaataacatggactagagtgcctggcgctacaggataccgcgtttcttggcacagtgcacacggacctgagaagagtcagctcgtcagcggagaggccactgtagcagagctagacggactggagcccgacacggaatacaccgttcacgtgcgggcacacgtcgctggagttgatggaccccctgcctctgttgtggtgagaactgctcctgagcccgtcgggcgagtctccagacttcaaatcctgaacgcgtcgtccgatgtcctgaggatcacttgggtcggagtcactggggcgaccgcctatcgcctggcttgggggaggtcagaaggaggacccatgcgccaccagatactacccggcaacacagactcggccgagatccgaggcctggagggcggagtatcatattctgttagggtaacagcgcttgtgggggaccgtgagggaacaccggtgagcattgtggttacgaccccgccggaggcacccccagcactggggacactccacgtcgtacaacgaggggagcattccctgcgcttgcgctgggagcctgtgcctcgggcgcaggggtttctgctccattggcagcccgaggggggacaggaacagagcagggtgcttggcccagaattaagcagttatcatctggacgggctggagcccgccactcagtatcgggtcagactgagtgttctgggacctgccggggaggggccttccgcagaagtgacagctcggacggaatctcctagggtgccatcaatcgaattacgggtggtcgatacatctatagactccgtgactctggcctggaccccagtgagcagggccagctcctatatattgtcttggcgacccctcaggggaccgggtcaggaggtaccaggttctccccaaaccctgccaggcatctcctccagccagcgagtcactggacttgagcctggagtctcgtatatcttctctctgacgccagtacttgatggcgtcaggggccccgaggctagtgtgacccagactccagtgtgcccccgcggcctcgcagacgtggtgtttcttcctcatgccacacaggataacgcccacagagccgaggctacaagaagggtgctggaacgtctcgttctggctctcggaccactaggcccgcaggctgtgcaggttggactgttgtcctattctcaccggccatctcctctattccctctcaacggaagccacgacctcggaattattttgcaacgtattcgcgatatgccctatatggatccgagcggcaacaatctcgggacggccgttgtcacagctcatagatatatgctagcccccgatgcaccaggccggcgccagcatgttccaggcgtgatggtattgctggtggatgaaccactgcgaggcgacatcttttccccaatcagggaggcacaggcctctggtctaaacgtcgtgatgttgggtatggctggcgctgaccctgagcagctcagaagactggccccaggcatggacagtgttcagacattttttgctgtcgacgacggacctagtctagatcaggcagtaagcggcctagccacagctctgtgtcaggccagtttcaccacccaaccgaggcccgagccatgccctgtgtattgtcctaagggccagaaaggtgagcctggagagatgggtcttcgcggacaggtgggaccacctggtgatcccgggcttccgggtcgaacaggagcacccggtccacaaggtccacccgggtctgcgactgcaaaaggcgaaaggggttttcccggcgcggatggaagacccggcagtccagggagagccggcaacccgggaaccccaggcgcaccaggacttaagggctcccctggtttaccaggtccccggggagaccccggcgaacgaggaccgcgaggtccaaaaggcgagccgggcgctcccggacaggtgattggcggtgaaggtcccgggctgccaggtcgcaaaggagacccagggccatctggaccccccgggccccgtggaccgcttggcgaccccggtccccgtgggcctcccgggttacctgggactgccatgaagggggataagggagacaggggcgaacgtggccctccgggacctggtgagggagggattgcgcctggagagcctggcctccccggcctgcccggatcaccagggccccaagggcccgtagggccgccaggtaaaaaaggagaaaagggtgacagcgaagacggtgccccaggacttccagggcagccaggctcccccggcgagcagggtccaaggggacccccaggagccatagggccaaaaggcgatcgcggtttccccggcccgctgggggaagcgggcgagaagggagagcgcggcccaccggggcctgcaggttctcggggtctgccaggagtcgcaggccggcccggagctaagggccctgaaggccctccaggacccactggaaggcagggggaaaagggagagcctggccgacctggggacccagccgtggtaggtcccgcagtcgctggaccaaagggggaaaagggggacgtgggaccagctggaccacgcggggcaacaggtgtgcagggtgaacgaggtcccccgggactggtgctcccgggcgatcctggaccaaagggggaccccggggatagaggtcctattggcctaaccggaagggccggtccccccggtgactccgggccgcctggggagaagggggatcctggccgccccggcccgccgggacccgttggaccccgggggcgggacggagaggttggagagaagggcgacgagggacctcccggtgatcccggtctccccggtaaagccggcgagcggggactccgcggcgcccccggggtccgagggcctgtgggagaaaagggggaccaaggtgatcccggcgaagacggacgaaatggaagcccgggatcaagtggccctaagggggacaggggagaacctggcccccccggccctccaggccgcctcgttgacacaggtcccggggctagagaaaaaggagaaccaggggaccgggggcaagagggaccgagagggcccaaaggggaccctggacttccgggtgcacctggtgaacgaggcatcgaagggtttagaggccctcctgggccccagggagatccaggcgttaggggcccagccggtgagaagggtgatcggggccctcctggccttgacggtcggtctggacttgacggcaagcctggagctgcaggcccctcagggcccaacggcgccgctggcaaggctggtgacccaggtcgcgacggattacccggacttcgcggagagcaggggctgccagggccatcaggtccacccggattgccaggaaagcctggagaggatggtaagcccgggctaaatgggaagaacggggagccaggggaccccggagaggatggcagaaaaggagaaaagggagacagcggggcttctggaagggaaggccgagatgggcctaagggcgaaagaggggcgccggggattttaggccctcagggacctcctggccttccggggcccgtgggaccacctggccagggtttccctggagtgcctggaggtaccgggcctaagggggataggggggagactggcagtaagggggaacaggggttgcctggtgagcgcggcctgcggggagaaccaggctcagttccaaacgtggacagactgctcgaaactgctggtattaaagcttctgctctgcgggaaatcgtagaaacctgggacgaaagtagcggctccttcctccctgtgcccgagcggcgccgaggcccaaaaggtgattccggagagcagggccccccaggaaaggaaggaccaattggatttccgggagagcgtggcctcaagggcgatcggggtgatcctgggccacaaggaccaccagggctggccctgggggagcgcggcccccccgggccctcaggactcgccggagaacctggtaagcctggtattcccggtctcccagggcgtgccggcggtgtcggagaggcgggccgccccggagagcgcggagagaggggagagaaaggggagcgtggagagcaaggccgcgatggaccccctggcctccctggtactccgggcccccctggacctccaggacccaaggtctcagtcgacgaacctggccccggcttgagtggcgagcaaggccccccaggtctgaaaggcgctaaaggcgagcccggatcaaacggcgaccaaggacccaaaggcgaccgaggcgtgcccgggatcaaaggcgaccgcggggagcccgggccccgcggccaggacggaaacccaggccttcctggcgagagaggaatggccggtccagaggggaaaccaggacttcaaggtccccgaggtccaccaggacccgtgggaggacacggggatcccggtcctcctggcgccccagggctggcaggccccgccggcccacagggcccatcggggctcaagggtgagccaggtgagacaggacctcccggcagaggtctgacgggtcccacgggagccgtgggtctacccgggccacccggccccagcggcctggttggaccgcagggctctcctgggctgccaggacaggtgggcgagaccggaaagcctggcgctccagggcgtgacggcgcttctgggaaggatggtgaccgcggcagccccggcgtgccggggtcccccgggctgccaggccctgtcggaccaaagggagagccagggcccactggcgcccctgggcaagcagtggtgggtctacccggagctaagggggagaaaggcgctcctggagggcttgcgggtgaccttgtgggagagcccggagccaagggtgaccgcggtttacctgggcccagaggagagaagggcgaggctggacgagcgggagaaccgggtgatccaggcgaggacggccagaaaggagcgccgggccctaaaggattcaagggagaccctggagtgggagttccaggttctccaggaccccccggcccccccggtgtcaaaggcgatcttgggctccctggcttgccaggcgccccaggagttgtgggctttcccggccagactggaccacgcggagagatgggtcaacccgggccctctggagagcgagggttggccggaccgcctggaagggagggcatccccggaccactgggaccacctggacctccgggaagtgtaggtccgcccggtgcatccggcctgaagggggacaaaggggaccccggggtggggctgcctggcccacgaggtgagcgaggcgagcccggaatccggggagaggacgggcgaccaggccaagaagggcctcgagggctgactggcccgcctgggtctcggggcgagagaggcgagaagggcgacgtgggttccgctggcctcaagggggacaaaggcgactcagcagtcatccttggccccccaggaccacggggagcaaaaggtgatatgggggagagaggccctcgagggctggatggcgataagggccctaggggggataatggtgaccccggcgataagggctctaaaggagaacctggggacaagggctcagctggtctgccggggctgcggggcctgctcggcccccagggacagcctggggccgccgggattccaggggatcctgggagcccaggaaaggatggcgtgccaggcatccgcggtgaaaagggagatgtgggctttatggggcccagagggttaaagggtgagaggggcgtcaagggtgcttgcggcctggatggagaaaaaggagacaaaggagaggcaggtccaccaggacgtcccggactcgctggccacaagggtgagatgggcgaaccaggtgttcccggtcagtctggcgccccgggaaaggaaggcttgatcggaccaaaaggcgatagaggctttgacggccaacccggaccaaaaggggaccaaggggagaaaggggagagggggactccagggattggggggtttccagggcccagtgggaacgacggttccgcaggccctcccggaccacccggtagtgtgggccctcgaggccccgagggattgcagggccagaagggtgagagaggtccgcctggcgaacgggttgtgggagctcccggggtgccgggcgcccctggagaacgtggcgagcagggacgcccggggccagccgggcctaggggggagaaaggggaggccgccctcacagaagatgacattcgggggttcgtgcgtcaagaaatgagtcaacactgtgcttgccagggtcagtttatagcctcaggctcccggccactgcctagctatgccgctgataccgccggctctcagttgcacgcagtgccagtcctccgcgtcagccacgccgaagaggaggaaagggttccccctgaagacgatgagtattctgagtacagtgagtatagcgtggaagaatatcaggaccccgaagcaccttgggatagtgatgacccctgttctctgcccctggacgaaggatcatgtacagcttacactcttcgctggtaccatcgggcggtcactggctcaactgaagcttgtcaccccttcgtttacggtgggtgcggcggtaacgctaacagatttggaaccagagaagcatgtgaacgcaggtgtcctccccgcgtcgtgcaatcccagggaaccggcaccgctcaggac

SEQ ID NO: 1456 - DNA, 8832 bp, Artificial Sequence
  derived and/or modified sequence
atgacgctgaggctgctggtggcggccctgtgcgcgggcatcctggccgaagcaccacgcgtacgcgctcaacatagggaacgcgtgacctgcaccagactctacgcggcagacattgtctttctgctggatggctcgagttcgattggaagaagcaacttcagagaggtccgctctttcctggaggggctcgtcctgccattctcaggagctgcctcggcgcagggtgtccggttcgccacggtgcagtactcagacgatccgcgaaccgaattcggcctggacgctctgggatcggggggagacgtgattagagccatcagggaactctcctacaaggggggaaacactagaaccggagccgccatcctgcatgtcgccgatcacgtgttcctgccgcagctggctagacctggtgtgcccaaggtgtgcattctgatcactgacgggaagtcccaggatctggtggatactgccgcccaacgcctcaagggacagggagtgaagctcttcgcggtgggaatcaaaaatgcggatccggaagagctgaaaagggtggcttcgcaaccgacttcggatttctttttctttgtgaatgacttctccatcctgagaaccctgctgcctttggtgtcaagacgggtgtgcaccactgcgggaggagtcccggtcactcgaccgccggacgacagcacgtccgctcctcgcgatctggtgctgtccgagccttcatcccagtcgctccgtgtgcagtggactgccgcctcgggtccggtgaccggatataaggtacaatacactcccctgaccggactcggacagcccctcccgtccgaacggcaggaggtgaacgtcccagccggagaaacgtccgtgcgcctgaggggactcaggccgctgacggaataccaagtgaccgtgatagcactctacgccaactcaatcggagaagcggtgtccggaaccgcgagaactaccgccttggagggcccggagttgacgattcagaacactaccgcacactccctcttggtggcatggcgctcggtgcccggcgctactgggtaccgcgtcacctggcgtgtgctgtcaggaggccctacccaacaacaggaactggggccggggcagggcagcgtgctcctccgcgatctcgagcctgggaccgactacgaagtgaccgtctcgacgctgttcgggaggtcggtcggccccgccacctctctgatggcgcgcaccgacgcatccgtggaacagactcttagacctgtgatccttggaccgaccagcatcctcttgtcgtggaacctcgtgccggaagcgcgcgggtaccggctggaatggagaagggagactggtcttgaaccgccacaaaaggtcgtgcttccgagcgatgtgacgcggtaccaactggatgggctccaaccaggcacggagtacagactgaccctgtacactcttcttgagggacacgaagtggcaaccccggccactgtcgtccctacgggacctgagctcccagtctccccggttactgacctgcaggccactgaactgccgggacaacgagtgagggtgtcgtggtcaccggtgccgggtgccactcaataccggatcatcgtccgctcgacccagggcgtggaacgcactctcgtgctcccgggctcccagactgccttcgacctggacgacgtgcaggcaggtctgtcctacaccgtgcgcgtttcagccagagtcggcccgagagaagggtccgcatcagtgctgaccgtgaggcgggagccagaaaccccactcgcggtccctgggctccgcgtggtggtgtccgatgccactcgggtgagggtggcatgggggccagtaccaggagcgtccgggttcaggatctcatggtcgactggatccggaccggagtcatcccagactcttcctccggattcgaccgcaacggacattactgggctccaacctgggaccacctaccaggtcgctgtgtcggtgctcagagggcgggaggaaggaccagccgctgttattgtcgcccggacggatcccttgggaccagtgcgcaccgtgcacgtgactcaggcctcatcctcaagcgtgactatcacctggactcgcgtcccgggagcaaccggataccgggtcagctggcactccgcgcatggaccggagaaatcgcagctcgtctcgggagaggcaactgtggccgaactggacggattggagcctgacaccgaatacaccgtccatgtgcgagcccatgtggcgggcgtggatgggccgccggcgagcgtcgttgtgcgcaccgctccggaacctgtcggaagagtgagcagactgcagatcctgaacgcttcgagcgatgtgctcaggatcacttgggtgggagtcaccggggccaccgcctaccggcttgcctggggacgcagcgagggcggcccgatgcgacaccagattctgccgggaaacactgactcagccgaaatacggggcttggaggggggcgtgagttactcagtgagagtcaccgccctggtgggagatcgcgaaggtacccccgtttctatcgtggtgaccaccccgcccgaggcgcctccggcactcggaactttgcacgtggtgcaacgcggtgagcactcgcttaggctccgctgggaaccggtgccgagggcgcaaggcttcctcctgcactggcagccagaaggaggccaggagcagtcacgcgtgctcggtccggagctgtcctcctaccaccttgatggccttgaacccgccacccagtaccgggtcaggctctcagtgcttggacctgcgggcgaaggaccctcagcagaggtgaccgcacggaccgagagcccacgcgttccatcaatcgaattgcgggtcgtcgacacttcgatcgactcggtgacgctcgcatggaccccagtgagccgcgcgtccagctatatcctgtcctggcggcctttgcgcggcccaggccaggaagtcccgggaagcccccagaccctccctggcatctcttcctcgcagagggtcaccggcctggaaccgggagtgtcttacatcttctctttgacccctgtgctggatggtgtcagaggtcctgaggctagcgtgactcaaactccagtgtgcccaaggggcctggccgatgtggtgttccttccccatgccactcaagacaatgcacaccgggcggaagcgacccggcgggtgctggagcgcctggtgctggcactcgggcctctgggaccacaggcggtgcaggtgggtctgttgtcgtactcccacagaccaagcccgttgttccctctgaacggttcgcacgaccttggtatcatcctgcagagaatccgcgacatgccatacatggacccgtcggggaataatctgggaaccgccgtggtgactgcgcatcgctacatgcttgccccagatgcaccagggcgcagacaacacgtacccggcgtgatggtgctcctcgtggatgaaccgctgagaggggacatcttttcacccattcgggaggcgcaagcctccggcctcaatgttgttatgctgggtatggccggtgctgaccccgaacagctccggcggctggccccgggcatggacagcgtccagacgttcttcgcggtcgacgatggaccgagccttgatcaagcggtgtctggactggctactgcactttgccaggcttccttcaccactcaacctaggcctgaaccttgcccagtgtactgcccaaagggacagaagggagaaccgggtgagatgggcctgagaggtcaggtgggtccgccaggcgatccgggactgccaggccggaccggcgccccaggaccccagggccctccggggtctgctactgcaaagggagagcggggatttcccggcgcagacggtcggccggggagtcctggccgggcgggaaacccaggaacccccggagcgcccgggctcaagggttcgccgggactcccgggaccacggggtgaccccggggaacggggtccacggggaccgaaaggcgagcccggggccccagggcaggtcatcggcggtgagggaccagggctccctggcagaaagggggaccccggaccatcgggcccaccaggaccgcggggaccgctgggagatccgggaccaagagggccacccggattgccaggaactgcgatgaaaggagataagggggatcgcggagagcggggacctccggggccaggagaaggcggtatcgccccaggagaacccggactcccgggcttgccggggtccccagggccgcaagggccagtgggacccccaggtaagaaaggcgaaaagggtgacagtgaagatggagccccggggctcccgggacagcctgggtcgccgggagaacaaggaccccgcggaccgccgggcgccatcggccctaagggagatcgcggcttcccgggaccgctgggcgaagccggagaaaagggagaaagagggccgcccggacctgcgggttcccgcggactgccaggggtggccggcaggccaggagccaaagggccggagggaccaccagggccgaccggccggcagggagagaagggagagccgggacgcccaggtgaccccgcggtcgtgggccctgctgtcgcaggacctaagggagaaaagggcgatgtgggcccggctggaccacgcggagccactggagttcagggggaacgcggtccgcctggactggtcctgcccggagatccgggaccgaagggagatccaggcgatagaggcccgattggactcactggccgcgcgggcccgccgggagattcaggaccaccgggagaaaagggagatcctggtcggccggggccgccaggtccggtgggtccgcggggcagggacggagaagttggggaaaagggtgacgaaggtccgccgggagatcccggactccccggaaaggctggagagagaggactgagaggtgccccgggcgttaggggtcctgtgggagagaaaggagatcagggcgaccctggagaagatggccggaacggctcgccgggctccagcggcccgaagggtgaccgaggtgagcctggaccgccgggtccgccggggcgcctcgtggacactggaccgggggcccgcgaaaaaggcgaaccgggcgaccgcggccaggaggggccgcgcggacctaaaggagatcctggactgccgggtgcgccgggagaacgtggaatcgagggatttcggggacctcctggaccccagggagatcctggagtgcgaggaccggcaggcgaaaaaggggatcgggggccgccaggactggacggacggtccgggctggacggcaaacctggggccgctggaccatccggcccaaacggcgctgcaggaaaagctggagatccgggacgggatggactcccggggctgagaggagagcaaggccttccgggaccgtccggacctcccggactgccgggaaaaccgggagaggacggcaaacctggactgaacggaaagaacggagagccaggggatcctggcgaggacggacgcaagggcgaaaagggagactccggcgcctccggacgcgagggccgagatggcccgaagggcgagcggggcgctccaggaattctggggccccaaggcccgcctggactgcccggtccagttgggccgccaggacaagggtttccgggagtccctggaggcactggtccaaagggtgatcgcggagagactggatcgaagggagagcagggactgccgggagaacgagggctgagaggtgaaccgggatcggtgccaaacgttgaccggctgctggagactgccggaatcaaggcatcagcgctccgagaaatcgtcgaaacctgggacgaatcgtcgggctcgtttctccctgtaccggagcggaggcgggggccgaagggggactcgggcgagcagggaccgccaggaaaagaaggaccaatcggattcccgggtgaaagaggacttaaaggcgatcggggagatcccggcccccagggccccccggggctggccctcggcgaacgcggaccccccggtccgtccggactggccggagagcctggcaagccgggcatccccgggctcccgggtagagccggaggtgtgggagaagcgggacgtcctggggaacggggagagcgcggggagaagggcgaaaggggtgagcagggacgggacggaccaccgggactgccgggaacccccggcccgccggggccaccaggccctaaggtgtccgtggatgaaccgggaccgggactctcaggagagcagggaccaccaggactgaagggggcaaagggagaaccaggatccaatggcgatcaaggtccaaagggagatcggggagtccctggcatcaagggggaccggggtgaaccgggaccgagaggccaagatggaaatcctggactgccgggagagcggggcatggctggccccgaaggtaaacctggacttcaggggccaagagggccaccaggcccggtgggaggacacggagatcctggcccaccaggcgcgccaggcctcgccggcccagcaggaccacagggaccttctggcctgaaaggggagccgggagaaacgggaccgcctgggcggggattgaccggcccgacgggtgcggtgggactgccaggacctccaggaccgtcaggactggtgggcccacagggaagcccgggacttccagggcaggtcggagaaaccggaaaaccgggtgcgccgggtcgcgacggtgcctcgggcaaagacggggaccgtggatcgccaggagtccccggatcgccagggctgccgggtcccgtgggaccgaagggtgaacccggacccactggcgctccgggccaggctgtggtcggattgccgggagcaaagggagagaagggcgctccgggtggattggcaggggatcttgtgggagagcctggcgccaagggtgacaggggtttgcccggccctcggggagaaaagggcgaggccggtagagcgggcgaaccgggagatccgggagaagatggccaaaagggcgctccgggtccgaagggctttaagggggacccaggtgtcggggtaccaggttcaccaggaccgccgggcccgccaggggtcaagggggatttgggcctgccgggcctgccaggagcccccggtgtggtcggatttccaggtcaaactggaccccgcggagaaatgggacaaccaggtccaagcggggagagaggtttggcggggcccccagggcgcgagggcatcccggggcctctgggaccgccaggcccccctggcagcgtggggccaccaggagcctccggactgaagggtgataaaggcgatcctggagtcggactgccgggccctcggggcgagcggggcgaacccggtatccggggggaagatggtagacctggacaagaaggaccgcgggggcttaccggacccccaggatccagaggggaacgcggggagaagggagacgtggggtcggcagggctgaagggcgacaagggagacagcgccgttatcctgggcccgccaggtccacgcggagccaagggagatatgggcgaacgcggcccacggggactcgacggagacaagggccctcgcggagataacggggaccccggtgacaagggatctaagggtgaaccgggagacaagggctccgctggcttgccggggttgcgcgggctgctggggccacaagggcagcccggcgccgcagggatccccggagatccgggctcgccgggaaaagatggcgtgccagggatcagaggagagaaaggagacgtcggatttatgggcccccgcggactgaagggagaacggggtgtgaaaggagcttgcggcctggacggagagaagggcgataaaggagaggcaggcccccctggccgcccgggcctggcaggacacaagggagagatgggagagccgggggtcccgggacagtccggcgcaccagggaaagaaggactcatcgggccaaagggtgaccgaggcttcgatggtcagcccggaccaaaaggggatcagggcgagaagggagaacgcgggacccccggaattggaggattcccagggccaagcgggaatgacggctccgcgggaccgccgggaccccccggatcagtcggaccgcggggaccggagggcctccaaggacagaaaggcgaaagagggcccccgggagaacgcgtcgtgggagccccgggagtgcctggagctcctggagaaagaggagaacagggccggccaggcccggctgggcctcggggagagaaaggcgaggcagcccttaccgaagatgacatccggggatttgtgcggcaggaaatgtcccagcactgcgcttgccaaggccagtttatcgcgtctggatcgcggccgctcccatcgtatgccgctgatacggcgggttcccagcttcacgcagtcccagtgttgcgtgtgtcccatgccgaagaggaagagcgcgtgccccctgaagatgatgagtactcggaatacagcgaatacagcgtcgaggagtaccaagatccagaggcgccctgggactcggacgacccttgcagcttgccgctggatgagggatcatgtactgcttacactctccggtggtatcaccgggccgtgactggctcaactgaggcctgtcatccgttcgtgtacggcggctgtggtggaaacgctaatcggttcgggacgagggaggcctgtgaaagaagatgtccaccaagggtcgtgcaatcgcaaggcaccggaaccgcccaagat

SEQ ID NO: 1457 - DNA, 8832 bp, Artificial Sequence
  derived and/or modified sequence
atgactctcaggcttttagtcgctgcattatgtgctggcatactggccgaggcccccagagtgcgggcgcaacaccgagaacgggtaacttgcactagactgtacgctgctgacatcgtgttcctgctggatggttcgtcctctatcggaagaagcaatttccgagaggtaaggagtttcctcgagggtctggtgctgcctttttccggcgccgccagtgcacaaggcgtgcggttcgccacggtccagtattccgacgatccccgcacagaatttggattagacgctcttggttccggaggtgacgttatcagggccattcgcgaacttagttacaaaggtggtaatacaaggacaggagccgccattctccacgtggcggaccatgtatttctgccccagttggcccgtcccggggttccaaaggtgtgcatcctgataaccgatggaaagtctcaggacctggtggatacagctgctcagagattgaaaggccagggagtgaagctgttcgctgttgggatcaagaatgctgaccctgaggagttgaagcgagtggcttcccagcctaccagtgatttctttttcttcgtgaatgacttttccatccttaggaccctgttgccacttgtgtcacgcagggtgtgcactaccgccggtggggtgcccgtcacccggccccccgatgatagcacctctgccccccgcgacctcgtcttgagcgagccctcatcccagagcctccgggtacagtggaccgccgcttctggtcccgtgacaggatataaggtgcagtatacgccattgaccggtttagggcagccattgccaagcgagagacaggaggtcaacgtgccggctggggaaacctcagtccgcctgcgcggcttacggccgctcactgagtatcaggtgacagtgatcgcgttgtacgctaacagcataggcgaggccgtgagcggcaccgctcgaaccaccgccttggagggcccagagctaactatacagaatactactgctcactcactcctggtggcctggaggtccgttcctggggcaactggctatcgcgtcacctggcgggtactgtcggggggcccaacccaacagcaggagctggggcccgggcagggaagcgttctgctgcgcgatctggaacccggtacggactacgaggtaacagtgtcaaccctgtttgggcgcagtgtgggacctgcaacctctttgatggcgcgcacggacgcgtccgtagagcaaacactgcgccccgtcattttaggaccgacctcaattctcttaagctggaacctggtgccagaggctagagggtaccggctggaatggagaagggaaacaggcctcgaacccccccagaaagtggttctgccatccgacgtgactcgataccagttagacgggctgcagcccgggaccgagtatagacttacactctatacactgcttgagggacacgaagtggcaactccggcaaccgtggtgcccacggggcctgaattacctgtgagcccagtcaccgatctacaggcaaccgagctgccagggcagagagtgcgggtcagctggtcccctgtccccggcgccacccagtaccgcatcattgtccgctccacgcagggggtagagcggacgctcgtgctcccgggctcccagacagcctttgacctagacgacgtccaagcgggcttgagctacacggtgagggtgtccgcgcgcgttggaccaagggaagggtctgccagcgtcttgaccgtgagacgcgagcccgaaaccccactggccgtacctggtttgcgtgtggtggtttctgacgcaactcgcgtccgtgtcgcttggggcccagtcccaggcgctagcggattccggatttcgtggtccactggatctggccccgaaagttctcagaccctaccacccgattctacagcgactgacatcactggccttcagcccgggacaacttaccaagtggccgtgtctgtgcttcgcggtagggaagagggtccggcggctgtcatcgtggcaagaaccgacccactgggtcctgtgcggaccgtccacgtaactcaagcgtcctcctcatctgtgacaataacttggactagagtgccgggagcaaccggctacagagtgtcttggcacagcgcacacggtcctgaaaaaagccagctcgtctctggagaggccaccgtggccgaactggacggcctggaacctgacactgagtacaccgttcacgtccgcgcccatgtcgccggcgtagacgggcccccagcgtctgttgtggtacgtaccgctcctgagcccgttggccgcgtgagcaggctacagatcctaaatgcgtcatctgatgtcctgcgcataacctgggtcggcgtaactggggcaacagcttacagactggcttggggccgatcagagggcggtccaatgagacaccagatcttgccagggaatacggactccgccgaaattaggggactggaaggaggagtgagctactcggttagggtcaccgctctggtaggcgacagagaaggaactcctgtttcaatcgtggttaccacccctccagaagctccaccggcgctggggacactccacgtggtccaacggggagagcactctctcagattgaggtgggaaccggtcccacgtgcccagggatttctcctccattggcagccagagggtggtcaggagcagagtcgcgttctcgggcctgagctgagttcataccatctcgacggactggagccagcaactcagtacagagtgcgactctcagtattgggcccggccggtgaaggcccatccgctgaagtcaccgccagaaccgagagtccacgtgtaccctccatcgaactacgcgtggttgacacctcgatcgattccgtaactcttgcatggaccccagtatccagagccagttcctatattctttcctggagaccgttgagggggcccgggcaggaagtgccagggtcaccgcagacccttcccggaataagctcttcacaacgggtcactggtctcgaaccaggagtgagttatatcttcagtcttacccctgttctggatggagtgcggggaccagaggcttcagtgacccagacccccgtgtgtcctagaggtctggccgatgtggtctttctaccccacgcaactcaggataatgcccatcgggcagaagcgacccggcgggtgctggaaagattagttctcgcactgggacccctggggccccaggcggttcaggtgggcttactgtcctactctcaccgacccagcccgttgttccccctcaatggctctcatgatcttgggataattctgcagcgcattcgggacatgccatacatggatccaagtggaaataaccttgggacagcagtggtgacggcccatcgttacatgctagcccccgatgccccggggcgaaggcagcacgttccgggtgtaatggtccttttggtggacgagcccctccggggcgacattttctctcctatccgagaagcacaagcgagtggtttgaacgtggtgatgcttggaatggctggggcagatcccgagcagctgcgcaggctggcccccggcatggattctgtgcaaaccttctttgccgttgatgatggtcctagcctggaccaagcagtaagtgggctggcgacagcgctatgccaggcgtctttcacgacacagccaagacccgagccgtgcccagtctactgccccaaagggcagaagggcgagcccggcgagatgggccttagaggccaagtcggcccgccgggtgatcccggcctgcccggcaggacaggcgcacccgggccgcagggaccgcccgggtcggccacagccaagggcgagcgaggatttccaggagcggacggaagaccaggcagccccggacgagccggtaaccctggcactccgggcgcacccggactaaaggggagccctggtctgcccggtcctcggggcgatccgggcgagcggggccctcggggccctaagggcgaacccggggcccccggacaggttattgggggcgaggggcccggacttcctggccgcaagggggaccctgggccaagcggccccccaggcccacgaggtcctttgggcgacccgggccccagaggccccccaggcctgcccggaacagccatgaaaggtgacaagggcgacaggggcgaacgagggcccccaggccccggcgagggcggcatagcccctggggaacctggcctgcctggcctaccgggtagtccaggtcctcagggtccggtgggcccacccggaaagaagggcgaaaagggtgatagcgaagacggcgctcccgggcttcctggtcagcccggaagcccaggagagcagggccccaggggccccccgggggccattggtccaaagggagaccgcggatttcctggccccctgggggaggccggcgagaaaggagagcgagggccgccaggaccagccggtagcagagggttaccaggagttgcaggccggcctggcgctaagggacccgaggggcctcccgggccaaccggaagacagggagaaaagggtgaaccaggccggccaggcgaccccgccgtcgtgggccccgccgtggccggtcccaaaggtgaaaagggagacgtcggacccgccggccccaggggcgccacgggtgtccagggtgaacggggccctcctggcctcgtgctgccgggcgaccccggccccaagggagaccctggggacaggggccctattggcttaacaggtcgggctggcccccctggggactctggaccgcctggcgagaaaggcgaccccggccggcccgggccccctggcccggtgggtccgcgtgggcgtgacggcgaggttggggaaaagggcgatgagggaccccccggcgatcctggtctgccaggaaaagccggggagcgaggactgagaggagcccctggcgtccgcgggcccgtcggcgaaaagggcgatcagggtgacccgggggaagacggtcgtaacgggtcgccgggtagctccgggccaaagggggataggggcgagccgggtcctccagggcctcccgggaggcttgtggacactgggccgggtgccagagagaagggagaaccaggcgatagggggcaagagggtccccggggtccgaaaggggatccgggcctgccgggcgctcccggtgagcgtggaattgagggcttccgcggtcctccagggcctcagggagaccccggcgtgcgcggccctgctggggagaagggcgaccgaggccctccggggcttgatggcagatctgggttggatgggaaaccaggagccgctggtcctagcggcccaaatggagccgccggcaaggccggagacccaggaagagatggactcccgggacttaggggagagcagggcttgcccggtccatccggccctccaggcttacccggcaaacctggggaggacggaaagcctggtttaaatggaaagaacggcgaaccgggcgatcctggcgaagacggtcggaagggcgaaaaaggggattctggcgcgagtggtcgcgaaggacgcgatgggccaaagggagagcggggggctcccggaattcttggaccccaaggtccacctggcctgcctggcccagtggggccccctgggcagggttttccaggagtacccggcggaactggcccaaaaggggaccggggcgaaactggaagtaaaggggagcagggattgccgggggagcggggtctcagaggtgagcccgggtctgtgcctaatgttgatagattgctcgaaactgcgggtatcaaggccagcgctctgcgagaaatcgtcgaaacttgggacgagtcgtcagggtccttcttacctgttccggagcgacgtcgcggccccaagggggacagtggtgagcaaggcccccctggaaaagagggacctatcggctttcctggtgaaagaggattgaaaggcgaccgcggtgaccctggcccccagggccctccaggcctggcgctgggggagcggggacctcctgggccttcggggcttgccggagagcctggtaagcctggcatcccaggccttcccggccgagccggaggtgtcggggaggctggccggccaggcgaaagaggcgagcgaggagaaaagggtgagaggggagaacaaggtagagacggaccaccgggcctgcctggcactcctgggccacccgggccacccggacctaaagtcagtgtggacgagcccggaccaggactgagtggtgagcagggcccgcccggtctgaagggggccaagggcgagccaggaagcaacggtgaccaaggcccgaagggggatcggggggtccctgggatcaaaggcgatcgcggggagcccggaccgcggggacaggacggtaaccccgggctgccgggggagcggggcatggctggacctgagggcaaaccagggctccagggaccccgcggtccccccggcccagtggggggtcatggcgacccgggccctcccggagcaccaggcttggccggtcccgccggaccccagggtccctctggcctcaagggtgaaccaggggagacgggcccaccaggcagaggtttgaccggtcccaccggtgcagttggattgcctgggcccccaggccccagcggcctggtaggaccccaaggcagcccgggattaccaggacaggttggcgagacgggcaagccgggtgcccctggtagggatggcgcttcaggaaaagatggtgacaggggcagcccaggcgttccaggatcgcccgggctcccaggccctgtgggccccaagggtgagcccggccccactggagcgccaggccaggctgtggtgggtttaccgggggccaaaggtgagaagggcgcccccgggggtctggcgggcgaccttgtgggtgagccaggtgccaagggcgacaggggacttccaggcccccgcggcgagaaaggtgaggctggcagggccggggagcctggggatcccggcgaagatggtcagaagggcgcaccgggtccaaagggcttcaagggcgacccaggtgtcggggtgcctggatcccccggtccccctggacccccgggtgttaagggcgatttgggtctcccaggcctgcctggggccccaggggtggtcggtttcccgggccagacaggcccacggggcgaaatgggccagcccggcccgtctggggagagaggactcgcaggaccgccaggtcgggagggaattccaggacctctggggccccccggtcctcccggtagtgtcggaccgcccggagccagcggactgaagggcgacaagggtgaccccggggtgggtctccccgggccgcgcggagagcggggcgaacccggcattaggggggaggacgggagaccagggcaggaaggtcctcgaggactgaccgggcctccaggcagccggggggagcgaggcgaaaaaggcgacgtgggttcagcggggctgaagggcgacaagggggattcagcagtgatactggggccacccggacccaggggcgccaagggcgacatgggcgagaggggtcctcgagggctagacggcgacaaagggcccaggggagacaacggcgatccaggcgacaaaggcagtaaaggggaacctggggacaagggatctgctggcctcccaggcttaagaggcctcctgggcccccaaggacaacccggtgcggcggggatccctggggaccctggctcccccggaaaggatggagtgccaggcattcgaggtgagaagggcgacgtggggttcatgggaccccgcggtctaaaaggtgagagaggagtaaagggggcctgcggactcgatggcgagaagggcgacaaaggcgaagccggaccgcccggacggccgggtcttgctggccacaaaggggaaatgggggaacctggcgtgcccggacagtccggagcccctggaaaggagggtctgattgggccaaaaggcgacagaggattcgatggacagcccggcccgaagggggatcaaggcgagaagggtgaacgcggaacgcccggtatcggcggatttcccgggcctagtggtaacgatggttctgccgggccccccggccctccaggttctgttggtccccgtggaccagaaggtttgcaaggccagaagggagaacgcggtccccccggagagcgagtggtaggcgctccaggagtccccggtgcacccggggagaggggtgaacaggggaggcccggtccagcaggacctaggggagagaaaggggaagctgccttgacagaggacgacatacgcggcttcgtcagacaagagatgagtcagcactgcgcctgtcaaggacaattcatcgcctcaggttctaggccactgccttcatacgccgccgatactgccggaagccaactgcacgcagtgcccgtcctgcgagtgagccatgcagaggaggaagagcgggtccctccggaggatgacgagtacagcgaatactccgaatactccgtggaagaataccaggatcccgaggccccttgggactctgatgacccctgctctctgccactggatgaggggagctgcacagcttacaccttacgttggtaccacagagccgtcactggctccactgaggcctgccaccccttcgtgtatgggggatgcggtggaaacgccaaccggttcggaacacgcgaggcatgcgagagacgctgccccccgagggtggtgcaaagccagggaacaggcacggcccaagat

SEQ ID NO: 1458 - DNA, 8832 bp, Artificial Sequence
  derived and/or modified sequence
atgaccctcaggctgctggtcgctgcactctgcgcgggtatccttgctgaggcgcctcgcgtgcgggcacagcatagggaaagagtcacctgcacccgcctctacgctgctgacatcgtatttcttctggatggaagttccagtatcggccggagtaactttcgggaagtcaggtccttcttagaggggctggtgttaccatttagtggagccgcttccgctcagggtgtccgctttgccactgtccagtacagtgatgaccctcgcacagagttcggacttgacgccctagggagcggaggagatgtgataagagctattcgagagttatcatataaggggggaaacaccaggactggggccgctatacttcacgtcgcagatcacgtgttccttcctcaactcgcacgccccggagttcccaaggtatgtatcttgatcacagacggaaagagccaggaccttgtggatacggctgcacagagactcaaaggtcaaggagtcaaactgtttgcggtgggaattaaaaacgctgatccagaagagctcaaacgggtcgcttctcagccaacgagcgatttttttttctttgtgaacgacttctctattctgaggaccctgctccctctggtgagccgtagggtgtgtactactgctggtggagtgcctgtcacacgtccacctgatgatagcaccagtgcacctagggaccttgtgctgagcgaacctagctcccaatccctgcgggtccagtggacagcagcttccggaccagtgaccgggtacaaggtgcagtacacacctctgacgggattaggacaaccactgccctctgagcggcaggaggtgaatgttcccgccggcgaaaccagcgtgcgccttcggggcctgaggccactcaccgaatatcaggtaaccgtcatcgcgctttacgcaaacagcatcggagaggccgtgtctggaacggctagaaccaccgcactcgaagggcctgaactgactatccagaatactaccgcccatagcctcctcgtggcatggcggagtgtccccggtgccaccggctaccgagttacctggagagtgctgtccggaggcccaacgcagcagcaggaactcggacctggacagggcagcgtgctgctgagagacctggagcccggaactgattacgaagtgacagtaagcaccctctttggaagatctgtcggccctgcaacgtctctgatggccagaaccgatgcttctgtggagcagacactgagacccgttattctcggccccacgtcgatcttgctgagctggaacctggtgccggaagcacgcggctaccgcctcgagtggcgccgtgagacagggctggagccacctcagaaggtggtgttgccgtctgatgtgactagataccaactggacggccttcaacctggtaccgagtacagactgacactgtacacactgcttgagggtcatgaagtggccacccctgctaccgtggtgcccactggacctgaattgcctgtcagcccggtcaccgatctacaagcaactgagctccccgggcagagggttagagtgtcatggagcccagtgccgggcgctacccagtatcgcatcattgttagaagcactcagggagtggaaagaacgctagtgctgccaggatcccagactgcttttgatttagatgacgttcaagcgggactgagctacactgtgcgtgtctcagctagggtgggacctagggagggcagcgcatctgtgttgaccgtgagacgggaacccgagacacccttagctgttccagggttgcgtgtggtcgtgagcgatgccacaagagtgcgtgtggcatggggacctgtcccaggagcttctgggtttcgcatttcatggagtacaggtagtggtccagaaagcagccaaactctgccccccgattccacagctacagatatcacaggcctgcagcccggaaccacctaccaggtggcagtcagcgtgttaaggggaagagaagaaggcccagcagccgtgatcgtcgcaaggaccgatccactggggccagtgcgaaccgttcacgtcacacaagctagtagctcctccgtcaccatcacctggacccgtgtgccgggagctacaggctacagagtgagctggcacagcgctcacggccccgaaaagtctcagctcgtgagtggtgaagcaaccgttgctgagctggacggcttggaacctgatactgaatataccgtccacgtgagagcccacgttgccggcgtcgacgggccgcctgcatcggtcgtggtgagaactgctcctgagcccgtcgggcgggtatctcgactgcagatcctcaatgcaagctcagacgtgctcaggattacttgggtgggggtcacaggggccaccgcttatcgactcgcttggggcagaagcgagggtggccccatgcgccaccaaatcctgccaggcaacacagacagcgctgagattcggggtctagaaggcggggtgagctatagtgtgcgcgtgaccgctctcgtgggcgatcgcgagggaacaccggtctccattgtcgttactactcctcctgaagctcccccagctcttggcaccttgcacgtggtccagcggggagagcacagcctgcgtctgcgctgggaacccgtccctagggcccagggattcctcctgcattggcaacccgaaggcggccaggagcagtctcgcgtgttgggtccggaactgagcagctatcatctggatggactcgagcccgctactcagtatagagtgcggctttcagtcctggggccggctggcgagggtccatccgctgaggtgacagctcgcaccgagagccctcgcgtcccatcaatagaactcagagtcgtggataccagcatcgattctgttacactggcctggacacctgtgtcacgtgcgagcagctatatcctcagctggaggccactgagaggacccggacaggaagtcccaggctccccacagacactgccaggcatctcatcttcacagcgcgtcactggtcttgagccaggcgttagttacattttttccctgacccccgtcttggacggtgtcagaggtccagaggcgagcgtgacccagacaccggtgtgcccaaggggtctcgcagatgttgtgttcttgccccatgccacccaggataatgcccatagggcagaggcaacacgaagggtgcttgagagacttgtgcttgctttaggcccattgggaccacaagctgtccaggtgggattgctgtcttacagccatcgcccttcccccctttttcctctgaacggatcccatgaccttggaatcatcctgcagcgtatcagagatatgccatatatggacccaagtggaaataacctcggaaccgccgtggtcacagcccaccgctatatgttggccccagatgcaccaggccggcgccaacatgtgccaggggtgatggttctgctggttgatgagccgctgcgcggagatattttttctcctatccgggaagcacaggctagcggcctgaacgtcgtcatgctgggaatggctggagcagatccggaacagctgcgaaggttggcaccggggatggacagcgtgcagacatttttcgctgtggacgatgggccaagcctggatcaggccgtatcaggccttgccacagcactttgtcaggccagtttcacgacacagcctaggccagagccttgccccgtgtattgccctaaaggtcagaagggcgagccgggcgagatgggactgagaggtcaggtgggccctcccggcgacccaggcctgccaggtagaacaggagctccaggtccgcaaggtccacccggatctgcaacagccaaaggtgaaaggggattccctggcgctgatggcagaccaggatcccctggaagagccggcaacccaggcacccccggcgcccctggactgaaggggtcccctggacttcctggacctcgcggagatcccggcgagaggggccctaggggcccaaaaggcgaaccaggggcccccgggcaagtgatcggcggagaaggacctggattgcctggacgcaagggtgaccccggccccagcgggcctccagggccccgcggtcccctcggtgacccagggccgagaggccccccaggactgcctggcacagcaatgaaaggtgacaaaggggaccgcggggagagagggccccccggacctggagagggaggcatagctcctggcgagcccggcctgcccggactgcctggctccccaggacctcagggcccagtgggcccccctggaaagaaaggggaaaaaggggactctgaagatggcgcacctggactgcccggacagcctggatcccccggggagcaaggcccaagggggccgcctggcgcgataggacccaagggagataggggattccccggcccactcggcgaagctggcgaaaaaggcgagagggggcctcccgggccagccggcagcagaggcctgcccggagtagcaggcaggccgggcgctaagggccctgagggccctcccggtccaactggcagacagggagagaagggagagcctggtcgcccgggagatccagccgtagtaggtcctgcagtggcaggcccaaaaggtgaaaagggagatgtcggacccgccgggcctcgcggggcaactggtgtgcaaggcgagaggggccctcccgggctggttctgcctggagacccaggacctaaaggagaccctggcgacagaggaccaatcggactgaccgggagggccggtcctccaggagactcagggccacctggagaaaagggagatcctggaagaccaggcccaccaggcccagtggggccgagaggaagagatggcgaagttggtgagaaaggcgacgaaggtccgccaggtgatcctggattgcccggaaaagccggcgagcggggactcagaggcgcaccaggggtgcgaggccccgtcggtgagaaaggtgaccaaggagatcccggagaggatggccgcaacggatctcccggaagttccgggccaaagggagatagaggggaacctggcccaccaggcccacccgggagattggtggacacggggcccggagcccgcgaaaaaggcgagcctggagatagagggcaggagggcccgcgcggaccaaaaggtgaccccggcttgccaggagccccaggagaacgcggaatcgaaggatttagaggcccaccaggccctcaaggagaccccggcgttaggggacctgctggcgagaagggcgacagggggcctccaggactggacgggaggtccggccttgacggcaagcctggtgcagccggaccgagcggacccaacggagccgcaggcaaggctggcgacccaggacgagacggtctccccggattgagaggggaacagggattgcccggaccttccggaccccctggattacccggcaagccaggagaggatggaaaaccaggcctcaacggaaaaaatggcgagccgggggaccctggggaggatggcagaaaaggagagaaaggagatagcggagcgtccggccgggagggcagggacggcccaaagggggagagaggcgctccagggattcttggcccccagggccctcctggcctccccgggccagtgggtcccccaggacaagggtttccaggagtccctggaggtaccggacctaaaggagaccgaggggaaaccgggagcaagggggagcagggtctgcccggggaacggggactgcgaggtgaaccaggcagcgtgccaaacgtcgatcggctgctggaaactgcgggcatcaaagccagcgcgcttagggagatcgtcgagacctgggacgagtcatccggttcattcctacccgtgcccgagaggaggagaggtcccaagggagatagcggtgagcagggaccgcctggtaaagaaggaccgataggttttcctggtgaacgcggccttaaaggagataggggcgacccgggcccccagggccctcctggcttggcactcggggaacggggcccacctggcccgtccggcctggcaggcgagcctgggaagccaggaatacccgggctccctggtagagccgggggggtgggagaggcaggaaggcctggagagaggggagagcggggagagaaaggtgagcgtggagaacaggggcgggatggaccccctggtctgcctggtacccccggcccccctggtcctccaggcccaaaggtgagcgttgatgagccaggacctggtctttcaggagagcagggcccaccaggactaaaaggagcaaagggcgagcctggcagtaacggagatcaaggccccaaaggcgaccggggggttccaggcatcaaaggcgatcggggcgaaccaggcccacgcggtcaggatggaaacccagggttgcccggcgaaaggggcatggcaggcccagaaggaaaaccgggattgcagggaccaagaggccccccgggacctgtgggcggtcatggcgaccctgggcctcccggcgctcccggactggccggaccagccggaccacagggccctagcggtttaaagggcgaacccggcgaaaccggacctcctggcaggggcctcaccgggccaaccggggctgtaggtcttccaggcccccccggaccaagcgggcttgttggaccacaggggtccccgggcctgccggggcaggtgggcgagacaggtaagcctggagccccaggacgcgacggtgcctcgggaaaggatggggacagaggatctccaggcgtgcctggaagccctggtctgcccggcccggtcgggccaaaaggcgagcctgggcccacaggcgctcccggacaggccgttgtggggctgccaggagccaaaggagaaaaaggcgctccggggggtcttgccggcgatctggtcggagagcctggtgccaagggcgacagaggtctgcctggaccccgtggggaaaaaggggaggctgggagagctggcgaaccaggcgaccccggggaagacgggcagaaaggcgctcctggcccaaagggattcaagggggacccaggcgtcggagtccctggcagccctggccccccagggcctcccggcgtcaaaggggatctgggattacctggactgccaggagctcctggagttgttggcttccctggacagaccggcccaagaggcgaaatgggacaacctgggccttctggagaacgcggacttgccggaccgcccggtagggagggtatccccggccccctgggcccacccggacctcccggatccgtgggccccccgggagcttccggcctgaagggtgataaaggagacccgggcgtcggactgcctggccctcgcggcgagcgcggagagcctggcattcgtggggaggacggaaggcccgggcaggagggtcctcgcggcctgactggaccccctggatcaagaggtgagcgtggagagaaaggagatgtgggctctgccggcctgaagggggataaaggggatagcgcggttatactgggccccccaggaccaagaggcgctaaaggggacatgggtgaaaggggccctcggggcctggatggagacaagggccccaggggcgataacggagatcccggcgacaaaggcagtaagggggaacctggggacaaagggagtgctggtctcccaggacttcgtggactgcttggccctcagggtcagccaggagcagcgggcattcccggcgatcccggctcacctgggaaggatggggtccctggtattaggggtgagaaaggcgacgtcggtttcatgggcccacggggattaaaaggcgagcgcggggtcaagggcgcgtgcggtctggatggcgagaaaggcgacaaaggagaagccggtccacctggccggcccggtctggcggggcacaagggagaaatgggagagcctggtgtgccgggccaaagtggtgctcctggtaaggaagggttgattggtccaaaaggagataggggcttcgatggacagcccggacctaaaggagatcagggagaaaagggcgagcgaggaacacccggcatcggaggcttccccggccctagcggaaacgatgggtccgcaggcccacctggaccacccgggagcgtgggcccccgcggccctgagggccttcagggccagaagggggagaggggccctcccggagagcgtgtcgtcggagcgccgggcgtccccggcgcacctggggaaagaggtgaacaagggcgacccggccccgcaggcccacggggcgagaagggggaggctgcgttaactgaggatgatatccgcggctttgtgcgccaggagatgtcccaacactgtgcctgccagggccagttcatcgcctctggctcccggcccctgccgagctacgccgcagataccgcaggaagtcagctgcacgcagtccctgttctcagggtgagccacgctgaagaggaggaaagagtgccacccgaggacgacgaatacagcgaatatagcgaatactcggtcgaggagtaccaggacccggaggccccatgggactcagatgacccttgctctctgccactggacgagggctcttgcacagcttacaccctgaggtggtaccacagagccgttactgggtctactgaagcctgccatcctttcgtttacggcgggtgcggcggaaatgccaacagattcggaacacgggaagcatgcgaacggagatgcccaccaagggttgtgcagtcacaagggaccggaactgcacaggat

SEQ ID NO: 1459 - DNA, 8832 bp, Artificial Sequence
  derived and/or modified sequence
atgaccttgcggcttctggtcgccgctctttgcgctgggatactcgcagaggcgccccgtgtcagagcccagcatagagaacgggtcacttgcacacggctctatgctgccgacattgtgttcctgctggacgggtcatcaagcatcggcagaagtaacttccgagaagttcgcagctttctcgaggggctggttttgccatttagtggggcagcttccgctcaaggtgtcaggttcgcaactgtccagtattccgatgatccccgaaccgagtttggcctggatgccctggggtcaggtggtgacgtcatccgagccatccgagagctgagctacaaaggtgggaacacacgtaccggagccgccattctgcatgtagccgaccatgtttttcttccccagctggcaagacccggcgtacctaaagtgtgtattctgatcactgatggcaagtcccaggatctggtggacactgccgcgcaacggctaaagggccaaggagtgaagctgtttgcggtggggatcaagaacgccgatccagaagaactcaagagggtggcgtcccagccaaccagtgatttcttcttctttgtgaatgactttagcattctgcgaacgttgctacccctggtgtcaagaagggtgtgtactactgccggtggtgtacctgtgacacggccacctgatgactctaccagtgctcctcgcgacttagtgctaagtgagccctcttcccagtccctcagggtccagtggacagctgcgtccggaccagtgacgggatacaaggtacagtacaccccgctgaccgggctaggccaacctctgccttcagagaggcaggaggtgaatgtccctgctggcgagacctcggtgaggctgcgtggacttcgccccctcacagagtatcaggttactgttatcgccttgtacgcaaattcaataggcgaagctgtgagcggcacagctcgcactacggcactggaggggccagagctgactatacagaatacaacagctcacagcctgctggtcgcgtggcggagcgtgccaggcgctacaggataccgcgttacatggagggtgctatctggtggtcccactcagcagcaggagctggggcccgggcagggctccgtgctcctccgtgacctggaacccggcaccgactacgaggtgacggtcagtacgctgtttggccggtccgtgggccctgccacatctctcatggctagaaccgatgcaagcgtggagcaaaccctgcgccctgtgatcctgggtcctacttccatactgttatcatggaacctagtcccagaggccagaggttataggctggagtggcgtagagagaccggcttggagcccccccagaaggtggtactcccctccgacgtgacacgctatcagctggatggcctgcagcccgggaccgaatacaggctgaccctctacacactgttggaaggacatgaggttgctacccctgccaccgttgtgcccacgggccccgagctgcccgtctcgcctgtgacagatctgcaagccactgaactgcccggccagcgggtccgtgtttcttggagcccagtacccggcgcaacacaatacagaatcatcgtgcgatctacgcagggcgtggaaagaacactcgtcctgcctggatctcagacagctttcgacctggacgatgtccaggcaggactcagctatacagtgagagtcagcgctagggtggggccccgcgagggaagcgcttctgtattgaccgtccgtagagagcccgagaccccactggcagtacctggcctccgggtggtggtctcagacgcaacgcgtgtgcgggtggcctgggggcctgtcccgggggctagcggctttaggatttcttggtcaacgggatccgggcctgaaagctctcaaaccctccctcctgactcgaccgcaacagacatcactgggctgcaaccaggtacaacttatcaggttgccgtgagtgtgctccgggggcgcgaggagggtcctgctgcggtcattgtggctagaaccgaccctctgggacctgtgcggacagtgcacgtgacgcaggctagtagctccagcgtgaccatcacctggacacgagtgccgggcgctactggctatcgcgtgtcctggcacagcgcccatggtccagagaagagtcagcttgtttctggcgaggcgacggttgcagaactggacgggttggagcctgataccgagtatacagttcatgtaagggcgcacgttgcaggcgttgatggcccaccggctagtgtcgtggtgcgcacagcacccgagcctgtcggcagagtgtccaggctacagatcctgaacgcctccagcgacgtcctacggatcacgtgggtgggagtgaccggagccacggcctaccgcttggcgtggggtcggtccgagggaggcccgatgcgccatcagatcctgcctgggaatacggactctgctgaaattaggggattggagggcggagtgtcctactctgtgcgggtgacagcgctcgtgggcgacagagaaggcaccccagtgagcatcgtcgttaccactccccccgaagcgccaccagctctgggcacactccacgttgtccaacgaggcgagcacagcctccgactgcgatgggaaccagttccacgggctcagggttttctgctgcactggcaacccgagggcggacaagagcagtccagggtattaggcccagagctgagctcttatcacctagacgggctagagcccgccacccagtatagggtccgattaagtgttctcgggcccgctggagagggcccaagtgccgaagtaacagctaggactgaaagcccgcgcgtgccctctatcgagctcagagtggtggacactagtatagactccgtcaccctggcctggacacccgtgagccgtgcaagctcatatatcttgagttggcgaccactgcgtggcccgggccaggaggtgcccggcagccctcagacactgcctggcatatccagttctcagcgggtgacgggcctggagcctggggtgagttatatctttagcttgactcccgtactcgatggggtcagagggcctgaagcctccgttacccagaccccagtgtgcccacgagggctcgcagatgttgttttcctgccccacgctacacaggacaatgcgcaccgtgctgaggcgacgcggcgggtcctggagagactcgtcctcgccctaggcccgctgggcccccaggccgtacaagtggggctgctgtcttactcccatcgcccatccccgttattcccactcaatggctcacacgatctgggcatcatcttgcagagaatccgagacatgccatatatggatccctcaggcaacaacctggggacagccgtggtgactgcccatcgctacatgctggcgcccgacgcgccaggcaggcgccagcacgtcccaggcgtgatggtcttattagtggacgagcccctgcggggtgatatcttctcacctattcgggaggcacaggcaagcggactcaatgtggtaatgctgggtatggccggggccgatccagaacaactgagaagactagcacccgggatggactccgtccaaacattcttcgcggtggacgacgggccttccttggatcaagccgtcagtggacttgcaaccgcactgtgtcaagcaagtttcacaacccagcctcgcccggaaccttgccccgtctattgccccaaaggtcagaaaggcgaacctggcgagatgggcttgcgggggcaagtgggccctccaggcgaccccgggcttccaggccggacaggagcacctgggccccagggtccccccgggtctgctaccgcgaagggggagaggggctttccgggagctgacggcaggcccggcagtccgggccgggcaggcaaccctggcacccccggcgcgccaggattgaaaggatcgcctggcttgcctggaccgcgcggggaccctggcgagcgggggcccagggggcctaagggcgaaccaggagctccaggccaggtgatcggcggagagggcccgggccttcccggtcgcaagggagacccggggccaagcggccccccgggtcctcgggggccactgggcgaccctggccctcgcggtccaccggggctccctggtacagccatgaaaggagataagggcgataggggcgaacgcggaccaccgggtcctggcgagggcgggatagccccgggtgaaccaggactgcccggccttccaggctcaccaggcccccagggccccgtggggcctccgggcaagaagggagaaaagggagactctgaagacggagcgcctgggcttcctggccagcccgggtctcctggagagcagggaccaagaggcccccctggagctatcggaccaaaaggggaccgcggctttccaggtcccttgggtgaggctggcgaaaaaggcgaacgggggccgccaggaccagctgggtctcggggcctgcccggtgtagccggtcggcccggggccaaaggccctgagggaccgcccggccctaccggtaggcagggcgagaagggtgaacccggccgccctggggatccggctgtggtaggtccagccgtcgcgggacccaaaggggaaaaaggagatgtgggaccagccggacccagaggcgcaacgggagtacagggcgagagaggccccccgggtctggtgctgcccggagaccctgggccgaaaggagatcccggtgatcgcgggcccattggcctaactggaagggccgggcccccgggcgattccggacctcccggcgaaaagggggacccgggcagacccggaccaccaggacctgtgggacccaggggcagggatggcgaggttggggaaaagggtgacgagggcccacctggcgatccaggccttccaggaaaggccggtgagcggggcctcagaggagcccccggtgtgaggggccccgtgggcgaaaaaggcgaccagggcgaccccggcgaagacggccgtaatggaagcccaggatcatctggccccaagggggacagaggagagcctggtccacccggccctcctggacggctcgtcgacaccggccccggcgcccgcgagaaaggcgagccaggggatcgcgggcaggaggggcccagagggccaaagggggaccctgggttgccaggcgcacccggtgagagaggaatagaagggtttcgtggaccgccaggacctcagggggatcctggagtacggggcccagccggagagaagggcgaccgggggccaccaggactagatggcagatctgggttagatggaaaacccggggctgccggcccctccggtcccaatggcgcggccggaaaagctggagatccgggcagagatggtctgcctggattgagaggggaacagggcttgcctggtccgtccggtcctcccgggttacccggcaaacccggtgaagatggcaaaccagggctcaacggtaagaatggggaacctggagaccctggcgaagatgggagaaagggggagaagggagacagcggtgcatcaggcagggaaggacgggacggccccaagggtgagcgaggcgcacctggcatcttaggcccccaagggccacccgggctccccgggcccgtgggcccgcccggtcagggcttccccggtgtgcccggggggaccggccctaagggtgaccgtggtgaaacgggctccaagggtgaacaaggattaccgggagagagaggattgaggggggaaccaggatccgtccctaatgtggacagactgttagaaacagcaggcataaaggcatcagctctgcgggaaattgtggagacctgggatgagagttcaggatcatttttgcctgtgcctgagagacgtcgcggaccgaaaggagattcaggggagcaggggccccctggaaaggagggcccgataggtttccctggcgaaaggggcctcaaaggggacagaggcgatcctgggcctcaaggacctccaggattagcgcttggtgagagggggccccctggaccctctggcttggccggagagccgggtaaaccaggcatcccagggcttcccggacgggccggtggggtgggcgaggcgggcagaccgggggagaggggtgaaagaggggagaaaggcgaaaggggtgaacagggccgggatggcccgccagggctccctggcactccaggaccccctgggccgcccggcccgaaggtctccgtagatgaaccaggccctggcctaagtggagaacaaggaccaccgggactaaagggagccaaaggggagcccggttccaatggggatcagggcccgaagggtgatcgcggtgtgccaggcattaaaggggaccgaggcgagcccgggccccgtgggcaagatggaaaccctggcttgccaggcgaaagaggaatggccgggcctgaggggaaacctggcttgcagggtcccagaggcccgccgggccccgtgggtggccatggcgacccaggccctccaggggcacctggcttggctggccccgctggtccgcaggggccatcaggtttgaaaggggagcccggcgaaaccggtcccccgggtcgggggctcacaggcccaaccggggctgtgggcctgccaggccccccaggccccagcgggttagtggggccgcagggcagccccggtcttcctggacaagtgggggagacaggcaagccgggagcacctgggagagatggcgccagtggaaaagacggggacagaggcagccctggcgtgccaggttctcccggactgcctggccccgtcggtcctaagggtgagcccggccccaccggtgctccagggcaagccgtcgtaggcttgccaggtgccaaaggcgagaagggagcaccaggtggactcgcaggagatctggtgggagagccgggggccaagggggatagggggctacccggaccgaggggggaaaaaggcgaggctgggagggccggagaaccaggggaccctggagaagatggccagaaaggtgcccctggaccgaaagggtttaagggagatcctggcgtaggagtgccggggtcaccggggccccccggcccccccggggtaaagggcgacctcggtcttccgggtctccccggcgcgccaggtgtagtcggttttcctggccaaaccgggccgcgcggcgaaatgggccagcctggtcccagcggcgagagaggactcgccggcccccctggccgggagggtatacctggacctctgggtcctccaggtccccccggctcagttgggccaccgggcgcctctggactcaaaggcgataagggtgatcccggcgtggggctacctggtcctaggggggagagaggcgagccaggcatccgtggcgaggatggccggcctggtcaggaaggaccaagaggactgacagggccccctgggtccaggggagagcgaggcgaaaaaggagacgtaggtagcgctggtctcaaaggagataaaggggattctgcagtgatcctcggtcctcccggccctaggggggccaaaggtgatatgggggagcgcggtcctaggggtttggacggcgataagggtcctagaggcgacaacggcgatccgggcgataaaggaagcaaaggtgagcccggagacaaggggtcagccggactccccgggctgagggggctcctggggccccagggccagcctggcgccgcaggtatacccggagatccaggaagcccaggaaaggatggggtaccgggtatccgaggagaaaaaggtgacgtgggttttatggggcccagaggactgaaaggcgagcggggggttaagggcgcctgtggcctagacggcgagaaaggagacaagggggaggcaggccctcctgggaggcccggtctggccggtcataaaggcgagatgggggagccaggtgttccaggccaaagcggcgctcctggtaaggaaggactgatcggacccaagggggataggggatttgacgggcagcccgggccgaaaggggatcaaggtgaaaaaggcgaacgcggcacccctggcattggtgggtttcctggtccatccggcaatgacggctcggccggtcccccaggccccccaggttccgtgggccctagaggcccagaagggttgcagggacaaaagggagagagaggccctcccggagaacgagttgttggagcgcctggtgtgcccggcgcaccgggcgagcgcggcgagcagggaaggccaggacctgccggcccccgcggagaaaaaggtgaagccgccctgaccgaagatgacatacggggatttgtacggcaggagatgagtcagcattgtgcatgtcagggtcaatttatagcctctggatctcggccgttaccgtcgtacgccgccgatacagccgggtcccaattacacgcagtgccggtgttgcgagtttctcatgccgaggaagaggagcgggtaccaccagaagatgatgagtactccgagtatagcgaatattccgtcgaagagtatcaggatccggaggcaccttgggacagcgacgacccctgctcattgccactggacgaaggaagctgcaccgcgtacacactgcggtggtaccaccgggccgtgactggctccactgaggcctgccacccctttgtctatggtgggtgcggcggcaacgccaaccgctttggtactcgtgaagcatgtgaaaggagatgcccaccccgcgtggttcaaagccagggcaccggaacagcgcaagac

SEQ ID NO: 1460 - DNA, 8832 bp, Artificial Sequence
  derived and/or modified sequence
atgactctccgtttgctcgtggctgccctctgcgctggcattttggccgaagctcccagggtaagggctcagcacagagagcgtgtgacctgcaccagattgtatgccgcagacatagtgttcctcctggacggctcttcaagcatcggccgttccaattttagagaagtcagatcattcctcgagggtctggttttgcctttcagcggcgctgcctccgcccagggcgttcgctttgctactgtccaatacagcgacgatcctcgcaccgaatttggcctggatgctctcggaagtggcggcgacgtgatccgtgctattcgcgaattgtcttataagggaggtaacacacgtacaggagctgcaatactgcacgttgccgaccacgtcttcctgcctcagctcgcaaggcctggagtgcctaaggtgtgcatcttgatcactgatggtaaatctcaagacctggtcgacacagcagctcagcgtctcaaaggccagggcgtaaaactgttcgctgtgggaattaaaaatgcagacccagaagagctgaagagggtggctagtcagcctacttccgactttttttttttcgtgaatgatttcagtatcctccgtactctgctcccacttgttagcaggagggtgtgtaccacagcaggcggtgtacctgtcactcgccccccagacgacagtacatctgcccctagggatctcgtactgtcagaaccttccagtcagtctctccgcgtgcagtggaccgcagccagtggacccgttaccggatataaggtacagtacactcctctgaccggtttgggtcaacccctcccctcagagaggcaggaggtcaatgtgccagcaggcgagacctctgtgcgcttgcgcggtctgagacctttgaccgaataccaggtgaccgtcatcgcattgtacgccaattccataggcgaagccgtgtcaggcactgcccgtaccactgctctggaaggcccagaactgactatccagaacacaacagcccactcactcctcgttgcatggcgctctgtgccaggtgctactggttatagggttacttggcgtgtgctctccggcggcccaacacagcaacaagagctgggccccggtcaaggttccgtcctgttgagggacttggaaccaggcaccgattacgaggtcaccgtgtcaacccttttcggaagaagcgtcggacctgccacctctttgatggctaggaccgatgcctctgtggagcagacactgaggccagtgatacttggccccactagcattctgctgagttggaaccttgtaccagaggcccgtggatatcgcctggagtggcgcagggaaacaggtctggagcccccccagaaagtggttttgcctagtgacgtgactcgctatcagttggatggcctgcaaccaggcaccgaatacaggctgaccctgtacactttgcttgaaggccatgaagtcgctacccccgctaccgttgtgcccaccggcccagagctgcctgtgagtccagttaccgacctgcaggcaactgagctccccggccagagagtgagagtgagctggtctcctgtgcctggcgcaacccagtatagaattatcgtaaggtctacacagggagtagaaagaacactcgtgctccccggaagccaaaccgctttcgatctcgacgacgtgcaagcaggtctctcctataccgtgagggtgtcagctcgcgtgggacctagagagggcagcgcttctgtcctcactgtgcgtagagagcccgagactccccttgctgtgcctggcctgcgtgtggtcgtgtccgacgctaccagagtaagggtcgcatggggccccgtgccaggtgctagtggttttagaatcagttggagcacaggctccggaccagaaagttcccagaccctgccaccagactctaccgcaacagatattactggactccaacccggaacaacctatcaagtggccgtgtcagtgttgcgcggccgcgaggaaggtccagcagcagttatagtcgctcgcaccgaccctctgggacctgtaaggacagtacatgtgacccaagctagtagtagcagcgttaccatcacctggactagagtgccaggagccacaggataccgcgtgtcctggcattccgctcatggccctgagaagtcacagctggtcagcggcgaggctactgtagctgagctcgatggcctggaacccgacacagaatacacagtgcacgtgagagctcacgtagctggagtggacggacctcctgcctctgtggtggtgcgcacagctcccgagccagtaggaagggtctcacgcctccagatccttaacgcctcctccgatgtcctcaggatcacttgggtcggcgttaccggagccaccgcctatcgcctcgcctggggtagatcagaaggaggtcccatgaggcatcagattttgccaggaaacactgattcagctgagatcagaggcctggaaggaggtgtttcctattctgttagagtcactgctctggtgggagaccgcgaaggcactcctgtgtctattgttgtaactacacctccagaagccccaccagcacttggtaccctgcacgtagttcagcgtggtgagcattcactcaggctgcgctgggagcccgtcccccgcgcacagggattcctgttgcactggcagcccgagggcggtcaggagcagtccagggtgttgggtccagagctgtcatcctaccatctggatggtcttgaacccgctacccaatacagagtgcgtctcagcgtgcttggacctgccggtgaaggaccctcagcagaagtgaccgcccgtacagaatctcctcgtgtgccctccatcgagcttcgcgtagttgacacctccatcgactccgtcacattggcttggacccccgtttctcgtgcaagcagttacatcctgtcttggcgtcccttgaggggtccaggtcaggaggttccaggaagccctcaaactctccctggtatctccagcagccagagagttactggcctggagcctggtgtgtcatacatattcagcctgactcctgtactcgacggagtgcgcggccctgaggcttccgtcactcaaactcctgtgtgtccccgcggacttgctgacgtcgtgtttcttcctcacgctacacaagataatgcccaccgtgctgaagctacacgtcgcgtgctcgagcgtctcgtcctcgcacttggccccttgggtcctcaggctgttcaggttggcctgctttcctactctcacaggcccagccccctgttccctctgaatggctctcacgacttgggtatcatcctgcaacgtatcagggacatgccttacatggacccttcaggaaataatttgggtactgccgtggtgacagcacaccgttacatgcttgcccctgacgcccccggacgccgtcagcacgtgccaggcgtgatggtgctgctggtagatgagcctttgaggggagacattttcagtccaatccgcgaagcccaggcttccggcttgaacgtcgtgatgcttggaatggctggtgccgaccctgaacagttgcgtcgtctggcacctggtatggatagtgttcaaactttcttcgccgttgatgatggccccagtctggaccaggctgtctcaggcctggccaccgctctgtgtcaggcatctttcaccacacaacctcgcccagaaccatgccccgtctactgccccaagggccagaaaggagagcctggtgagatgggtctgaggggacaggtgggaccacccggtgatccaggcctccccggcagaactggagctccaggcccacagggccccccaggctccgccaccgctaagggcgaaagaggctttccaggcgctgatggacgtcctggttctcccggaagggctggaaaccccggtactcctggtgctccaggattgaagggatcccccggcttgcctggacctagaggcgaccccggcgagaggggaccccgcggtccaaaaggtgagccaggagcacctggacaggtgatcggcggagagggccctggcctgccaggtaggaaaggtgatcccggcccctccggacctccaggacctcgcggaccccttggcgatcccggtccacgcggtccacctggcctgcccggaaccgctatgaagggcgacaagggcgaccgtggagagaggggtcctccaggaccaggtgagggcggaattgctccaggcgagcccggtctgccaggtctgcccggaagcccaggccctcagggacctgtcggacctccaggcaagaagggtgagaagggagattctgaagacggtgctccaggtctcccaggccagcccggatctccaggcgagcagggtcctaggggcccccccggtgcaatcggcccaaagggagataggggcttccccggtcctctgggcgaggccggtgaaaaaggcgagaggggaccacccggtcccgctggcagtaggggtctgcccggtgttgccggacgccctggcgctaaaggacctgaaggtcccccaggccccacaggcaggcaaggcgagaagggagaacccggccgtccaggcgaccccgctgtagttggccctgcagtcgcaggaccaaagggtgagaaaggagacgtaggaccagctggaccccgcggagccaccggtgttcagggcgaaaggggacctcctggattggtgctgcctggcgatcctggccctaaaggagatcctggtgataggggtcccatcggcctgactggacgcgcaggtcctcctggcgactccggtcccccaggcgagaaaggagaccccggtcgtcctggacctcccggacccgtcggccccaggggcagggatggagaggtcggcgaaaagggcgacgaaggtccccctggtgaccctggcctgcccggcaaagcaggtgagcgtggtcttagaggcgccccaggcgtgaggggaccagtgggcgaaaagggtgaccagggcgatcccggagaggacggaaggaatggatctcctggcagcagcggcccaaagggagacaggggcgaaccaggtcccccaggcccccctggtcgtctggttgacaccggccctggtgcacgcgagaagggcgaaccaggcgatagaggccaagaaggacctcgtggtcccaagggcgatcctggccttcctggcgctcccggcgaacgtggaatcgagggcttcaggggcccaccaggacctcaaggtgaccctggtgttcgtggacccgccggtgagaaaggtgatcgcggaccacccggtctcgatggaagatctggacttgatggcaagcctggcgctgcaggaccttcaggaccaaatggtgctgcaggcaaagctggtgatcccggcagggacggactgccaggcttgaggggcgagcagggcctgcccggcccctctggtccccctggtctcccaggcaagcccggtgaagacggcaagccaggactgaatggaaagaacggtgagccaggcgacccaggcgaggacggccgtaagggcgagaaaggcgattccggtgcttctggccgcgaaggtcgtgacggtcccaagggtgagagaggagcccccggaatcctcggaccacagggtcccccaggtctccccggccctgtcggcccacctggccagggcttccccggtgtgcccggaggcactggcccaaaaggcgatcgtggagaaactggctctaagggagagcaaggattgcccggagagaggggcctcaggggagagccaggtagcgtccctaacgtggaccgcttgctggaaaccgccggaattaaggcaagcgctctgagggagatcgtggagacttgggacgaaagcagtggcagttttcttcccgtccctgaacgcagacgtggtcccaagggtgactccggagaacaaggaccacccggcaaggagggccccattggctttcctggtgagaggggcctgaagggtgaccgtggagaccccggaccacagggtccccccggtctggccctgggagagcgcggtcccccaggcccatctggtctggcaggcgagcccggaaagccaggcatccccggtctgcctggccgcgcaggaggagtcggcgaggcaggcaggcccggcgagcgcggagagagaggcgagaaaggagagcgtggtgaacagggccgtgatggtcctcctggcttgccaggtacaccaggacctccaggcccccccggtcccaaggtatccgtggatgaacctggccctggcttgtcaggagagcaaggccctcctggtcttaaaggagctaaaggagaaccaggctccaacggcgatcagggtccaaagggtgatagaggcgtgccaggaatcaagggagacaggggtgagcccggtcccagaggtcaggacggcaatccaggtctgcccggtgagagaggaatggccggacccgaaggaaagcctggtctccagggtccacgtggtccacctggccccgtgggaggccacggagatcccggcccacctggtgccccaggccttgccggccccgctggaccccaaggaccctccggtctgaagggagagccaggtgagaccggcccacctggccgcggcttgaccggccctactggtgccgtgggcctgccaggacccccaggtccatccggcttggtgggacctcagggcagtcctggtctgcctggccaggttggtgagactggaaaacccggtgctccaggcagggatggcgcctcaggaaaagacggcgacagaggttctcccggagtgccaggttctccaggactgcccggaccagtaggtcccaaaggcgagccaggaccaactggcgctccaggacaggccgtggtgggtctcccaggcgccaagggcgaaaagggagcccccggtggcctcgctggagacttggttggcgaacccggagccaagggagatcgtggcttgcctggccctcgtggcgagaagggtgaggcaggtagggccggtgaacctggcgaccctggcgaagatggccagaagggagctccaggccctaagggtttcaagggcgacccaggagtcggcgtccctggcagccctggaccaccaggacctcccggagtcaagggcgacctcggcctgcctggacttcccggagctcccggagtcgtcggctttcccggccaaaccggcccccgtggcgagatgggtcagccaggaccaagtggcgagcgcggactcgctggacccccaggtcgcgaaggtattcctggtcccttgggtccccctggacctccaggttctgtgggaccccccggcgcatccggtttgaaaggtgataagggcgaccccggtgtgggcctgccaggtccaaggggagagcgtggagaacctggaatccgcggtgaggacggtcgccccggacaagaaggccctaggggcctgacaggtccaccaggatcccgtggtgaacgtggtgagaagggcgacgttggcagcgctggcctcaaaggcgataagggcgactcagcagtgatcctcggccctccaggccctaggggtgccaaaggtgacatgggcgagagaggtcctcgtggcctggatggcgataagggcccacgtggagacaatggtgaccccggagacaaaggatcaaagggagaaccaggagataagggctcagccggtctgcccggactgcgcggtttgcttggcccacaaggccagccaggcgctgcaggcatccctggtgaccccggatctcccggcaaggatggagtccccggcattaggggagagaaaggcgacgtaggtttcatgggccccagaggtttgaagggcgaaaggggcgtcaagggcgcttgtggtctggacggcgaaaaaggcgataagggcgaggcaggtcctcctggtcgccctggattggctggacataaaggcgaaatgggtgaacccggtgtgccaggccagagcggagctccaggaaaggaaggattgattggacctaaaggcgacagaggtttcgacggacaacccggtcccaagggagaccaaggtgagaagggtgagaggggcacccccggtataggcggttttccaggaccatccggtaacgacggatcagcaggccccccaggtccacccggttccgtgggacctcgtggtccagaaggcttgcaaggtcagaaaggcgaacgcggaccaccaggtgaacgtgtcgttggtgctcctggagtgcctggagctcccggagagcgtggcgagcagggacgtccaggtccagccggtcccaggggagagaagggagaggcagccttgacagaagacgatatcaggggtttcgtgcgccaagaaatgtcacagcattgcgcatgccagggtcaattcatcgctagtggttcccgccctctccccagttacgcagctgacacagctggatcccagctgcacgccgtgcctgtcctgagagttagccatgcagaagaagaagagagggttccacccgaggatgatgagtactctgaatactcagaatactctgttgaagagtaccaggaccctgaagctccctgggacagcgacgacccatgctcactgccacttgatgaaggtagttgtactgcatacaccctgcgctggtatcacagggctgtgacaggctccactgaagcctgtcatccattcgtgtacggcggatgtggaggaaacgctaacaggttcggcacacgcgaggcttgtgaaagaagatgtcctccaagagttgttcagtcccagggaaccggcaccgcacaggat

SEQ ID NO: 1461 - DNA, 8832 bp, Artificial Sequence
  derived and/or modified sequence
atgacccttagattgttggtggcggcattatgtgccggcatcctcgccgaagcaccccgtgtgcgtgcccagcatagagagagagtcacatgcacacgtctatacgccgcggacattgtgtttctcttggatgggtcctccagcattgggcgcagcaatttccgggaagttaggagctttctggaggggcttgtcttgccattctccggggctgcctctgcgcagggcgttcgatttgccactgtgcaatatagcgacgacccccgcaccgagttcggtctagatgccctgggctctggtggcgatgtgatcagagcgataagagaattgagctataagggcggcaacacacgtaccggcgctgccattcttcacgtggccgaccatgtttttctgccacagctggcgaggcctggcgtgccgaaagtttgtatattgatcacagatgggaaaagccaggatctggtcgatacggccgcccagagactcaaaggacaaggcgtgaaactgttcgctgtgggaattaagaacgcggacccagaggagcttaagagggtcgcgtcccagccgacctctgacttcttcttcttcgtcaacgattttagtatcctcagaacactcctgcctctggtctcccgtcgtgtgtgtacaacagcaggaggcgtacctgtgactcggcctcccgatgatagtacttccgcgcccagagacctggtgctgtccgaaccaagctcacaatcattacgtgtgcagtggaccgcagcctcaggccctgtgaccggctataaagtccagtacactccccttaccggtctcggtcagccgctgccatccgagcggcaggaagttaatgtgccagccggcgagacatccgttcggctacgtggacttcgccccctcactgaataccaggttacagtgatcgcactgtacgctaactccatcggggaagccgtttccggaactgcgcgaacaactgccctggagggcccagagttgaccattcagaacaccacagcccattcgttattagtcgcatggagatccgtccccggggctaccggctatcgagtgacttggagagtactctccggaggcccaacgcagcagcaggaactcggacctggtcagggcagtgtgctactcagggaccttgagcccggtacagattatgaagtgacagttagcactctgtttggacggagtgtcgggccagccacaagcctgatggcccgtactgacgccagcgtcgagcaaaccttgcggccggttatcctgggtcccacttccatcctgctgtcctggaatcttgtgcccgaagcgcggggatatagactagagtggagacgggaaaccggtttagaaccgccgcaaaaagtggtattgccatccgacgtcacacggtaccaattggacggtctgcagcctggaactgaataccggcttaccctatacaccctacttgaaggccacgaagtcgccacacccgctacggtcgtgccgacaggacctgaactgcctgtctcacccgttacagacctgcaggccaccgagctgccggggcagcgggtgcgagtgagctggtcccctgtgccaggagccacccagtaccggatcatcgtgagatccacccaaggcgtggagcgcactctcgtcctccctggtagtcaaacagcctttgacctagatgacgtgcaggcaggcctttcttacacggttcgcgtctccgcccgagtgggaccccgagagggctctgcctctgtgctcaccgttcgcagagagcctgaaaccccgctggcggtaccaggtctccgggtcgttgtgagcgatgcaacaagggttagggtggcctggggtcccgtccccggagcttccggcttccgcatatcctggtctacgggatcaggcccagaatcaagccagaccctaccgccggattccactgccaccgacatcacaggcctgcagcccgggaccacctaccaagtggccgtgagtgtattgagggggagggaagagggccctgctgcagttatcgtggcccgcacagatcccctcgggcccgtgcgcaccgttcatgtgacccaggcttccagctcgtccgtaactattacatggacccgagtgcctggagcgactgggtacagagttagctggcactccgcacacggccccgaaaagtctcaattggtctctggtgaggccacagtcgcagaactcgacggactcgagcccgacactgagtataccgtccacgtgagagcacacgtggccggggtcgacggacctcctgcaagtgtggtggtgaggacggctcccgaacccgtgggacgggtgagccgactgcagattctcaatgcaagctccgatgttctaagaatcacatgggttggggtcaccggtgctactgcctaccgtttggcctggggccgttcggaagggggacctatgcgacaccaaatcttaccgggaaacacagactcagccgagattcgggggctagaagggggggtcagttactctgtgagggttactgcattagtcggcgatagggagggcaccccggtgtctattgtggtgacgaccccacccgaggccccgcccgctctgggaacgttgcacgtggttcagcggggggaacattccttaaggttgcggtgggagcccgtgccacgtgcgcaaggatttctcctccattggcagcctgagggaggccaggaacaatcacgcgtgctgggccctgagctgagttcttaccatcttgacggactcgagcccgcaacccagtaccgcgtcaggttgtctgtactgggcccagccggagagggccccagcgccgaagtcaccgcccgaacggaatctcccagggtgccttcgattgaactgagagtggtggacaccagtatagactccgtgaccttagcctggacacccgtgtctagagcgagctcatatattctatcttggcggcccttacgtggccctggccaggaggttcctggaagcccccagacgctgccgggcattagtagctcccagcgggtgactgggttggaacccggagtttcttacatcttttctcttacacccgtgctggacggcgtgagagggccggaggccagtgtgacccagacacccgtgtgcccaaggggacttgctgatgtggtatttctgccccatgctactcaagacaatgcgcatagggcagaagcgacccgaagggtgttggaacgactggtcctggccttagggccgctgggcccacaagctgtgcaggtggggctgctgagctactctcatagaccttcaccattgttccccttaaacggatcccatgaccttgggataatcttgcagcgtatccgggatatgccttatatggacccttctggcaacaacctgggcactgctgttgttactgctcaccgctatatgctggcacctgatgcacccggacgcaggcagcacgtgcctggcgtcatggtcttacttgtggatgaaccactgcggggggatattttctctcctatccgtgaagcacaggcatctggcctgaatgtagttatgttaggcatggccggagctgatccagaacaattacggcggctggccccgggcatggactcggtacagaccttttttgccgttgacgacggacccagcttggaccaggccgttagtgggctcgccacagcgctgtgccaagccagcttcacgacccagccccgccccgaaccctgccccgtttattgtccaaaagggcagaagggggaacctggcgaaatgggtttgcgcggacaggtgggacctcctggcgatccaggactgcccggtcgtacaggggcccctggaccacaggggccacctggatctgcgaccgccaaaggggagcggggctttcccggtgccgatgggaggccaggctcgccaggtcgggctggaaacccaggcactcccggggcccctggactgaaaggaagccccggtctgcccggtccgcgcggggatcccggtgaaagaggaccaaggggccctaaaggtgagccgggggctccaggtcaggtgatcggaggtgagggccccggtctgcccgggagaaaaggagacccgggcccaagtggccctcccgggccacggggcccacttggtgacccaggaccacggggcccaccgggcttgcccgggaccgccatgaagggtgataaaggagataggggggagcgggggcctccaggccctggtgagggcggaatcgctccaggggagcctggtttgcccgggcttcctggatctcccggcccccaggggccggtgggcccacctggtaaaaagggagagaaaggagatagcgaagacggggcgcctggactgcccgggcagcccggctcacccggcgaacagggcccaaggggaccacccggggcaatagggcctaagggtgaccgtggattccccgggcccttaggagaagccggcgagaaaggagagcgaggtccacctggtccagccgggtccaggggcctgccaggtgttgctgggcggcccggagcgaagggaccagaggggccaccaggaccgaccggacggcagggtgagaagggcgagcccggtcggccaggcgaccccgccgttgtcgggccagccgtagccggacccaagggagaaaaaggggacgtggggcccgccgggcctagaggcgcaaccggagttcaaggagaacgaggccctcctgggttagtcctgcccggagaccctggccctaagggcgaccccggagatcgcggacctatcgggttgacaggccgggccggaccacctggtgattcgggtccgccgggcgagaagggagaccccggtaggcccgggccccctgggccagtggggccgagaggccgtgatggtgaagtcggcgagaaaggggacgaggggccaccgggcgatcccggactaccggggaaggctggggagcgcgggctcaggggtgcacctggtgttaggggacctgttggcgaaaagggagaccaaggcgatccaggcgaggatgggcgaaacggctcgccaggttcaagtggacctaaaggggataggggcgagcccggaccccctgggccgcctggacggctggtggataccgggcctggggcccgtgagaagggagagcctggcgacaggggacaggaaggtccgaggggaccaaaaggagatccgggcttacccggggcccctggggagaggggcattgagggtttcaggggccctcctggaccccagggggatcccggcgtgagaggaccagcaggcgagaaaggcgataggggaccccctgggctagatggcagaagcggcctggatggtaagcccggtgccgccggcccttctggaccgaacggcgccgccggcaaggctggagatccaggtcgtgacggactgcccggcctgcggggtgagcaaggcctgccagggccatccggccccccgggcctgcctgggaaacccggcgaagacgggaaacccggcctcaatgggaagaatggcgaacccggcgatccaggagaggatggtcgaaagggggaaaaaggagatagcggcgcatcggggcgagagggccgggacggccccaagggggaacggggtgctccggggatactgggaccacaagggcctccaggcctgcctggccctgttggtcccccgggacaggggttcccaggagtgcccggtggcacaggccctaagggagatcgaggcgagacagggagtaaaggagaacaagggttgccaggcgagaggggcttgcgaggcgaaccaggatccgttcctaatgtggaccggctacttgagaccgctggcattaaggcaagcgctctacgggagattgtggagacctgggacgaatcaagtggcagcttccttcctgtgcctgagcgcaggagaggcccaaagggcgattctggagagcagggtccccctggtaaggaggggcctattggcttccctggcgagcgcggtctcaagggagatagaggcgatcccggacctcaggggcccccagggctggcgctgggagaaaggggcccacctggccccagcgggctggccggggagcctggaaagccaggaatccctggcttgcctggaagggctggaggcgtgggggaagccggcagacctggggagcgcggggagcgcggtgaaaaaggcgagcggggtgaacaagggcgagacggacctcctggcctgcccggtacacctgggcctcccgggcccccaggtcccaaagtgagtgtggacgagccgggtcccgggctgtctggagagcagggccctcccggcctgaagggggctaagggagagcctggatccaacggtgaccagggtccgaagggggatcggggtgtccctggaataaagggggatcgcggagagcctgggcctagaggccaggatggaaatccagggctcccaggagaacgggggatggccggccctgagggcaagcccgggctgcaaggacccaggggccctcctggccccgtgggtgggcatggagacccaggcccaccaggggcccctgggctggccggccctgccggtcctcagggcccgagcgggttgaagggcgagccaggtgaaacagggccccctggtcggggcctgacgggccccacaggggccgtgggactccctggccctcccgggccgagcggacttgttgggcctcaaggatcccctgggctccccgggcaggttggggagacaggcaaaccaggagcgcccggacgcgacggcgcatctggcaaagatggtgatcgcggtagccccggggtgccaggttcccccgggctcccaggcccagtggggccgaagggggagcctggacccacaggggctccgggacaggcagtggtcgggctgccaggagcaaaaggcgaaaagggagccccggggggtctggctggcgaccttgtcggcgaaccaggtgcgaaaggcgatagggggctcccagggccacgcggagaaaagggcgaagcaggacgggccggagagcccggcgatcctggggaggatggtcagaagggggcaccaggaccaaagggctttaagggggatccaggagtaggtgtaccggggagccccggaccccccggaccacctggggtaaaaggtgacctggggctaccgggccttcctggagcccccggagtggtgggcttccctggtcagacgggcccccgcggagagatggggcagccaggaccatcgggggagagaggtctggccggcccgcccggaagggaggggatacccggacccctaggaccccccgggcctcccgggagcgtgggaccgccgggtgcctctggtttgaagggtgacaagggagaccccggtgtagggctgcctggtccccgaggcgagcggggcgaacctgggattcggggagaggacgggcgtcccggccaggagggacccagagggctgacagggccccctggtagtcggggcgagaggggcgagaagggggatgtggggtcagcgggcctgaaaggagacaagggggactccgccgtgatcctgggtccacccggacctaggggggccaagggcgacatgggggagagaggaccgcgaggactggacggggataaaggacctcggggggacaacggtgatcctggcgacaaaggctcaaagggagaaccaggcgacaaaggttctgccggtttacctggcctgcgcggactgctggggcctcaggggcagcccggcgccgctggaataccaggcgatccaggctcacctggaaaggatggtgtccccggaatacggggtgagaaaggagacgtggggttcatggggcctagaggcctgaaaggggagaggggggtgaaaggtgcctgcgggctggatggagaaaaaggggataaaggcgaggcaggacctccagggcgcccagggttagcgggccacaagggcgagatgggcgaacctggagtgcctggccaaagtggcgcaccaggaaaggagggcctgattggccccaagggagatcgaggatttgacggtcagcctggaccaaaaggagatcagggcgagaaaggggagaggggaacccccgggattggagggtttcctgggcccagtggcaacgatggaagcgctggcccacccgggccaccaggctcggtgggccccagagggccagaaggactccaaggacagaagggggagcggggacccccaggtgagcgggtggtgggcgcaccaggggttccaggagctcccggagagcggggcgagcaggggcggcccggccccgcgggacccagaggggagaagggggaggccgctcttactgaggacgatatccgcggtttcgtcaggcaagagatgtctcagcattgtgcctgtcagggacagtttattgcgtcagggtctcgtcctctccccagctacgccgcagacactgcgggttcacaactacacgccgtccctgttcttcgggtatcccacgctgaggaggaagagcgagtgcctccagaggatgacgaatatagcgaatactccgagtattcggtagaagagtatcaggaccctgaggcaccctgggattcagatgatccctgctccctaccgttggatgaaggttcttgcacggcgtacaccctccggtggtaccaccgtgccgtgaccggctctactgaagcatgtcacccatttgtgtacggcggctgcggcggcaacgcgaatcgttttggcacaagagaagcgtgtgagcggaggtgtcctcctcgggtggtgcagagtcagggcaccggtaccgctcaggac

SEQ ID NO: 1462 - DNA, 8832 bp, Artificial Sequence
  derived and/or modified sequence
atgacgttacgactattagtagcggcgttatgtgcgggtatattagcggaagcgccgcgtgtacgagcgcaacatcgagaacgtgttacgtgtacgcgtctatatgcggcggatatagtatttttattagatggttcgtcgtcgataggtcgatcgaattttcgtgaagttcgttcgtttttagaaggtttagtactaccgttttcgggtgcggcgtcggcgcaaggtgtacgatttgcgacggtacaatattcggatgatccgcgtacggaatttggtttagatgcgctaggttcgggtggtgatgtaatacgtgcgatacgagaactatcgtataaaggtggtaatacgcgtacgggtgcggcgatattacatgtagcggatcatgtttttttaccgcaattagcgcgaccgggtgtaccgaaagtatgtatactaataacggatggtaaatcgcaagatttagttgatacggcggcgcaacgtttaaaaggtcaaggtgtaaaactatttgcggtaggtataaaaaatgcggatccggaagaattaaaacgtgtagcgtcgcaaccgacgtcggatttttttttttttgtaaatgatttttcgatattacgtacgctactaccgttagtttcgcgtcgagtatgtacgacggcgggtggtgtaccggttacgcgaccgccggatgattcgacgtcggcgccgcgagatctagttttatcggaaccgtcgtcgcaatcgctacgtgttcaatggacggcggcgtcgggtccggtaacgggttataaagttcaatatacgccgttaacgggtttaggtcaaccgctaccgtcggaacgtcaagaagtaaatgtaccggcgggtgaaacgtcggttcgtctacgtggtttacgtccgctaacggaatatcaagtaacggtaatagcgctatatgcgaattcgataggtgaagcggtatcgggtacggcgcgtacgacggcgctagaaggtccggaattaacgatacaaaatacgacggcgcattcgttactagttgcgtggcgttcggtaccgggtgcgacgggttatcgtgtaacgtggcgtgttctatcgggtggtccgacgcaacaacaagaactaggtccgggtcaaggttcggttttactacgagatctagaaccgggtacggattatgaagtaacggtttcgacgctatttggtcgttcggtaggtccggcgacgtcgctaatggcgcgaacggatgcgtcggtagaacaaacgctacgtccggttatactaggtccgacgtcgatattattatcgtggaatctagtaccggaagcgcgtggttatcgattagaatggcgtcgtgaaacgggtttagaaccgccgcaaaaagtagtattaccgtcggatgtaacgcgttatcaactagatggtctacaaccgggtacggaatatcgactaacgttatatacgctattagaaggtcatgaagtagcgacgccggcgacggttgttccgacgggtccggaattaccggtttcgccggttacggatttacaagcgacggaactaccgggtcaacgtgtacgtgtatcgtggtcgccggtaccgggtgcgacgcaatatcgtataatagttcgttcgacgcaaggtgtagaacgaacgttagtactaccgggttcgcaaacggcgtttgatttagatgatgttcaagcgggtctatcgtatacggtacgtgtatcggcgcgtgttggtccgcgtgaaggttcggcgtcggtattaacggtacgtcgagaaccggaaacgccgttagcggtaccgggtctacgtgtagtagtatcggatgcgacgcgtgtacgtgttgcgtggggtccggtaccgggtgcgtcgggttttcgtatatcgtggtcgacgggttcgggtccggaatcgtcgcaaacgctaccgccggattcgacggcgacggatataacgggtttacaaccgggtacgacgtatcaagttgcggtatcggttttacgaggtcgagaagaaggtccggcggcggtaatagttgcgcgtacggatccgctaggtccggtacgtacggtacatgtaacgcaagcgtcgtcgtcgtcggtaacgataacgtggacgcgagtaccgggtgcgacgggttatcgagtatcgtggcattcggcgcatggtccggaaaaatcgcaattagtttcgggtgaagcgacggtagcggaattagatggtttagaaccggatacggaatatacggttcatgttcgagcgcatgtagcgggtgtagatggtccgccggcgtcggtagttgttcgaacggcgccggaaccggtaggtcgtgtatcgcgtttacaaatattaaatgcgtcgtcggatgtactacgtataacgtgggttggtgtaacgggtgcgacggcgtatcgactagcgtggggtcgttcggaaggtggtccgatgcgacatcaaatattaccgggtaatacggattcggcggaaatacgtggtttagaaggtggtgtatcgtattcggtacgtgtaacggcgctagtaggtgatcgtgaaggtacgccggtatcgatagtagtaacgacgccgccggaagcgccgccggcgctaggtacgctacatgtagtacaacgtggtgaacattcgttacgactacgttgggaaccggtaccgcgtgcgcaaggttttctattacattggcaaccggaaggtggtcaagaacaatcgcgtgttctaggtccggaattatcgtcgtatcatttagatggtctagaaccggcgacgcaatatcgagttcgactatcggtattaggtccggcgggtgaaggtccgtcggcggaagtaacggcgcgaacggaatcgccgcgtgtaccgtcgatagaactacgagtagtagatacgtcgatagattcggttacgctagcgtggacgccggtatcgcgagcgtcgtcgtatatattatcgtggcgaccgctacgtggtccgggtcaagaagtaccgggttcgccgcaaacgctaccgggtatatcgtcgtcgcaacgtgtaacgggtctagaaccgggtgtatcgtatatattttcgctaacgccggtactagatggtgttcgaggtccggaagcgtcggttacgcaaacgccggtatgtccgcgtggtctagcggatgtagtttttttaccgcatgcgacgcaagataatgcgcatcgtgcggaagcgacgcgacgagttctagaacgtttagttctagcgctaggtccgttaggtccgcaagcggttcaagttggtttactatcgtattcgcatcgaccgtcgccgctatttccgttaaatggttcgcatgatttaggtataatattacaacgaatacgtgatatgccgtatatggatccgtcgggtaataatctaggtacggcggtagtaacggcgcatcgatatatgttagcgccggatgcgccgggtcgtcgtcaacatgtaccgggtgtaatggtactattagtagatgaaccgctacgtggtgatatattttcgccgatacgtgaagcgcaagcgtcgggtctaaatgtagtaatgctaggtatggcgggtgcggatccggaacaactacgtcgattagcgccgggtatggattcggttcaaacgttttttgcggtagatgatggtccgtcgctagatcaagcggtatcgggtctagcgacggcgttatgtcaagcgtcgtttacgacgcaaccgcgaccggaaccgtgtccggtttattgtccgaaaggtcaaaaaggtgaaccgggtgaaatgggtctacgaggtcaagttggtccgccgggtgatccgggtttaccgggtcgtacgggtgcgccgggtccgcaaggtccgccgggttcggcgacggcgaaaggtgaacgaggttttccgggtgcggatggtcgaccgggttcgccgggtcgtgcgggtaatccgggtacgccgggtgcgccgggtctaaaaggttcgccgggtctaccgggtccgcgtggtgatccgggtgaacgtggtccgcgtggtccgaaaggtgaaccgggtgcgccgggtcaagtaataggtggtgaaggtccgggtttaccgggtcgaaaaggtgatccgggtccgtcgggtccgccgggtccgcgtggtccgctaggtgatccgggtccgcgtggtccgccgggtttaccgggtacggcgatgaaaggtgataaaggtgatcgtggtgaacgaggtccgccgggtccgggtgaaggtggtatagcgccgggtgaaccgggtttaccgggtctaccgggttcgccgggtccgcaaggtccggtaggtccgccgggtaaaaaaggtgaaaaaggtgattcggaagatggtgcgccgggtctaccgggtcaaccgggttcgccgggtgaacaaggtccgcgtggtccgccgggtgcgataggtccgaaaggtgatcgtggttttccgggtccgttaggtgaagcgggtgaaaaaggtgaacgtggtccgccgggtccggcgggttcgcgaggtctaccgggtgtagcgggtcgtccgggtgcgaaaggtccggaaggtccgccgggtccgacgggtcgacaaggtgaaaaaggtgaaccgggtcgaccgggtgatccggcggtagtaggtccggcggttgcgggtccgaaaggtgaaaaaggtgatgtaggtccggcgggtccgcgtggtgcgacgggtgttcaaggtgaacgaggtccgccgggtctagtactaccgggtgatccgggtccgaaaggtgatccgggtgatcgaggtccgataggtctaacgggtcgagcgggtccgccgggtgattcgggtccgccgggtgaaaaaggtgatccgggtcgtccgggtccgccgggtccggtaggtccgcgtggtcgagatggtgaagtaggtgaaaaaggtgatgaaggtccgccgggtgatccgggtctaccgggtaaagcgggtgaacgtggtctacgtggtgcgccgggtgtacgtggtccggttggtgaaaaaggtgatcaaggtgatccgggtgaagatggtcgtaatggttcgccgggttcgtcgggtccgaaaggtgatcgaggtgaaccgggtccgccgggtccgccgggtcgattagttgatacgggtccgggtgcgcgtgaaaaaggtgaaccgggtgatcgtggtcaagaaggtccgcgaggtccgaaaggtgatccgggtttaccgggtgcgccgggtgaacgtggtatagaaggttttcgaggtccgccgggtccgcaaggtgatccgggtgtacgtggtccggcgggtgaaaaaggtgatcgtggtccgccgggtttagatggtcgatcgggtttagatggtaaaccgggtgcggcgggtccgtcgggtccgaatggtgcggcgggtaaagcgggtgatccgggtcgtgatggtttaccgggtttacgaggtgaacaaggtttaccgggtccgtcgggtccgccgggtttaccgggtaaaccgggtgaagatggtaaaccgggtctaaatggtaaaaatggtgaaccgggtgatccgggtgaagatggtcgtaaaggtgaaaaaggtgattcgggtgcgtcgggtcgagaaggtcgtgatggtccgaaaggtgaacgaggtgcgccgggtatattaggtccgcaaggtccgccgggtttaccgggtccggtaggtccgccgggtcaaggttttccgggtgtaccgggtggtacgggtccgaaaggtgatcgtggtgaaacgggttcgaaaggtgaacaaggtctaccgggtgaacgtggtctacgtggtgaaccgggttcggtaccgaatgtagatcgtttattagaaacggcgggtataaaagcgtcggcgctacgtgaaatagtagaaacgtgggatgaatcgtcgggttcgtttctaccggtaccggaacgtcgacgtggtccgaaaggtgattcgggtgaacaaggtccgccgggtaaagaaggtccgataggttttccgggtgaacgtggtttaaaaggtgatcgtggtgatccgggtccgcaaggtccgccgggtttagcgctaggtgaacgaggtccgccgggtccgtcgggtctagcgggtgaaccgggtaaaccgggtataccgggtctaccgggtcgtgcgggtggtgtaggtgaagcgggtcgaccgggtgaacgtggtgaacgaggtgaaaaaggtgaacgaggtgaacaaggtcgagatggtccgccgggtctaccgggtacgccgggtccgccgggtccgccgggtccgaaagtatcggtagatgaaccgggtccgggtttatcgggtgaacaaggtccgccgggtctaaaaggtgcgaaaggtgaaccgggttcgaatggtgatcaaggtccgaaaggtgatcgtggtgtaccgggtataaaaggtgatcgtggtgaaccgggtccgcgtggtcaagatggtaatccgggtttaccgggtgaacgtggtatggcgggtccggaaggtaaaccgggtttacaaggtccgcgtggtccgccgggtccggtaggtggtcatggtgatccgggtccgccgggtgcgccgggtctagcgggtccggcgggtccgcaaggtccgtcgggtctaaaaggtgaaccgggtgaaacgggtccgccgggtcgtggtctaacgggtccgacgggtgcggtaggtctaccgggtccgccgggtccgtcgggtttagtaggtccgcaaggttcgccgggtctaccgggtcaagttggtgaaacgggtaaaccgggtgcgccgggtcgtgatggtgcgtcgggtaaagatggtgatcgtggttcgccgggtgtaccgggttcgccgggtctaccgggtccggttggtccgaaaggtgaaccgggtccgacgggtgcgccgggtcaagcggttgttggtttaccgggtgcgaaaggtgaaaaaggtgcgccgggtggtttagcgggtgatctagtaggtgaaccgggtgcgaaaggtgatcgaggtttaccgggtccgcgtggtgaaaaaggtgaagcgggtcgagcgggtgaaccgggtgatccgggtgaagatggtcaaaaaggtgcgccgggtccgaaaggttttaaaggtgatccgggtgtaggtgttccgggttcgccgggtccgccgggtccgccgggtgttaaaggtgatttaggtctaccgggtttaccgggtgcgccgggtgttgtaggttttccgggtcaaacgggtccgcgtggtgaaatgggtcaaccgggtccgtcgggtgaacgaggtttagcgggtccgccgggtcgtgaaggtataccgggtccgctaggtccgccgggtccgccgggttcggtaggtccgccgggtgcgtcgggtttaaaaggtgataaaggtgatccgggtgttggtttaccgggtccgcgaggtgaacgaggtgaaccgggtatacgtggtgaagatggtcgtccgggtcaagaaggtccgcgaggtttaacgggtccgccgggttcgcgaggtgaacgtggtgaaaaaggtgatgtaggttcggcgggtctaaaaggtgataaaggtgattcggcggtaatactaggtccgccgggtccgcgaggtgcgaaaggtgatatgggtgaacgaggtccgcgtggtttagatggtgataaaggtccgcgtggtgataatggtgatccgggtgataaaggttcgaaaggtgaaccgggtgataaaggttcggcgggtttaccgggtttacgaggtctattaggtccgcaaggtcaaccgggtgcggcgggtataccgggtgatccgggttcgccgggtaaagatggtgtaccgggtatacgaggtgaaaaaggtgatgtaggttttatgggtccgcgaggtttaaaaggtgaacgaggtgttaaaggtgcgtgtggtttagatggtgaaaaaggtgataaaggtgaagcgggtccgccgggtcgaccgggtctagcgggtcataaaggtgaaatgggtgaaccgggtgttccgggtcaatcgggtgcgccgggtaaagaaggtctaataggtccgaaaggtgatcgtggttttgatggtcaaccgggtccgaaaggtgatcaaggtgaaaaaggtgaacgaggtacgccgggtataggtggttttccgggtccgtcgggtaatgatggttcggcgggtccgccgggtccgccgggttcggtaggtccgcgtggtccggaaggtctacaaggtcaaaaaggtgaacgtggtccgccgggtgaacgtgtagtaggtgcgccgggtgtaccgggtgcgccgggtgaacgaggtgaacaaggtcgtccgggtccggcgggtccgcgaggtgaaaaaggtgaagcggcgttaacggaagatgatatacgtggttttgttcgacaagaaatgtcgcaacattgtgcgtgtcaaggtcaatttatagcgtcgggttcgcgaccgttaccgtcgtatgcggcggatacggcgggttcgcaattacatgcggttccggttctacgagtatcgcatgcggaagaagaagaacgtgttccgccggaagatgatgaatattcggaatattcggaatattcggttgaagaatatcaagatccggaagcgccgtgggattcggatgatccgtgttcgctaccgttagatgaaggttcgtgtacggcgtatacgttacgttggtatcatcgtgcggttacgggttcgacggaagcgtgtcatccgtttgtttatggtggttgtggtggtaatgcgaatcgatttggtacgcgtgaagcgtgtgaacgtcgttgtccgccgcgtgttgttcaatcgcaaggtacgggtacggcgcaagat

SEQ ID NO: 1463 - DNA, 8832 bp, Artificial Sequence
  derived and/or modified sequence
atgaccctgagactgctggtggctgcgctgtgcgcaggaatcctcgccgaagccccgcgggtcagagcgcagcatcgagagcgggtcacctgcacccgtctttacgcggccgacatcgttttcctgctggatggcagctccagcatcggtaggtcaaacttccgcgaagtgcgctcgttcttggaaggactcgtccttccgttttccggagccgcttctgctcagggagtccgtttcgcaactgtccaatactcggacgacccacggaccgaattcggccttgatgcgctcggatccggcggcgacgtgatccgcgctatcagggagctgtcctacaagggaggaaacaccagaactggagccgcgatcctccacgtcgcggatcacgtgtttctgccgcaactggctcggcccggagtcccaaaggtgtgcattctgatcacggacggaaagtcacaggatttggtcgatactgcagctcaaaggctgaaagggcagggggtgaagctgtttgcggttgggattaagaatgctgacccggaagaactgaagagggtagcgagccaaccaacctcggacttcttcttcttcgtcaacgacttcagtattctgcgtaccttgctcccgctggtgtcgcgcagggtgtgtaccacggccggaggagtgcctgtgactcgcccgccggatgattcgactagcgcgccgagggacctcgtcctgtcggagccaagtagccagtccctgagagttcagtggactgctgcctccggtccggtgaccggatacaaggtccaatatactccgctcaccggactcggccaaccgcttccgtccgagcgtcaagaagtgaacgtgccggccggagagacttcagtccgccttagaggactccggccgctgaccgaataccaggtgactgtgatcgcgctgtacgccaattcaatcggagaggcggtatcaggaactgcgagaaccaccgcacttgagggtcccgaactgactatccagaatacgaccgcccactcactcctcgtcgcctggcgctccgttcctggcgcgactgggtacagagttacttggcgcgtcctcagtggaggaccgacccaacaacaagagctggggccaggtcagggttccgtgctcttgagggacctggaaccgggcaccgattacgaggtgaccgtgtcaactctgttcggccgctcagtcgggccggccacctcgctcatggcgcggaccgatgcctccgtggaacaaaccctcagaccggtgatcctggggcccacttcgattcttctgtcctggaatcttgtgccggaagctcggggctaccggctcgagtggcgccgagaaacgggattggagccgccacagaaagtggtgctgccgtcggatgtgactcgctaccagctggacggcctgcagccaggaactgaatatagactgaccctctatacgttgctggaggggcacgaggtggcaactcctgctactgtcgtgccaactgggcccgagctcccggtgagtcccgtcactgaccttcaggctaccgagttgcctggccagagagtgagagtgtcgtggtccccggtgcccggagcgactcagtacagaatcatcgtccgcagcacccagggagtggaacgcaccctggtgctccccgggagccaaaccgcgttcgacttggatgacgtgcaggcgggactttcctacactgtgcgggtatccgcaagagtgggcccgcgggaaggttcggcttcagtgctcactgtccgccgggagccagaaacgccgctcgcagtgccgggtctgcgcgttgtggtgagcgacgcgactagagttcgagtggcttggggcccggtgccgggggcatcaggattccggatctcgtggtcgactggaagtggtccggaatcaagccagactctgccaccagactcgacggccactgatattacgggtctgcaaccgggaactacctaccaagtcgctgtgtccgtcttgcgcggtcgcgaggaaggacccgccgcggtgatcgtggcacgcaccgaccctctggggcctgtccgcaccgtccacgtgacccaagcctcgtccagcagcgtgaccatcacctggacgagagtgcctggcgcaaccggttaccgcgtctcctggcactcagcccacggccccgagaagagccagctggtttcaggggaggccactgtggccgaacttgatggtctggagcctgacactgaatacactgtgcacgtgcgcgcgcacgtcgccggagtcgacggtccaccagcttcggtggtcgtgaggaccgcgccggaacccgtggggcgcgtgtcccgactgcagatcctcaatgcgtccagcgacgttctgcgcattacctgggtgggagtgaccggtgcaaccgcctaccggctggcttggggacgcagcgaaggcggaccaatgcggcaccagatcctccctggaaataccgactcagccgaaatccgcggtctggaaggaggagtgtcctactcggtgcgcgtcaccgccctggtgggagatagggagggaacgccagtgtcaatcgtggtgactacccctccggaagctccgcctgcgctcggtaccctgcatgtggtgcaacggggcgagcattccctgcggctgaggtgggaaccagtcccgagagcccagggctttctgctgcattggcagccggaaggcgggcaggagcagtcccgcgtcctcggacctgagctgtcgtcctaccatctggacggactggaaccagccacccagtaccgggtgcggttgtcagtgctcggcccagcgggcgaaggaccgtcggctgaggtgaccgcccgcactgaatcaccgcgggtgccttccattgaactgcgggtggtggatacgtcaatcgactccgtgaccctggcttggaccccggtgagccgggccagcagctacatcctgtcgtggcgcccactgagggggcctggacaggaggtcccaggatcaccacaaacgctgcccggaatctctagctcgcaaagggtgacgggtctggaaccgggagtgtcgtacatctttagcctgacccccgtgttggatggagtccggggaccagaagcatccgttacccagaccccggtctgcccaagaggcctggctgacgtcgtgttcttgcctcatgccactcaggacaatgctcacagagccgaagccactcggcgggtcctggaacgcctggtgctggccctcggaccactcggacctcaagccgtgcaggttggactgctctcatactctcaccggcctagccccttgtttccactgaacggatcccacgacctcgggatcatcctgcagaggatccgcgacatgccgtacatggacccaagcgggaacaatctgggaaccgcggtggtgactgcacaccggtacatgctggccccagatgcgccaggacggcggcagcacgtgccaggcgttatggtgttgttggtggatgagcccctgcggggcgacatcttcagcccaatccgcgaagcccaggcctcaggattgaatgtcgtcatgctgggaatggccggcgcagatccggagcagctgaggcggctggccccggggatggactccgtgcagaccttctttgccgtggacgatggcccgagcctcgaccaagccgtgtcaggactcgcgaccgcgttgtgccaggcgtccttcacgactcagcccagaccggaaccgtgcccagtgtactgccctaaaggacagaagggagaaccgggtgaaatgggactccggggccaagtgggacccccgggcgacccaggattgcctggaagaacgggcgcacctggaccacagggacctcctggttccgccaccgcaaagggagagcgcggtttccccggagcagacggacgaccgggctcgccggggcgcgcaggaaaccctggaaccccgggagcccctggactcaaaggctcgccgggactgcctgggccgcgcggggatccaggagaacgaggacctagaggaccgaaaggagagcccggagccccggggcaggttattggaggggaaggaccgggactgccgggacgcaagggagatccggggccgtcgggtcctccggggccgcgcggtcctttgggagatcccggaccgcgcggcccaccgggactgccgggaaccgccatgaagggcgacaagggagatagaggtgagcggggaccaccggggcctggagaagggggcatagcaccgggcgagccaggccttccaggactgcctggatccccgggcccacaggggcccgtgggaccgcctggcaagaagggagaaaaaggcgattcggaggacggcgccccagggctcccgggccagcccggaagcccgggcgagcagggaccccgggggccgccaggggcgatcggaccgaagggagatcgggggttcccgggcccgctgggagaagctggagagaagggagaacgcggaccaccgggacctgcgggatccaggggcctgccgggagtcgccggtcggccgggcgccaaagggccggaaggaccgccgggaccgaccggacgacaaggagagaaaggagaaccgggtcggcctggagatcctgcggtggtcggacctgcagtggccggaccgaaaggagaaaagggggacgtggggcctgcgggcccccgcggtgccactggcgtgcagggcgagcgcggaccgccgggcctcgtgcttcctggagatccgggaccaaagggggacccaggcgatcggggcccgatcggcctgaccgggcgggccgggccgccgggagattcaggcccgcctggagagaagggtgatcctggacgccctggtccaccgggaccagtaggccctagaggcagggacggagaggtcggagagaagggggacgaaggaccgccgggagatcctggcctgcccggaaaggcaggagagaggggattgagaggtgctccgggggtccgcggtcctgtcggagaaaagggagatcagggcgacccgggagaggatggtcgcaacggatcgcctgggtcatcggggccgaagggggaccgcggagagccgggaccaccgggtccgcctggaaggctggtggataccgggccaggggcacgggagaaaggagaaccgggagatcgcggacaggaaggcccacggggaccgaagggagatccgggcttgccgggagcgccgggagagagaggaatagaaggttttcggggtcctccaggtccacagggagatcctggtgtccgcggaccggcgggagaaaaaggtgatcgcggaccgccgggcctggacggaagatccggactggacggaaagccgggggcagctgggccttcgggcccaaatggggccgcaggaaaggccggcgaccccggaagggacgggctgccaggattgcgaggtgaacagggcctgcctggaccaagcggtcctccgggtttgcccggaaaacctggggaggacggaaagcctggcctgaacggaaaaaacggggaacccggcgaccccggagaagatggtagaaagggtgagaaaggcgactcgggcgcttcggggcgggaaggccgcgatggaccaaagggagagcgaggagccccaggaattctggggccacagggaccgccgggcctgccgggtccggtaggtccacctggtcagggcttcccaggagtgccgggagggacgggcccaaagggcgacagaggcgaaactggtagcaagggcgaacagggactgccgggagagcgcggactgagaggcgagcctggaagcgtgccgaacgtcgacagactgttggaaactgcagggattaaggcttcggcacttcgggaaatcgtggagacttgggacgaatcatcagggtcgtttctccccgtccccgaaagacgacggggaccgaaaggcgattcaggagaacagggacctccagggaaagaagggccaatcggcttcccgggagaacggggtctgaagggtgaccgcggtgaccctggtccgcaaggaccaccgggcctcgccctcggtgaacgggggccgcctggcccgtcggggttggccggcgagccgggcaagccaggaatccccggacttcctggacgcgcaggaggcgtgggcgaagcaggacggccaggagaaagaggggaaagaggagaaaagggggagcggggcgaacaaggtagagacgggccgcctggcctgccaggaactccggggcctccgggaccccctggaccaaaggtcagcgtggacgaaccgggcccggggctctcgggcgagcagggcccgcctgggttgaagggcgccaaaggcgaaccaggatcaaatggagatcagggacccaaaggagatcgtggtgtcccgggaatcaaaggcgacagaggagaaccaggacctcggggccaggatggcaaccccggactgcctggagagcggggcatggctggaccagaggggaaaccaggactgcagggaccgcgcggaccgccgggcccagtgggcgggcatggcgacccgggacccccaggcgccccggggctcgccgggccggccggcccgcagggaccatcgggtctgaagggcgagccgggagaaaccggacccccagggcgcggcctgactggtccaactggagctgtcggactcccaggtcctccgggaccatccgggctggtgggaccgcaaggatccccaggactgccgggtcaggttggggagactggaaagccaggcgccccaggaagggacggcgcaagcgggaaggatggggaccgcggcagccccggcgtgccaggatcgcctggattgccgggacctgtcggacctaagggtgagccaggaccaaccggcgcccctggacaggccgtggtggggcttccaggagctaaaggagaaaaaggcgcgcccggaggattggcaggcgacctggtgggggagccgggagccaagggggaccgcggattgccgggaccgcggggcgagaaaggcgaggcgggccgggcaggtgaaccgggggaccccggcgaagatggacagaagggcgcccctggacctaagggattcaaaggagatcccggagtcggggtgccaggctcaccaggcccgccaggaccaccgggagtcaagggagatctcggtctgccgggccttccaggggcgcctggcgtggtcgggttcccgggccaaaccggcccaaggggagagatgggacaaccaggaccgagtggggagcgggggttggccggtccacccggaagagaaggtatcccaggaccgcttggtccgccgggtccgccgggttcggtgggcccacctggcgcatcagggttgaagggcgacaagggtgacccgggggtcggactgccgggaccacggggagagcggggagaacctggaatcaggggagaagatggacggcctggccaagaaggtccgcgcggcctcactgggccgccgggatcgagaggtgagcgtggcgaaaaaggagacgtgggcagcgctggcctgaagggagacaagggggacagcgcagtcatcctcggaccaccgggaccgcggggagcaaagggagacatgggcgaacgcggaccgcgtgggctcgacggggacaagggcccgcgcggagataacggggatccgggcgacaagggtagcaagggcgagccgggcgacaagggctcggccggcctcccgggcctgcgcggactgttgggtccacaaggccagccgggcgcagcgggaattccgggtgacccgggatcaccgggcaaagacggagtgccgggcatccgaggagagaagggcgatgtgggattcatggggcctaggggattgaaaggcgagcggggagtcaagggcgcgtgtgggcttgacggagaaaagggcgataagggagaggcaggtccaccaggcaggccgggtttggccgggcacaagggagagatgggtgaaccgggggtgccaggacagtccggagcgccaggaaaggagggcttgatcggcccgaagggggaccgcggcttcgatggtcaaccgggaccgaaaggggaccagggggaaaagggggagcggggtactcccggaatcggcggctttcctggcccatccggaaatgacgggagcgccgggccaccagggcccccaggttccgtgggcccgcgcggaccggaaggcctgcaaggtcagaaaggggagcgggggccgccaggggaacgggtggtcggtgcccccggggtgccaggagcaccgggtgagcgcggagagcaaggccgaccggggcctgctggacctcgcggcgaaaagggagaggcggctctcactgaagatgacatcaggggcttcgtgcggcaggaaatgtcccaacactgcgcctgtcagggccaattcatcgcatccgggtcacgcccactgcctagctacgctgcggacactgcaggttcccaactccatgcagtgccagtcctgcgtgtgtcgcatgccgaggaggaagagcgcgtgcccccggaagatgacgaatacagcgagtactcggagtactctgtcgaagaatatcaagacccggaggccccttgggattccgacgacccttgctccctgcctcttgacgaaggctcgtgcactgcttacaccctgcggtggtaccatcgggcagtgaccggatccaccgaagcatgccatccgttcgtgtatggtgggtgcggagggaatgccaatagatttggaactcgggaggcctgtgaaaggcgctgtccgcccagggtggtgcaatcccagggaaccgggactgcgcaagat

SEQ ID NO: 1464 - DNA, 8832 bp, Artificial Sequence
  derived and/or modified sequence
atgaccctgaggctgcttgtcgcggccctctgtgcaggaatactggcggaagccccccgggtccgcgcccagcatagagagcgcgtgacctgcactcgcctgtacgccgccgacatcgtctttctcctcgacggaagctcttccatcggccgctcgaacttcagagaagtgcgttcgtttctggaggggctcgtcttgccattctctggagccgccagcgcgcagggcgtgcgcttcgcaaccgtgcaatactccgacgacccgaggactgagttcgggctggacgcgttgggatccggcggcgacgtgatccgggcgatccgcgaactgagctataagggtggcaacacccggaccggagctgcaattctgcacgtggcggaccacgtgttcctgccacagcttgctcgcccaggagtcccgaaggtgtgtattcttattactgacggaaagtcacaagatctggttgataccgcagcacagagactgaaaggacagggagttaagttgttcgccgtcggaatcaaaaatgcggacccagaagagctgaagcgcgtggcatcgcagccgacctcggacttcttcttttttgtgaatgacttcagcatactgcggaccctcctgccgcttgtgagccggcgggtctgtaccaccgcaggaggagtgcccgtcacccggccgcctgatgattctaccagcgctccgcgcgatctggtgctgtcggagccgtcatcacaatcgctgcgcgtgcagtggactgcagcatctgggcccgtgactggttacaaagtccagtacacgccgctcaccggacttggacagcctctgccaagcgagcgccaggaggtgaacgtgccagcaggggaaacgagcgttcggttgcggggacttagacccctgactgagtaccaggtgactgtcatcgcgctctacgcgaattctatcggagaagccgtgagcgggaccgctcgcaccaccgcactggaaggcccggagcttacgattcagaacacgacggcacactccctcctcgtggcctggcgttcagttcccggcgcaactggatatcgggtgacttggagagtcctgtcaggtggaccaacccaacaacaagaactcggcccaggtcagggcagcgtcctgctgcgcgaccttgaacctggaaccgactacgaagtcactgtctccaccctgttcgggcggagcgtcggacctgccacgtcactgatggctcgcaccgacgcctcagtggaacagaccctgcgcccggtgatcctggggccgacctccattctgttgtcctggaacctcgtcccggaagcaagggggtatcggctggaatggcgccgcgagactggactggagcccccacaaaaagtcgtgctgccttctgacgtgacccgataccagctggatggactccagccaggcactgagtaccgcctgaccctctacactctgcttgaaggacatgaagtggccactccagccactgtggtcccgactggaccagagctcccagtgtcacctgtgaccgacctccaagcgaccgaactgccaggacaaagagttcgggtgtcgtggtcaccagtccctggagccacgcaatacaggattatcgtcagatccactcaaggagtcgagagaacgctggttctgcctggttcgcaaaccgctttcgacttggacgacgtgcaggctggactgagctacaccgtccgcgtctcggcccgcgtggggccgcgggagggatccgcgtccgtgctgactgtgcgtagagagccggaaactccgttggcggtgcctggacttcgggtggtcgtgtcggacgccacccgggtccgcgtcgcttggggaccggtgcctggcgcctctggattcaggatctcctggtcaactggaagcggaccagaatcctctcagactctgccaccggactccactgcaactgatatcactggtttgcagcctgggactacctaccaggtggctgtgtccgtgctccggggaagagaagaggggcctgctgcggtcatcgtcgcccggactgaccccctgggcccggtgcgcaccgtgcacgtgactcaagcctcctcgtcctccgtgaccatcacctggaccagagtccccggcgctactggctaccgggtcagctggcattccgcacacgggccggaaaaatcacaactggtgagcggagaagccactgtggcggagctcgatggactcgaacctgacaccgagtacactgtgcacgtccgtgctcacgtggccggagtcgatggaccaccggcctcagtggtggtccggaccgctccggaaccggtggggcgcgtgtcccggctccagatcttgaatgcatcaagcgatgtgctcagaatcacttgggtgggagttacgggagccactgcgtatcggttggcctggggccggagcgagggtggtcccatgagacatcaaatcctgccgggaaacaccgacagcgccgagatccgcggcctcgaggggggagtgtcatactcggtgagggtgacggcactggtcggtgacagagaaggaactcctgtgtcaatcgtcgtgactaccccacctgaggctcccccggcactggggacccttcatgtggtccaacgcggagaacatagcctcagactgcggtgggaacctgtgccgcgggcacagggattcctgctgcactggcagccagaaggtgggcaggagcagtcccgcgtcctcgggccagaactgtcgtcctaccatctggatggacttgaacctgcaactcaataccgcgtgaggctgtcggtccttggaccggcaggagaaggcccttcagccgaggtgaccgcacggaccgaatcgcctagagtgccttccatcgagctgcgggtcgtggacactagcatcgactccgttaccctcgcctggactccggtgtcccgggcttcgtcgtacatcctgtcctggcggccactccgcggaccgggccaggaagttccaggatcgcctcaaacccttccgggaatcagcagctcccaacgggtgactggactcgagccgggggtgtcctacatcttcagcctgaccccagtcttggatggcgtgagaggtccggaagctagcgttacccagacccccgtttgtccccgcggcctggccgacgttgtctttctgcctcatgccacgcaggacaatgcacatcgcgccgaagcaactaggagggtgcttgaacgcctggtgcttgccctcgggcccctgggcccgcaagctgtgcaggtcggcctgctctcgtactcccatagaccgtcgccgttgttcccactgaatggatcccacgacctcggcattattctccaaagaatccgggacatgccgtacatggaccccagcggaaacaatctcgggaccgcagtggtcactgctcaccgctacatgctcgccccagacgctccgggccggcgtcagcacgtgcctggcgttatggtgctgttggtggacgagcctctgagaggggatatcttttcgccgattcgagaagcacaagcgtccggactcaacgtggtgatgcttggcatggctggcgctgatccggaacagttgagacgactggcccccggaatggattccgtccaaacgtttttcgccgtggacgatgggccatccctggaccaagctgtctcgggactcgcaaccgcactctgccaggccagcttcaccacccagcctcggccagaaccttgcccggtgtactgccctaagggccagaagggcgagccaggagaaatgggactgcgcgggcaggtcgggccaccaggagatcccgggctgcctggcagaactggggccccgggaccacaggggccaccaggctcggcgacggccaaaggggaaaggggctttcctggtgctgacggccggcccggctcgccaggaagagccggcaaccctggaaccccgggcgcgccaggactgaaaggaagcccgggcctgccgggaccgcggggagatccgggcgaaagaggcccacgcggcccgaagggcgaaccaggggctcctggtcaggtcattggaggagagggacccggccttcccggtaggaagggtgatcccggaccatccggacccccgggacctcggggaccactgggggacccgggccctagaggtcccccgggcctgccgggcaccgcgatgaaaggggataagggggacagaggggaacgcggaccgccaggaccgggagaggggggaatcgccccgggagaacccgggctcccgggtctgccgggaagcccgggtccgcaagggccggtgggaccgccgggaaagaagggtgaaaagggagattcggaggacggcgcaccgggactcccgggtcagccgggatcgcctggtgagcaaggacctcgcggaccgcctggagctatcgggccgaagggggacagaggcttcccgggaccgctgggtgaagcaggtgaaaagggcgaacgcggcccacccggaccggccggctcgcgcgggctcccgggcgtggcaggtagaccaggagcgaagggcccggaaggcccgccaggaccaactggtagacaaggtgagaagggggagccaggcagaccgggcgaccccgccgtcgtcggcccagcggtggccggcccaaagggggaaaagggagatgtgggaccagccgggccccggggagcaaccggagtgcagggagaacggggacctccgggcctggtcctgccgggggacccaggaccgaagggtgacccgggagacagaggaccgatcggtctgaccggacgggctggaccgccgggcgactcgggtcctcccggggagaaaggagatcctgggcgccctgggccgccggggcccgtgggcccgaggggacgcgacggggaagtgggagagaagggcgacgaggggccccctggcgacccggggctgccgggtaaagctggagagagaggactgcggggagcaccgggcgtgcggggacccgtgggagagaagggcgatcagggagatcctggcgaggacggcagaaacgggtcaccgggtagctcaggcccgaaaggagacaggggagaaccaggaccaccgggaccgccaggtagactggtcgacaccggccccggagcgcgggagaagggagaaccaggagatcggggacaggagggcccgcgcggaccgaagggcgaccctggcctgccaggtgctccaggtgagcggggaatcgaaggatttagagggccaccaggaccgcaaggagatccgggtgtgaggggacctgccggcgaaaagggggaccggggaccaccgggactcgacggccgatccggattggacgggaaaccgggagccgcaggtccatccggacctaatggagccgcagggaaggccggtgatccaggacgagatggcctgccagggctccgcggagaacagggactgcctggcccttcggggccccccgggctccctggtaagccaggagaggatggaaaaccaggactcaacggcaagaacggagagccaggagatccaggcgaagatggaaggaagggcgagaagggtgactcaggtgcatcaggacgcgaaggacgggatggccctaagggcgaaaggggcgctccaggcatcctggggcctcagggaccaccgggattgccgggtccagtgggccctccggggcagggcttccccggagtgccgggcggaaccggaccaaagggagatcggggtgagactggaagcaagggagagcagggactgccgggagagagaggcttgaggggtgagccgggttcggtgcctaacgtggaccgactgctggaaactgccggcatcaaagccagcgccctccgagaaatcgtcgaaacctgggatgagtcatcaggatcctttctcccagtcccagaacgccggagaggaccaaagggagatagcggcgaacagggaccaccgggcaaagaaggaccgatcggtttccctggcgagcgggggctgaaaggcgatcgcggcgaccctggaccgcaggggccacctggactcgccctcggggaacgcggaccgccgggaccctccggtttggcaggtgaacctggtaagccgggaatcccaggcctcccgggaagagccggaggtgtgggagaagctggccggcctggtgaacggggggaacgaggcgaaaagggggagcgtggtgaacaaggccgcgacggacctccggggctgccgggaaccccgggaccacccggacctccggggccgaaagtgtcggtggatgaaccaggacctggcctgtccggagaacaggggccgccgggcctcaagggagctaaaggggaacccggatccaatggcgatcagggaccgaagggggaccgaggcgtcccaggcatcaagggagatcgcggtgaacctggaccgcgcggacaggatggaaatccaggactgccgggagagcgcggtatggcgggaccggagggtaagccgggactgcagggcccgcggggcccgccggggccggtcggcgggcacggtgacccgggaccgccgggcgcccctggactcgctggaccggccggaccgcaaggaccttctggccttaagggcgagccgggtgaaacgggcccgccgggacgggggctcactggcccgaccggagccgtcggactgccgggacctcccggtccttcgggactggtcggaccgcaagggagcccaggattgccgggacaggtgggagagacgggcaagccaggagccccgggacgggatggagcttctgggaaggacggagatcggggtagcccgggagtgccaggctccccgggcctgccaggccccgtcggcccgaaaggcgaaccaggaccaactggggccccgggacaggccgtggtggggctgccgggagcaaagggagaaaagggtgcaccggggggtcttgcgggcgacctcgtgggagagcctggtgcgaaaggcgatcgcggacttccgggtcctaggggcgagaagggagaggccggccgcgctggagagcccggcgacccaggagaggacggacaaaagggagctcctggcccaaaggggtttaaaggcgacccgggtgtgggagtcccgggtagcccggggccgcctggaccgccgggcgtgaaaggggacttgggcctgccgggcctcccgggagccccaggagtggtggggttccctggacaaactggaccaaggggtgaaatgggccagccaggaccatcaggcgaaagaggactcgccggaccgccgggacgcgaaggaatcccggggcccctgggccccccgggaccaccaggttccgtgggcccgccaggagcttcgggcttgaaaggtgataaaggagatccgggggtggggctgccgggcccgcgcggagaacgcggggaaccgggaatacgcggggaagatggacggccgggtcaggaaggacctaggggactcactggaccacccggatcccggggtgagagaggtgagaagggggacgtcggatcagccggtctgaagggagataaaggggattcggcggtgatccttggaccgccaggaccacggggagcaaaaggtgacatgggtgaaagaggaccgaggggactggacggagataagggaccaaggggagataacggagatcccggagataagggtagcaagggtgagcccggagacaagggatcggctggactccctggccttcgtggacttctgggaccgcagggtcaaccgggagctgcaggtattccgggcgacccgggatcaccgggtaaggatggcgtcccgggaatccggggagagaaaggcgatgtgggtttcatgggtccgcggggactgaaaggtgaacgcggtgtgaagggcgcctgcggcctcgatggagaaaagggcgataagggggaggccgggcctcccggaaggccaggactggcagggcacaaaggagagatgggcgagccgggagtcccgggccagtccggagcgccgggaaaggaaggactgatcggaccaaagggagacagaggattcgacggacagcccggacccaagggcgaccagggggaaaagggtgagagaggaaccccgggcatcggaggattccctggaccatccggaaatgacggatccgcgggcccgcctggccctccgggcagcgtgggcccgaggggccccgagggactgcagggccaaaaaggagagcgcgggccgccaggcgaacgcgtcgttggggcccctggcgtgccgggagcccccggagaacggggagagcaaggtcgccccggacccgctgggccgcgcggagaaaagggggaggcagcccttactgaggacgacatcaggggattcgtgagacaggagatgagccagcattgtgcttgccaaggccaattcatcgcatccgggtcacgcccgctcccgtcatacgccgcggacaccgccggatctcagctccacgctgtgcctgtgttgagagtgtcacacgccgaagaagaagaacgcgtgcctccggaggatgatgaatactcggagtacagcgaatactccgtcgaagaataccaggacccggaggccccgtgggactccgacgacccgtgcagcctcccgcttgatgagggttcgtgcaccgcctacactctgcggtggtaccaccgcgccgtcacgggatcgaccgaagcctgccacccgttcgtctacggcgggtgtggaggcaatgccaatcgcttcggcacccgggaagcatgcgagcgccggtgcccgcccagagtggtgcagtcacagggtacgggtactgcccaagat

SEQ ID NO: 1465 - DNA, 8832 bp, Artificial Sequence
  derived and/or modified sequence
atgacgctccgactgctggttgctgccctctgtgccgggattttggccgaggctccccgtgtccgagcccagcaccgggaacgcgtcacgtgcacccgtctctacgccgcggatattgtcttcctcctggatggatccagctccattggacgtagcaacttccgcgaagtgcgcagtttcttggagggtctcgtccttccattctccggagccgcgagcgcgcagggcgtccggtttgccaccgttcagtatagtgacgatcccaggaccgagttcggccttgacgccttgggcagcggaggcgacgttattcgcgctataagggaactgtcttacaagggcggtaatacccggacgggagctgcgatcctacacgtggctgatcatgtctttttgccacagctcgcccggcccggtgtcccgaaggtctgcatccttatcaccgacggcaagtcgcaggacctcgttgacaccgctgcacagcgtctgaagggacaaggcgtgaaactcttcgctgtcggcatcaaaaacgccgaccccgaggaactcaagcgtgtggcctctcagcccactagtgatttcttcttcttcgtgaacgacttttcgattcttcgcacattgctgcctctcgtatcccgtcgtgtgtgcacaaccgcgggcggagtgcctgtcacccgtcctccggacgattccacctccgcccctcgcgacctagttctcagcgagccgtccagccagtccctccgcgtccagtggacggctgcgtctggtcccgtcaccggctacaaggttcagtacacccccctgactggactcggacaacctctcccctctgaaaggcaggaggttaacgttcctgccggtgagactagtgtccgcctcaggggattaagacctttgactgagtaccaagttaccgtcatagccttgtacgctaactccattggggaagctgtgtccggtactgcccggacgaccgccttggagggcccggagctgacaatccagaacactacagcacactccctgttggtcgcctggagatccgtgcccggcgctaccggttaccgtgtcacttggcgggtcttaagcggcggacctacgcaacagcaagagctcgggcccggccaaggttccgttcttttgagggacctcgagcccggcactgactacgaggttaccgtgtcaaccttgttcggccgttccgtcggtccggccaccagtcttatggctcgcaccgatgcctccgtcgagcaaactctgaggccggtgatactcggccccacctctattctcctttcttggaaccttgtccccgaggcccgcggttatcgtctggaatggcgccgagagacaggtttggagcccccacagaaggttgtccttcctagcgacgtcacccgttaccaactcgatggtcttcagccgggtaccgagtaccgcctgacattgtatactctgctcgagggtcatgaagtggctacgccggccaccgtcgtgccgaccgggcccgagctgcctgtctcccccgtgactgatctccaggccaccgagctccccgggcaaagggttcgcgtgagctggtcgcccgtacccggagctacccagtatcggatcattgtacgcagcacccaaggtgtcgaacgtacccttgttctgcctggttcgcagaccgccttcgatctagatgatgtccaggccggcctctcctataccgtaagagtttccgctcgtgtgggtccgcgcgagggctctgcctccgtcctcacggtcagacgtgagcctgagaccccgctggccgttccaggattgcgtgtcgtggtctctgatgcaacccgcgtccgcgttgcttggggacctgtccccggcgcctcaggattcaggatcagctggtccaccggaagcggcccggagagttcccagaccctgcctccggacagcaccgctaccgacattactggcctgcagcctggcactacatatcaggtcgccgtctctgtcctgcgtggacgcgaagagggccccgccgccgtgattgttgcacgtacggatccattgggacccgttcgcacagtgcatgtgacccaggccagttcatcgtccgtgacgattacgtggacgagggtccctggtgctaccggctaccgcgtctcctggcattcggcccatgggcctgagaagagtcagctggtcagcggcgaggccacggttgcagagctggacggtctggaacccgataccgagtatacggtccacgtccgtgcgcatgtcgccggagtcgacggcccccctgcgtcggtcgtagttcgtaccgctcctgagccggttggccgcgtctcgcgcctccagatccttaacgcttcaagtgatgttctgcgtatcacttgggtgggagtgactggcgccaccgcttaccgcctggcttggggccgctccgaaggaggcccgatgcggcatcagatccttcccggcaacacagactctgccgagatccgtggcctggagggaggggtctcctactccgttcgtgtgacagctcttgttggcgaccgagagggaacaccggtgagtattgtcgtaacgaccccgccggaggccccgcccgctctggggacccttcacgtcgtccagcgaggggagcacagccttcgtctgcgttgggaacctgtcccccgtgcccaaggattcctcttgcactggcagcctgagggcgggcaagagcagtctcgagtgctggggcccgaactctctagctaccacctcgacgggctggagcctgcgacccaatatcgtgtccgtctgtccgtgctcggacccgccggcgagggtccgtctgccgaggtcactgcacgcactgagagcccccgggtgccttctattgagcttcgagttgtcgatacatcgatcgactccgtcacccttgcttggacccccgtctcccgtgcaagctcatacattctgtcctggaggccgcttcgtggccccggacaggaagtccccggtagccctcagactctgcccggcatctcttcatctcagcgagtcaccggcctggagcctggtgtgagttacatcttctctctgacccccgtactcgacggtgttcgcggtccggaggccagcgtcacccagacccccgtttgcccccggggattggctgacgtcgttttcctcccccatgctacccaagacaacgctcatcgtgccgaggctacacgccgggtgttggaacggcttgtcctggccttaggtcccctcggtcctcaagccgtgcaggttgggctcctgagttattcgcatcgacctagtcccttattccccctcaacggatctcacgatctaggtattatcttgcagcggatccgcgacatgccctacatggatccctcgggcaataatctcggcaccgcggtcgttaccgctcaccgctacatgctggctccagacgcacccgggcgacgtcagcatgtccccggcgtgatggtcctcctggtcgacgagcccctgcgtggtgatatctttagccccatccgcgaagcgcaggctagcggtctgaacgttgtgatgcttggcatggcaggcgccgatccagagcagttgcgtaggctcgccccggggatggattcggttcagaccttcttcgccgtagacgacggaccctctctggatcaggcggtgagtggcctcgctaccgcgttgtgccaggcttctttcactacgcagccccgcccggagccttgcccagtgtactgccccaaaggacagaagggcgagcctggcgagatgggccttcggggccaggtcggccctcccggagatcctggtttgccgggccgcactggcgcccccggtcctcagggaccaccggggtcggcgaccgccaagggagagcgcggcttcccgggcgccgacggacgtcccgggtcccccggtcgggcgggaaaccccggtactcctggcgcgccgggtctgaagggtagcccaggtctcccaggcccccgcggggatccgggtgagagaggcccgagagggcctaagggggagccgggcgcccccggacaagttatcggtggcgagggacctggcctgccgggtcgtaagggtgaccccggcccaagcggacctcccggccctcgcggcccactgggagaccctggaccgcgtggccccccgggcctgcccggaaccgctatgaagggtgacaagggtgatcgcggcgagcgtggcccgcccggtccgggggagggtggtatcgcccccggcgagcccggtcttcctggtctgcccggatcacctggtccccagggacctgtcggtcctcctggaaagaagggggagaaaggcgattccgaggatggggcccccggcctcccgggccaaccaggctccccgggtgagcaaggcccccgtggtccgcccggagctatcggccctaagggagaccgggggttcccgggcccacttggagaggccggggagaagggcgagcggggacctcctggtcccgccggctcacgcggcctccctggagtggccggccgtcccggggccaaggggcccgaaggtcccccgggccccactggccgccagggcgagaagggagagcccggtcggcctggggatcccgcggtggtcggaccagcggtggcgggtcctaagggagagaagggggatgtcggcccggccggaccccgaggcgctactggtgtccagggcgagaggggtccacctggtctggttttgcccggggaccccggccccaagggagaccccggagaccgcggcccgatcggcctgaccggtcgcgcgggtccacccggcgattcaggtcctcccggcgagaagggagacccgggcagaccgggacccccaggcccggtgggcccgcggggtagggacggtgaggtgggcgagaagggagatgagggtccgccaggtgaccccggcctcccaggtaaggctggggagcgtggcctgcgtggggcccctggtgttcgcggccccgttggtgagaaaggtgaccagggcgaccccggcgaggacggtcgtaatggatcccctggttcttcgggtcccaagggtgaccgcggcgagcctggccctcctggtccccccggccgtctggtcgatacagggccaggcgcccgcgagaagggagaacccggagacaggggccaggagggcccccgcggtcctaagggcgatcccgggttgcctggtgcgccgggcgagcgaggcatcgagggcttccgtggcccgcctggcccgcagggagacccgggagttcgtggcccggctggggagaagggcgaccgtgggccccccggactcgacggacgtagcggcttagatggcaagcccggtgcagctggtccgtccggccccaacggtgctgcgggaaaggcgggtgacccgggtagagacggcctgccgggtctgcgtggagagcagggcctgcccggtcccagcggcccacccggcctccctggaaagccgggcgaggatgggaagccgggtctcaacggcaagaacggtgagccgggtgatcctggcgaggatggacgtaagggcgagaagggtgactccggcgcctcaggccgtgaaggtagggacggtcccaagggtgagaggggcgctcccggcattcttggtccccaaggtccacctggcctacccggtcccgttggcccaccgggccagggcttccctggagtgcctggtggaactggacctaagggcgatcgcggcgagacgggctccaagggggaacagggtctgcccggcgagcgtggtttgcgcggagagcccggtagtgttccgaatgtggatcgtttacttgagaccgcaggcattaaggcttcggcgttgcgcgagattgtcgaaacctgggacgagtcttctggatcctttctccccgtccctgagcgtcgtcgcggaccaaagggtgacagcggtgagcaagggccccccggtaaggagggtcccatcggttttccgggtgaacgcggcttgaagggcgaccggggtgaccctggcccgcagggcccccccggtctggctctaggtgagcgcggtcccccgggtccgtctgggttggccggagaaccgggaaagccaggcatccccggccttcccggcagagctggaggcgtgggagaagccggccgtcctggtgaacgcggcgaacgcggtgaaaagggagagcgcggcgagcagggccgggatgggcctcctggattgcctgggacccctggcccccccggtcctcccggtcctaaagtcagtgttgacgagcccggccccgggctgtccggtgagcagggacctcctggcctgaagggtgccaagggtgagccgggatccaacggtgatcagggccccaaaggggaccgtggtgtgcccggcatcaagggcgaccgcggcgagcccggtccccgcgggcaggacggtaacccgggtcttcccggtgaaagggggatggccgggccagagggaaagcccggtttgcaagggccccggggcccccccggtccggtcggtggtcacggcgaccctgggccgcctggcgctcccggcctggcaggccctgccgggccgcaaggtccttccggactaaagggcgagccgggtgagactggtcccccaggccgtggattgacaggtcccacaggagctgtcggtctgccgggaccgccggggccctccggcctggtcgggccgcaaggctcgcccggcttacccggccaggtgggtgagacagggaagccgggcgcacccggtcgcgacggagcctctgggaaggacggtgataggggaagccccggtgtgcccggttcgcccggtcttccgggtccggtgggcccgaagggcgagcccggaccgacgggtgctcctgggcaggctgtggtcggcctccctggtgctaagggcgagaagggcgcgccgggtggcctggctggagacctggttggtgaaccaggagccaagggcgaccgtggactgccgggtccccgcggtgagaagggcgaggcggggagagccggcgagcctggcgaccccggagaggacggacagaagggtgccccaggaccaaagggtttcaagggcgatcccggtgtcggtgtccccggcagcccgggccccccaggcccccccggcgttaagggcgatcttggcctcccgggcttgcctggcgctccaggtgtggtgggtttccccggccaaacgggacctcggggcgagatggggcagcccggtcctagcggcgaacgtggcttggcaggtccccccggccgcgagggcattcccggtccactgggtccccccggtccccctggtagcgtcggcccgcccggagcgagcggcctgaagggagacaagggtgatccgggtgttggcctgcctggcccgcggggtgagcgtggtgagcctggcatccggggcgaagatggccgtcccggccaagaaggtccccgtggtcttactggccctccaggatctcggggtgagcgtggagagaagggggacgttggctccgctggtctgaagggcgataagggcgactctgcagtcatcttgggccctcctggtccccgcggagcgaagggagacatgggcgaacgcggaccgcgcggtctggacggggacaagggccctaggggtgacaacggagatcctggtgataagggttctaagggtgaaccgggcgataaaggtagcgccgggcttcccggactgcggggtcttttggggccgcaaggacagcctggcgcagctggtatccccggcgacccgggttctccggggaaggatggcgtccctggtattcgcggcgagaagggcgacgtcggctttatgggaccgcgtggtctgaagggcgagcgcggcgttaagggcgcttgtggtttggacggggagaaaggcgacaaaggcgaggccggtccgccaggtcgtcctggtctcgccggtcacaagggagagatgggtgagccgggggttcctggacagtcgggggcacccggtaaggagggcctcattggccctaagggcgaccggggctttgacggccaacctggtcccaagggtgaccagggcgagaagggcgagcggggtactcccggtataggtggctttcccgggccctccggcaacgatgggagcgccggcccgcctggtccgcctggttccgtcgggccccgcggtcctgaaggtcttcaagggcagaagggagagcgtggcccgcccggtgagagagtggtcggagctcccggcgtgcctggggcccctggggagcgcggcgagcaagggcgtcctggtcctgccggcccgcgcggtgagaagggtgaggctgctctgaccgaggatgatatccgtggtttcgtgagacaggaaatgtcccagcactgcgcttgccagggtcagtttatcgcctcgggttcccgtcccttgccctcgtacgccgctgataccgcaggcagccagctgcacgctgtccctgttctccgtgttagtcacgccgaagaggaggagcgggttcctccggaggacgatgaatacagcgagtactcggagtacagtgtcgaggaatatcaagacccggaggccccctgggactcagacgacccctgcagcctgccgctcgatgagggctcgtgcaccgcctatactttgcgctggtatcatcgagctgttaccggttcaacggaggcatgccatccgttcgtttacggtggttgtggtggtaacgctaacagatttggaacccgagaggcatgtgaacgacgttgccctccgcgcgttgtccagtcgcaaggtaccggcacggcacaagat

SEQ ID NO: 1466 - DNA, 8832 bp, Artificial Sequence
  derived and/or modified sequence
atgaccctgcgattgctggtggcagcactttgcgcgggaattcttgcagaggccccaagagtcagagcacagcatagggaaagagtgacctgtaccagactttatgcggcggacatcgtctttcttcttgacgggtcgagctccatcggtagaagcaactttcgggaggtccggtcgtttctcgaaggtcttgtcttgcccttctccggcgctgcttcagctcagggggtgcggttcgccaccgtgcagtactcggacgatcccagaacggaatttggactggacgcactcggtagcggcggggacgtcattagggccatccgggaactttcctataagggtggcaacactagaaccggagcggcgatcctccatgtggcagatcacgtgtttcttccacagctggcaagaccaggggtgcctaaagtgtgtatccttatcactgacggtaagtcgcaagatctggtcgataccgcagcacaaagattgaagggtcagggagtcaagctctttgcagtggggattaagaatgcggatccagaagaacttaagcgcgtggcaagccagccgacttcagatttcttctttttcgtgaacgatttttcaatcctgcgtactctgctgcctctggtgagcagaagggtgtgtaccaccgcaggaggagtgccggtgaccagacctccagatgattccacctcagccccaagagatctggtgctttccgaaccaagctcacagtctcttagggtgcagtggaccgcagccagcggtcccgtcaccggctacaaggtccaatacactcctttgactggccttggacaaccgctgcctagcgagcggcaggaggtgaacgtgccagcaggggaaacttccgtccgccttaggggcctccgacctctgaccgaataccaagtcacggtgatcgcactttacgcaaactcgatcggcgaggcggtgtcagggaccgctagaaccactgccctcgaaggaccagaacttacgattcaaaacaccactgcgcactccctgctggtggcttggaggtcagtgccaggcgccaccggctacagagtgacctggagagtcctttctggtggacctactcagcagcaagaattggggccaggtcaaggatccgtgctccttcgcgatttggagccaggtactgattacgaagtgaccgtctccactctctttggtcgctcagtgggtccagccacctctctcatggcaagaaccgacgcatcggtggaacaaaccttgcgtcctgtcatactgggtcctacctcgattctcctgtcgtggaatcttgtgcctgaggccagaggataccgccttgaatggcgtcgcgaaactggattggagcctccacaaaaggtcgtgctcccaagcgacgtgactaggtaccaactggacggtctgcagcctggaaccgaataccggctgactttgtataccctgctggagggtcatgaagtcgccacgcctgcgaccgtggtcccaaccggacccgagctgcccgtgtcaccagtgactgatctgcaggcgacggaacttccgggtcaacgagtgcgagtgtcttggagccccgtcccgggcgcaactcaatacaggatcatcgtgcgctccactcaaggagtggaacgtactctggtcctccctggatcgcagaccgctttcgatttggacgacgtgcaggccggactgtcctacacggtgcgcgtgtccgcacgggtgggaccccgtgaaggttcggcatcagtcctgaccgtccgacgtgaacccgaaaccccgctggccgtgcctggacttcgggtcgtcgtgtcggacgctactagagtgcgagtggcgtggggtcctgtccccggcgcttccggattccggatctcgtggtcaaccggctctggccccgaatcatcacagacgctgccaccagactccacggcaaccgatattaccgggttgcagccaggaaccacttaccaagtggctgtgagcgtgctgaggggtcgcgaggaaggacctgcggcagtgatcgttgcccgtactgacccactcggacctgtccgcactgtgcacgtgacgcaggcctcgtcatcctcggtgactataacttggacccgcgtcccgggagcaactggttaccgggtcagctggcattcagcgcatggtcctgagaagtcccaactggtgtctggagaagcgacggtcgcagaactggatggattggaacccgataccgaatataccgtccatgtccgggcccacgtggcaggagttgatggtcctccagcgtcggtggtggtgcgcactgcccctgaacccgtcggtcgcgtttcgcgactgcagattcttaatgctagctccgatgtgttgcggattacctgggttggtgtcacgggtgccactgcctaccgacttgcatggggtcggtcggagggaggcccgatgcgccatcaaattctgcctggaaatactgactcggcggagattcggggtctggaagggggtgtgtcctactcggtgagagttaccgcactcgtcggcgatcgtgaaggtactcctgtgtcgattgtggtgactactcctccagaggcaccacctgcactgggaaccctgcacgtggtgcaaagaggagaacattcgctcaggctccgctgggagcccgtgcccagagcgcaaggatttcttctgcattggcagccagaaggaggacaggaacaatcaagagtgcttggacctgaattgtcctcgtaccacctggacggcctcgagccagcgacccaatacagagtcaggctctcggtgcttggacctgcaggggagggcccctcagccgaggtgacggccaggacggaatcgccacgtgttccgtcaatcgaattgagagtcgtggatacctccatcgattccgtgacgcttgcctggacgcctgtgtcgagagcgagctcctatatcctctcgtggcgccctctgaggggcccaggacaagaagtgccggggagccctcagactctcccaggcatctcgtcctcccaaagagtgactggactcgaaccaggtgtgtcatacatctttagccttacccccgtcctggatggagtcagaggacctgaagcctccgtgactcagaccccggtctgtccaagaggcctggcagatgtggtgtttctcccgcatgcaacccaagataatgcgcatagagccgaagcaaccagacgggtccttgaacgccttgtgcttgctcttggacctctggggcctcaggcagtccaggtcggactcttgagctactcccacaggccctcgcctcttttcccccttaatggcagccatgatctgggaattatccttcagagaattagagatatgccttacatggatccatcaggaaacaaccttggaaccgcggtggtgacggcacatcggtacatgcttgcaccagatgcacccggccgtcggcagcatgtgcctggagtgatggtgctgttggtggatgaacctctccggggcgatatcttcagccccattagagaagcacaggcgtcgggacttaacgtcgtgatgctgggtatggcaggagcagaccctgagcagctgcgcagacttgcgcctggaatggacagcgtgcaaaccttttttgcagtcgatgatggaccaagccttgatcaggcagtgagcggtctggcaactgcgctgtgtcaagcatcattcactactcaacctaggccagaaccatgcccagtgtattgtcctaaaggtcagaaaggagagccaggagaaatgggcctgcgcgggcaggtggggcctccaggggatcctggcctgccaggacgaactggagcgcctggaccgcaaggtcctcctgggtcggcaacggcaaagggtgaacggggttttccgggcgcagatggccggcctgggtcgccaggacgagcagggaatccagggacccctggagcgccaggacttaaaggctcgcccggtctgccagggccccggggcgacccaggtgaaaggggaccccgcggtcctaagggagagccaggggcccctggacaggttatcgggggagagggacccgggctccctggacggaagggcgatcctggaccatcaggacctcctgggccgcgcggacctctgggagatccaggaccacggggaccacccggtttgccaggaactgccatgaagggtgataagggggatagaggcgaacgtggacccccaggacctggcgaaggtggtattgccccaggagagccaggccttcctgggcttcctggttcgcctggcccccagggacccgtggggcctccgggaaaaaagggagaaaaaggagactccgaagatggagcccctggactcccggggcagcccggcagtccgggggagcaaggaccgaggggccctccaggagcgataggaccgaagggcgacaggggatttcccggcccacttggtgaggcaggagaaaagggcgaacggggcccaccaggacccgcggggtcgagaggactgccaggagtggcaggtcgtccaggagcaaaggggccagaaggtcctcctggacctaccggccggcaaggtgaaaaaggtgaacccggacggcctggcgatccagccgtggtgggacccgcagtggcaggacccaagggagagaagggagacgtcggtcctgcaggaccaaggggcgccaccggagtccagggcgagcgcggacctcctggactggtgctgccaggagatccaggtccaaagggagatcccggagatagaggaccaattggactcaccggaagagctgggccccccggagactccgggcctccaggcgaaaagggcgatcctggtagacctgggccacccggtcccgtgggcccgcgtggtagagatggtgaagttggagagaagggagatgagggccctccaggagatccaggcctcccgggaaaggccggcgagagggggctccgcggtgccccaggagttcgcggacctgtgggtgagaagggagatcaaggggacccaggcgaggacggacgcaatggttcgccaggttcctcgggtcctaagggtgatcgaggcgaacccggtccaccaggtccgcccggacgtctcgtggataccggccctggagcccgggaaaagggagaaccaggcgatagaggacaggaaggacctcggggaccaaagggcgacccaggcctccccggagcgcctggtgaacgcggaattgaaggattccgaggtccccccggacctcagggagatccaggtgttcgaggccctgctggggaaaaaggagatagagggccaccaggcctggatggtaggtccggccttgatggaaaaccaggagctgcaggtccttccggtcccaacggcgccgcgggcaaggcaggcgatcctggccgcgacggtctgccagggctccggggagaacagggacttcctgggcccagcggaccccccggcctgccaggtaagcctggtgaagatggaaagccagggctcaacgggaagaacggagaacctggtgatcccggtgaagatggacgaaagggagaaaagggtgattcaggagcaagcggcagggagggccgtgatggtccaaagggagagcgcggcgccccaggaattcttgggccccagggcccgcccgggctgccagggccagtcggccccccaggacaaggctttcctggagtccctggagggaccgggccaaaaggggatcggggagaaaccggtagcaagggggaacaaggtttgcccggtgaaagaggtcttagaggagagccggggtccgtgccgaatgtggacagactcctcgaaaccgcaggaattaaggcaagcgcacttcgagaaatcgtagaaacttgggatgaatcttcgggaagtttcctgccggtcccggaacgccggcgcggtcctaagggggatagcggcgaacagggacctcctggaaaggagggccccataggtttccccggagaacgcggactgaaaggcgatcgcggggatcctggaccccaaggtcctcccggactggcactgggcgaacggggccctccgggtcccagcggactggcaggtgaaccagggaagcctggtatcccaggccttccaggacgcgcaggtggagtgggagaggcaggcaggccaggggaacggggggagcggggagaaaaaggtgagcgtggggaacaaggccgggacggacctcctggactgccaggcaccccaggaccgccgggtcctcctgggccaaaggtgtcagtggacgagccaggtcccggtctgtcgggtgagcagggtccaccgggactgaagggtgctaagggagaacctggatcaaacggtgaccaaggacccaagggagatcggggagtgcctgggattaaaggcgaccggggagaacctggaccacgcgggcaggatgggaacccaggtttgcctggggaaagaggcatggccggtccagaaggtaagcctggactccaaggaccccgaggaccacctggccctgtcggggggcatggtgaccccggaccgcctggtgctcccggtcttgccggccctgcaggtccacaaggaccttcaggactgaagggagagccgggcgagactggtcctcccggccggggtcttaccggtccaaccggagcagtgggacttcccggtccgccgggaccttcgggactggtcggcccgcaaggttcccctggacttccgggtcaagtgggagaaaccgggaagccaggcgcacccggcagagatggcgcatcgggaaaggatggagacagggggtcgcccggagtcccaggatcacctggcctgcccggccctgtgggaccaaaaggagaaccaggtccaaccggagcccccggtcaggccgtggttggcctgcccggagcaaaaggtgaaaagggcgcacctggaggactggctggggacttggttggcgaacctggcgcgaagggtgatagaggtctgcctgggccgcgaggcgaaaagggcgaggcgggacgggcaggagaaccgggagatcccggtgaagatggtcaaaagggtgccccagggcctaagggttttaagggtgacccgggtgtgggcgtgcctggctcgccagggcctcctggacctcctggagtgaagggcgacctcggacttcccgggctgccaggagcccccggtgtggtgggattccccggtcaaactgggcctcgcggagagatgggtcagcccggcccatccggtgagcgcggtcttgcaggacctccaggcagagaaggaattccggggccactgggacctcctggaccgccaggatccgtgggcccccctggggcatcgggacttaaaggggacaagggcgacccgggagtggggttgccaggtccacgtggtgaacgaggagaaccaggtattagaggggaggacggaaggccaggtcaagaaggacccagagggctgactggtcctccggggtccaggggggaacgaggagagaaaggagatgtgggttcggcaggtcttaagggtgataagggagattccgcggtgattctgggaccccctggaccacggggggccaagggagacatgggtgaacgtggtcctagaggactggacggagataaagggcctcgcggagacaacggtgatcctggcgacaagggctcgaagggagaaccaggtgataaaggctcagcagggctccctggccttcgaggtttgttgggaccacaaggtcagcctggagcagccggcattcctggtgatcccggaagcccgggaaaggatggtgtccctggaatccgaggtgaaaagggagatgtgggcttcatgggtcccagaggactgaagggtgaacgcggggtgaagggagcgtgcgggctggatggagagaaaggagacaaaggtgaagcaggtcctcccgggcgcccaggattggcaggtcataagggggaaatgggcgaacctggtgtgcccggccagtcgggcgcccctggtaaggaggggctgattggacctaagggcgaccggggtttcgacggccagcccggacccaagggagatcagggtgagaaaggagaacggggtaccccaggtatcgggggctttcccggccctagcggcaacgatggtagcgcaggccctcctggtccccctggctccgtgggtccacgtggacccgaaggactgcaaggccaaaagggggagagaggccctccgggggagagagtggtcggagcacctggtgtgcccggagcacctggagaacggggggagcaaggaaggccagggcctgcaggaccccggggtgaaaagggagaggcagcgctcactgaagatgacattcgcggattcgtgcgacaggagatgtcacaacattgtgcatgtcagggacaattcatagcctcaggtagccggccacttcctagctatgcagccgataccgcgggttcacagctgcatgccgtccctgtacttcgggtgtcccacgcggaagaagaagaaagagttccccccgaggacgatgaatacagcgaatattcggaatactccgtcgaggagtaccaagatccagaagcgccatgggactcagatgatccgtgttcactgcctcttgatgaaggatcatgtaccgcctacactttgagatggtaccatagagcagttactggttcgaccgaggcatgccaccctttcgtgtacggtgggtgcgggggaaatgcaaatagattcggaacgcgggaagcatgtgagcggcggtgtccccctagagtggttcaatcacagggcactggaactgcgcaggac

SEQ ID NO: 1467 - DNA, 8832 bp, Artificial Sequence
  derived and/or modified sequence
atgacccttcgcctgttagtcgccgcgctgtgcgccggtatccttgccgaggcaccgcgtgtccgagcgcaacaccgcgagcgagttacgtgcacccggttgtacgcagctgacattgtgtttttattggatggcagctcttccatcggtcgtagcaactttcgcgaggtacgtagcttcctggaggggttggtcctgcctttttcgggtgcagcgagcgcccagggcgtgcgcttcgctaccgtccaatacagcgacgacccgcgcactgagtttggcctggacgccctgggctcaggcggtgatgtgattcgcgcgatccgcgagctctcttataaggggggcaatactcgaactggggcggccattctgcatgtggccgaccatgtgttcttgcctcagctggcgcgcccgggcgtgcctaaagtctgcattcttatcaccgatggtaaaagtcaggacctggtcgatactgcggcccagaggctgaagggtcagggcgtgaaattgtttgcagtggggattaagaatgcggacccggaggaacttaagcgcgtggccagccaacctacgagcgactttttctttttcgtcaatgacttcagcattctgcgtactcttctgcctctggtgtcacgcagggtctgcaccaccgcagggggcgtgcccgttacccgtccacctgatgatagcaccagcgctcctagggacctggtccttagtgaacctagcagtcagagtctgcgagtgcagtggaccgccgctagcggccccgtgaccggctacaaggtgcagtacacgccgctgacgggcctggggcagccactgccaagcgagagacaagaggtgaatgttccggccggggagacgagcgttaggcttcgtggcctgcgcccgttgacggagtatcaggtgactgtgattgccctgtatgccaattccatcggcgaagcggtgagcggcactgctcgcacgactgctctggagggcccagagctcaccattcagaacaccaccgcgcactccctgctcgtggcatggcgctctgtgccgggcgccactggttatcgcgttacttggcgggtactgtccggaggcccaacccagcagcaggagctcggtccgggtcagggtagcgttttgttacgcgacctggagcccggcaccgattacgaggtcaccgtttctacactcttcgggcggagcgttggtccggccacctcgctcatggcacgcacagacgccagcgttgaacagaccctcaggccggtcatcctgggcccaacctctattctgctgagctggaatctggttccagaagcgcgcggttatcgcctggaatggcgccgagagactggtctggagccgcctcagaaggtggtgctgccctctgacgtcacccggtatcaactggatggtctgcagccaggtaccgagtatcgactgaccctgtacaccctgctggaaggtcacgaagttgcaacccctgcgactgttgtgcctacggggccggaactgccggtcagccccgtgacggatctgcaggccaccgaactgccgggccagagggtgcgtgtgagctggagccctgtaccaggtgcgacccagtacaggattattgtgcgttccacacagggcgtggagaggaccctggtgctgccggggagccagacggcgttcgacctggacgacgttcaagcgggattgtcttatacggtccgtgttagcgctcgggtgggcccgcgcgagggttcagccagcgttctgaccgtaaggcgggagcctgagacccctttggccgttccagggctgcgggtggtagtgagcgatgcgacccgagtcagggtagcttggggcccggtgcctggcgcgtcgggcttccgcatttcatggtcaaccggttctggaccggagagcagccagaccctcccacctgattccactgccacggacattacgggtctgcagccgggcactacttatcaggttgcggtgtcagtgctgcgaggtagagaagagggccctgccgctgttattgtggcacgcacagacccgcttggcccggtgcgtaccgtccatgtgacccaagcatccagcagcagcgtgaccataacttggactcgtgtcccgggtgcaactggctaccgcgtgtcatggcacagcgcacacggacccgagaagtcacagctggttagcggagaggcaaccgtcgcagaattggatggactggaacctgatacggaatataccgtgcatgtgcgggctcacgtggccggggttgacggtccaccggcgagcgttgtggttcgtacagctccagagccggttgggagggtgtcccgcctgcaaattctgaatgcatcttccgacgtgctgcgcattacctgggtcggtgtgacaggtgcaactgcatatcgcttggcatggggtcgcagcgagggtggtcctatgcggcaccaaattctgcctggaaacaccgatagcgcagagattcgcggcctggaaggtggtgtgagctactcagtgcgcgtgaccgcattggtgggcgatagagagggaaccccagttagcatcgtcgttacaacccccccggaggcgcctcctgcgctaggtaccctgcacgtggtccaacggggagaacacagcctgaggctgcgttgggagccggtgccacgcgcccagggcttcctccttcactggcaaccagaaggtgggcaggagcaaagccgcgttctgggcccagagctgagctcctatcatttggatggtctggaacctgctacgcagtaccgcgtgcgcctgagcgtgcttggtccagccggagaggggccatccgcagaagtaaccgcgcgaaccgagtccccgcgtgtccctagcattgagctccgtgtggtcgatacatctattgacagcgtgaccttggcatggacgcccgttagccgagctagctcttacattttgagctggcgcccgctgcggggcccaggtcaagaggtgccggggtcaccacagaccctgccgggaatcagctctagccaacgtgtgacgggtctggagccgggtgtcagctacatctttagcctgaccccggtcctagatggcgtacgcggaccggaggcaagcgttacccaaacccctgtttgtccgcgaggcctggcagacgtagtttttctcccacacgctacgcaggataatgcgcaccgcgcggaagcgacccgccgagtcctggagcgtctggtgctagcgctggggcctctgggcccacaggcggtgcaagtgggtctgctgagctatagccatcgcccctcaccgctgttcccactaaatggtagccacgatctgggtattattttgcaacgcatccgcgatatgccgtatatggatccgagcggcaataatctgggaaccgccgtggtgaccgctcaccggtatatgttggctccggacgcgccaggtcgacgccagcatgttccgggcgtgatggtgctgcttgttgacgaaccgctgcgaggagacattttttccccgatcagggaagcacaggcttcaggcctgaacgtcgtcatgttgggtatggctggagcggaccccgaacaactccgtcgcttggcaccgggtatggacagcgttcagacgttcttcgcggtggacgatggacctagcctggaccaggctgttagcggccttgcgaccgctttgtgtcaggccagcttcactacccaaccacgaccggaaccttgcccggtctactgtccaaagggtcagaagggtgagccgggcgagatgggtctgcgcgggcaggttgggccgccgggggatccgggtctgccgggtcgcaccggcgcccccggtccgcaaggcccaccgggaagcgccaccgccaaaggtgagcgcggcttcccgggcgccgacgggcgcccaggcagccctggccgcgctggtaatccaggtactcctggtgctcctggcctgaaaggcagccccggcctgcctggccctcgaggagacccgggtgaacgcggtccgcgtgggccaaaaggggaaccgggagcccctgggcaagtcatcggcggcgagggaccgggtctgccgggccgcaagggcgaccccgggcccagcggaccgccaggtcctagaggccctctcggtgacccaggccctcgcggcccgccaggtctgcctgggaccgccatgaaaggtgacaagggcgaccgtggagaacgcgggccgcctggtccaggcgaaggtggcatcgccccgggtgagccagggctgccaggcctccccggtagtcctggcccacagggtccagtaggcccccctggaaagaaaggcgagaagggcgactctgaggacggcgctcccggtctgcccggccaaccgggcagcccaggggaacaggggccaaggggtcctccaggcgcaataggaccgaagggagatcgcggtttccccggcccactgggcgaagctggagagaagggcgaaaggggtccaccaggaccagcgggatctcgcgggctcccgggcgttgcagggcgccctggggccaaagggcctgagggcccaccgggtccaaccggacgccagggcgagaagggagaaccaggccgccctggggaccctgcagtggtgggtcccgcggtggcaggacctaagggcgaaaagggtgacgtggggcctgcgggccctcgcggggcaaccggggtgcaaggtgaacgcggcccaccgggtctggtcctgcccggcgacccgggaccaaaaggtgatccgggtgatagaggacctatcggactcaccgggcgggccggtccaccaggagattcaggccccccgggtgagaaaggtgacccgggtcggccgggtccacccggtccagttggtccgcgtggccgtgacggtgaggttggtgaaaagggggatgaaggtccaccgggtgaccctggtctcccgggtaaagccggcgaaagaggtctgcgtggcgcaccgggcgtccgcggtcctgttggtgagaaaggcgaccaaggagatcctggcgaggacggtagaaatggtagccctggtagttccggccccaaaggggatcgcggggagccagggcctccgggtcccccgggacgcctggttgacacgggcccaggtgcccgagagaaaggtgagccaggggaccgcggccaggaaggtccacgaggcccaaagggtgatcctggtttgccgggtgcacctggcgaacgcgggatcgagggttttcgcggcccgccgggtcctcaaggcgacccaggcgttcgcggcccagcgggtgagaagggtgatcgcggcccaccaggtctggacggccgctctggcctggatggtaagcccggcgcggcgggcccaagcggtccgaatggcgcagcaggcaaagcaggggacccgggccgtgacggcctgccgggattaaggggcgagcaaggcctgcctggtccctctggtccaccaggactgccagggaagccgggcgaagatgggaaaccaggcctgaatggcaaaaatggcgagcccggtgatcctggcgaagacggtcgaaagggggagaagggcgattccggggcaagtggccgtgaagggcgtgacggccctaagggtgagcgcggcgcgccaggtatcttgggccctcagggtcccccgggtctgccgggtccagtcggtccccctggccaaggctttcccggtgttcctggtgggaccggtccaaagggagaccgcggtgagaccggttcgaagggcgaacagggcttgccaggggaacgcggcttgcgtggcgagccgggtagcgtcccaaacgtggataggctgctggaaacagcaggtatcaaggcgagcgcactccgcgagattgtggagacttgggacgagtcttctggtagcttcctgccagtgccagaacggcgccgaggcccaaagggtgacagcggcgagcagggaccaccgggaaaagagggtccgataggttttccaggtgaacgcggtctgaaaggtgaccgtggtgacccagggccacagggtccaccaggcctagccctcggggagagaggcccaccgggcccaagcgggctcgccggtgagccaggtaagcctggcatccctggtctcccaggccgtgccggcggcgtgggtgaggctggccgcccaggtgaaaggggcgagagaggggaaaagggcgaaagaggtgagcaaggcagagatgggcctcctggtttaccgggtacacctggcccgccgggtcctcctggtcctaaagtgtccgtggatgagccagggcctggactgagcggggagcagggaccccctggcctgaaaggtgctaaaggtgaaccgggcagcaatggcgatcaaggaccgaaaggtgaccggggagtcccaggaatcaaaggtgacaggggtgaaccgggcccgcgcggtcaggacggtaacccaggtctgccaggagagcgcggcatggctggcccggagggcaaaccaggactgcagggtccgcgtgggcctccgggcccggtgggtggtcacggtgatccgggcccccctggagctccggggctggcgggcccagcgggccctcaagggccgtctggcctgaagggtgagccgggagagaccgggccaccaggccgcgggctgaccggccccaccggtgcggtgggtttgccaggacctccaggcccaagtggtctggtcggtccacaaggtagtccaggcctccccggccaggtgggtgagacgggcaaacctggtgcgcccggtagagacggagcttccggtaaagatggcgacaggggctctcctggggtgcccggctcaccagggctgccgggtccagttggtccgaaaggagaacctggtccgactggagcaccaggccaggcggtggtcggtttaccgggagcgaagggcgaaaaaggtgcaccaggcggcctggcaggcgacctggttggtgaaccaggtgccaaaggggacagaggcctgcccgggccgcgaggggaaaagggtgaggcgggcagggccggtgagccgggggatcctggagaagatggtcagaaaggcgcccctggtccaaaaggatttaagggggatccgggtgtgggcgtcccaggcagccctggccctccgggtccgcctggagtcaaaggagatctgggtctgccgggcctcccaggcgcccctggagttgtgggctttccgggccagactggccctcgtggcgagatgggccagccgggcccatcaggcgaacgcggactagcaggccctccaggtcgtgagggcatcccaggaccactgggcccaccaggacctcccggttcagtgggaccaccaggtgcatccggactaaagggcgacaaaggtgatccaggagtggggctgccaggcccgcggggcgagcgtggcgagccgggcatccgcggtgaagacggtcgaccgggccaggagggtcctcggggtctgactggtcccccaggtagccgcggcgaacgcggagagaagggtgacgtaggcagtgccggcctcaaaggtgataaaggagacagtgccgtgattctgggaccgcctggtccgagaggcgcgaagggtgacatgggtgaacgcggcccacgtggacttgacggcgataagggtccacggggcgacaatggtgaccctggtgataagggaagcaagggtgaacctggagacaagggtagcgctggtcttccgggcctgagaggtctgctgggtccgcaaggccagccgggagcagcggggatcccaggcgaccctggctccccgggaaaggatggcgtgccgggtatacggggcgagaaaggagacgtgggatttatgggccccagaggtctgaagggcgaacgcggcgtgaagggtgcgtgcgggcttgatggtgagaaaggtgacaaaggcgaagccggcccaccgggccgtccgggtttggctgggcacaaaggcgaaatgggtgaaccgggcgtccctggtcagtcaggagcaccaggtaaagagggtctcattgggccgaagggtgatcgcggttttgacggtcagcctgggcctaaaggcgatcaaggcgagaaaggtgagcgcggcaccccggggatcggtggctttcctggtccgagtgggaacgatggcagcgctgggcctccaggtccacctggtagcgttggtccccgcggcccagaaggtctgcagggccagaaaggtgagcgcggccctccgggcgagcgcgtggtgggcgccccaggggttccaggtgcgccgggcgagcgcggtgaacagggacgcccaggcccagctggcccacgcggcgaaaagggcgaagcagcgctgaccgaagatgatatccggggttttgtgcggcaagagatgagccaacattgtgcgtgccagggccagttcatcgcaagcgggtcacgccctctgccatcctacgcggcggatacggcagggtcgcagctgcacgcagtgccagtcctgagggtgtcacacgccgaggaggaggaacgggtcccaccagaagatgatgaatactcggagtatagcgagtacagcgtcgaagagtaccaggatccggaggcgccatgggacagcgacgatccttgcagcctgccattggacgagggcagctgcaccgcgtacactctgcgatggtaccaccgagcagtgacgggcagcacggaagcatgccacccttttgtctacggtggctgtggcggcaacgcaaaccggttcggtactcgcgaagcttgcgaacgccgctgcccacccagagttgtgcagtctcaggggaccggaaccgcccaggat

SEQ ID NO: 1468 - DNA, 8832 bp, Artificial Sequence
  derived and/or modified sequence
atgactctgcgcctcttggtggctgccctgtgcgcaggaatcttggccgaagctccgcgcgtgcgggcccaacacagggaacgggtgacctgtacccgcctgtacgccgcagacatcgtctttctgttggacggttcgagctcgatcggaagatcgaacttccgcgaagtgcgctcgtttcttgaggggctggtgctcccattctcgggagctgcctccgcccaaggagtgcgctttgccaccgtccaatattcggacgacccgcgaactgagttcggattggacgcactcggaagtggaggcgacgttattcgcgcgatccgcgagctcagctataaggggggcaatacccgcaccggcgccgctattctgcatgtggccgaccacgtgtttctgccgcaactggcacgacctggcgttccgaaggtgtgtatcctgattaccgacggaaagagccaggatctggtcgataccgccgcgcaaagactgaagggacagggtgtcaagctgttcgccgtgggaatcaagaacgccgacccagaagaattgaaacgggtggcttcccagccgacgtccgacttctttttctttgtgaacgatttctccatactgagaacgctcctgccgctcgtctcacggcgcgtgtgtactacggcgggaggagtcccggtcacccggccgccggacgactcaacttcagcaccgcgcgatctcgtcctgtccgaaccatcgtcgcagagcttgcgggtccagtggactgcggcgtccggaccggtgactggctacaaggtccaatacacccctctcaccggactcgggcaacctctgccgtcggaaagacaggaggtgaatgtgccggcaggagagacttccgtgcggcttaggggtctgcggccgctgaccgaataccaggtgactgtgatcgcgctgtacgccaatagcatcggagaagcggtgagcggaactgctcgcactaccgccctggaaggccccgagctgactatccaaaatactaccgctcatagcctgctcgtggcatggcgctccgtgccaggcgcaaccgggtaccgcgtgacctggcgcgtgctttctggaggacctactcagcagcaagagctgggccctggacagggatccgtgctgctccgggatctcgagccgggtactgactatgaagtgaccgtgtccactctcttcggtagatcagtgggaccggccacctccctcatggcgcggaccgacgcaagcgtggaacagaccctgaggccagtcatactcggcccaacttcgatcctgctgtcctggaatctcgtgccagaggcccgcggatacaggctggagtggagacgcgagactggtcttgaacctcctcagaaggtggtactgccatcagatgtcacccgctaccagctggacggactccaaccgggcaccgaataccgcctgacgctgtacacccttctggagggccacgaggtggcgactcccgcaacggtggtccctactggaccggaactgccggtcagcccggtgaccgaccttcaggccactgaactcccgggccaacgtgtgcgcgtgtcatggtccccggtgccgggagccactcaataccgcatcatcgtgcggtccacgcaaggagtcgaacggaccctggttctgcctggaagccaaactgcctttgacttggacgacgtccaggccggtctgtcatacactgtcagagtatcggcccgcgtgggaccgcgcgagggatcagctagcgtgcttactgtccgcagagaaccagaaacgccactcgccgtgccaggattgcgggtggtcgtctctgacgcaaccagagtccgggtggcttggggaccagtgcccggagcatcgggattcaggatcagttggtcgaccgggtctggacctgaatcgtcccagactttgccaccagattcgactgcgaccgacatcaccggccttcagccaggaaccacctaccaggtggcagtctctgtgctccgcggccgtgaagagggcccggcagccgtcattgtggcccggaccgaccctctggggccggtccgcaccgtccacgttacccaggcttcctccagctccgttactatcacctggacgcgggtccctggtgccaccggttaccgcgtcagctggcattcggcgcacggacctgagaagtcccagctggtgtcaggggaagccaccgtggccgagctggatggcctggaaccagacaccgaatacactgtgcatgttagggcacatgtggccggagtggacggaccgccggcgtcggtggtcgttagaaccgccccggaaccggtaggaagggtatcgagactgcagatccttaacgctagctcagatgtccttcggatcacgtgggtcggagtgacgggagctacggcctacagactcgcgtggggcagatcggaaggtgggccgatgcggcaccagatcctgcctggcaacactgatagtgccgagatccggggtctggagggtggtgtgtcctactcagtccgggtgactgcgctggtgggagacagagaaggaaccccagtctcaatcgtggtgactactcctccggaggcgccaccagctctgggaaccctgcatgttgtgcaacgcggggaacactcgctccgactgcggtgggagcctgtccctcgggctcagggatttcttttgcactggcaacctgagggcggacaggagcagtcgcgggtcctcggacctgaactgagctcgtaccacctggacggcctcgaaccggccacccaataccgagtgcgcctttcggtgctcggtccggcgggagaaggaccgtccgcagaggtgactgccaggacggaatccccgcgggtgccgtccatcgagctgcgcgtggtggacacttcgatcgactccgtgactctggcctggaccccagtctcgcgcgcctcatcctacatcctctcctggcgtcctctgcgcggccccggtcaggaggtgccgggaagcccccaaactctgccgggaatttcgtcaagtcagcgcgttactgggctcgaacctggtgtcagttacattttctccctcacgccggttctggatggggtgcgcgggcccgaagccagcgtcacccagacccccgtgtgcccgcggggactggccgacgtcgtgttcctcccgcatgccacccaagacaacgcgcacagagcggaggccacccgccgcgtcctggaacggctggtgttggcgctggggccgctcggaccgcaagccgtgcaggtcgggttgctgtcctactcgcaccgcccctccccgctcttcccgctcaacggatcccacgacctgggcattattctgcagcgcatccgcgacatgccgtacatggacccgagcggcaacaacctcggtactgcagtggtgactgctcatagatacatgctggccccggatgctcctggacgacgacagcatgtgccgggagtcatggtgttgctggtggacgagccgctgagaggagacatcttctcaccgatcagagaagcgcaagcctcgggactgaatgtggtgatgctcgggatggccggagccgacccagagcagctcagacggctggcgcccggcatggactccgttcagactttctttgccgtggacgacggaccatcactcgaccaggccgtgtcaggcctggctaccgctctttgccaagcgtcgttcaccacccagccgcggccggagccgtgccctgtctactgcccgaagggacagaaaggagaaccaggagagatgggacttagaggacaagtgggcccgccgggtgaccccggacttcctggaagaactggagcgccggggccacagggcccgccaggcagcgcgaccgctaaaggcgaacgcggattcccaggagcagatggaaggcctgggagcccaggcagagcaggaaatccgggaaccccgggcgcacccgggctcaagggctcgcctggactgccaggcccaagaggggaccctggagaaagggggcctcgcggcccaaagggagaacctggggcccctggacaggtgatcggaggagaaggtcctggactcccaggcaggaagggagatccaggaccgagcggtcccccgggcccacgcggaccgctgggtgaccctggacccaggggcccgcctgggttgccgggaactgctatgaaaggagataagggggaccggggagaacgcggaccgccggggcctggagaaggaggcatcgccccgggcgaacccggacttccaggactcccgggttctccgggaccgcaagggccggtcggaccccctgggaagaaaggcgaaaagggtgactctgaggatggtgcgccgggcttgcctggacagccaggatctcctggtgaacaaggaccgcgtggaccacctggagccatcggccctaagggcgaccgcgggttcccaggacccctgggggaagctggcgagaaaggagagcgcggtccccccggccccgctggatcgagaggcttgccgggcgtcgcgggtagaccgggcgcgaagggaccggagggacctccaggccctactggtagacaaggagagaagggcgagcctggtagacctggcgacccagcagtggtgggtcccgccgtcgccggtccgaagggagagaagggggacgtcggaccggcgggaccgcggggcgctactggggtgcagggcgaacggggcccacccggtcttgtccttccaggcgatccggggccgaagggggacccaggtgaccgggggccaatcggcctgactggccgggctggcccgcccggagacagcggaccgcctggggagaagggcgatccgggcagaccgggaccacccggaccagtgggacctcgcggccgggatggcgaagtgggagaaaaaggcgacgaaggtccaccaggtgatccgggcctccctggaaaggccggagaacgcgggctgagaggcgcacccggagttcgcggcccagtgggcgaaaagggagatcaaggtgacccaggagaggacggacgaaacggaagcccgggctcttcaggtcccaagggtgatcggggggagcctggaccccctggaccgcccggtcgcctggtggatactggcccaggagcgcgggaaaaaggtgagccgggcgaccggggccaggaaggacccagggggcctaagggtgacccgggtctgccgggcgcccctggtgaacgaggtatcgagggattcaggggaccgccgggacctcaaggagatccgggtgtgcgcggacccgcaggggaaaaaggagatcgcggtccaccaggactggatggtagatcgggactcgacggcaagccgggcgccgcgggaccgtcgggaccgaacggtgccgccggaaaggctggagatcctgggcgagatgggctgcccgggctccgaggtgagcaaggtctgcctgggccatcgggacctccggggctgccggggaaaccgggcgaagatggcaagccaggacttaacggaaagaatggagaaccgggagatccgggagaagatggacgcaaaggagaaaagggcgattcgggagcgtcaggacgggagggccgcgacgggccaaaaggagagaggggtgccccggggatcctgggaccccaaggccctccagggctcccggggccggtgggacccccaggacagggattcccgggtgtgccaggagggacgggtccaaagggggatcgcggagaaactggctccaagggagagcagggtctgcccggggagaggggactgcgcggcgaaccgggaagcgtgccaaatgtggatcgcctgctggaaaccgccggaatcaaggcttcagccctgcgggagatcgtcgaaacctgggacgaatcatccggatcattcctccccgtgccggagcgcagacggggaccgaagggagacagcggcgagcaagggcctccggggaaggaaggaccgatcggtttcccaggcgagcgcggattgaagggcgataggggcgacccggggcctcaaggacctccaggactcgcccttggagaacgggggccccccggcccttccggactcgccggtgagcccggaaagcccggaatccctggcctgcctggaagagccggaggagttggagaagctggacggcccggggagcgtggagagaggggggagaagggtgagagaggggaacagggcagagacgggccccctggattgcctgggacccccggaccaccgggtcccccaggccctaaagtgagcgtggacgaaccgggtccgggactgtcgggcgaacagggcccacctggactcaagggcgctaagggtgaaccaggcagcaatggagatcagggaccaaagggtgatagaggggtgccggggattaaaggagacagaggtgaacctggccctcgggggcaagacggaaacccggggttgccaggagaacggggcatggctggaccagagggaaagccaggtctgcagggtcctcggggtcctccgggccctgtcggaggacatggggatccaggtccgcctggtgccccaggcctggcgggaccagcaggcccccaaggaccatcgggactgaagggtgaaccgggtgaaactggccctccggggagaggactgaccgggccgaccggcgcggtgggacttccgggtccaccgggcccctctggcttggtggggcctcaggggtcgccggggctgcccggccaagtgggggagactgggaagcccggagccccgggacgggacggggcgtcgggaaaagatggcgacaggggatcgcccggggtcccgggtagccccggcctcccaggaccagtggggccaaaaggcgaacctggcccaacgggagcgccaggacaggcagtggttggactgcctggggccaaaggggagaagggggccccgggagggctggcgggagatttggtaggcgaaccaggtgccaagggagatcgcggacttcccggcccacgaggtgaaaagggagaggcgggacgagcaggagagcccggagatcccggggaggatggacagaaaggcgctccgggacctaaaggtttcaaaggcgaccctggcgtaggagtccctggttccccaggaccgccgggtccgcccggggtgaagggggatctggggcttcctggtctgcctggcgcaccgggggtggtcggttttcccggacagacgggaccgagaggcgaaatgggccagccggggccatccggagagcgtggactcgcagggccgccgggtcgcgaaggaatcccgggaccgctgggaccgccaggaccaccgggctcagtgggcccaccgggagcatcaggcttgaagggagacaaaggcgatccaggcgtcggcctgccgggcccgagaggggaacgtggggagccaggaatccgcggggaggacggcagaccgggtcaggagggcccgcgcggattgaccggacccccggggagccgcggcgaaagaggagagaaaggagacgtgggttccgcgggcctgaaaggggacaagggtgactcggccgttatcctcggtccaccgggtccaaggggagcaaagggagacatgggagagcgaggaccacggggtctggacggggataagggtcccagaggcgataacggggaccctggtgataagggatcaaagggggaaccgggcgacaaaggaagcgcgggactgccggggctgcgtggtctgctgggtccacaaggccagcccggggcggccgggatccctggtgacccaggtagccccggaaaggatggcgtcccggggatccgaggcgagaagggagacgtcggcttcatgggtccgcgtggcctcaaaggtgagcggggcgtgaagggagcatgcggactcgacggtgaaaagggcgacaagggggaagccgggcctccaggacggcctggcctcgctggacacaagggtgagatgggcgagccgggcgtgccaggacaatcaggggcgccgggcaaagagggactcatcggcccaaaaggcgatcgggggttcgatgggcagccgggaccgaaaggtgatcagggggaaaagggtgaacgcgggactccgggtattggaggatttcccggcccatccggcaacgatggttcagcaggcccaccaggcccgccggggtccgtgggacctcggggaccagaaggactgcagggccagaagggagaaagaggacccccgggcgagcgggtggtcggagcacctggtgttccaggagccccaggagaacgaggtgagcagggtagacctggacctgccggccctaggggtgaaaaaggagaagcagcactcaccgaggatgacattagagggttcgtgcggcaggaaatgtcgcagcactgcgcctgccagggccagttcatcgccagcggatcgcggccgttgccgagctacgcagctgacaccgctggctcgcagctgcacgcggtgccagtgctccgggtgtcccatgctgaggaagaagaacgggtgcctccagaggatgacgaatattctgagtactccgaatacagcgtggaagagtaccaggatcccgaggcgccatgggattcagacgacccatgctctctcccactcgacgaaggatcctgcaccgcctacacgctgcggtggtaccacagggcggtcaccgggagcactgaggcatgtcaccccttcgtgtacggaggatgtgggggaaacgccaaccggttcggaacgcgggaggcatgcgaaagaagatgcccgcccagagtcgtccagtcccaaggaaccgggactgcgcaggat

SEQ ID NO: 1469 - DNA, 8832 bp, Artificial Sequence
  derived and/or modified sequence
atgacgctgaggctcctggtggctgccctctgcgccggcattctggccgaagcgccgcgcgtgcgcgcccagcaccgggagcgcgtcacctgcactcgcctgtacgccgcagatattgtctttctgctggacggttcctccagcatcggacggtctaactttcgcgaagtgagatcgttcctcgagggtctggtgctgccattctccggagccgcatccgcccaaggagtgcgattcgcaactgtccaatactcagacgacccgcgcactgagttcggactggacgccctgggatcgggcggagacgtgatccgggccatccgcgaactgagctacaagggaggaaacactcggactggcgcggctatcctccacgtcgcagatcatgtgtttttgccgcagctcgctagacctggagtcccaaaggtgtgcatcctgatcaccgatggaaagtcccaagatctggtggataccgcggcgcagcgcctgaagggtcagggagttaagctcttcgcggtgggaatcaagaacgcggaccctgaggagctgaagcgcgtcgcgtcgcaaccgaccagcgatttcttctttttcgtgaacgatttctcaatcctccggactttgctgccgctggtgtcccggcgggtctgcaccactgctggaggtgtgccggtgactcgaccgccggacgactcgaccagcgcgccccgggacctggtgctctcagaaccttcctcgcaaagtctgagggtgcagtggaccgccgcatcggggccggtgaccgggtacaaggtgcagtacaccccgctcactggtttgggccagcccctgccgtccgaacggcaagaagtgaacgtcccagctggagaaacctccgttagactgcgcggactccgcccactgaccgaataccaggtaaccgtgattgcgctgtacgccaacagcatcggcgaggccgtctccggcactgcgaggactaccgccctggaaggcccagaactgaccattcagaacaccactgcccacagcctcttggtcgcttggagatcggtccctggcgccactggatacagagtgacctggcgggtgctctctgggggacctactcaacaacaagaactcggaccgggccagggttccgtgctgctgcgcgacctcgaaccggggacggactacgaagttactgtctcgacccttttcggcaggagcgtgggacctgcaacgtcactgatggccagaacggatgcgtccgtggaacagaccctccggccggtcatcctgggccccacctccatcttgctcagctggaacctcgttcccgaggcacgcggatacagactggagtggaggcgggaaaccggccttgaacctccacagaaggtggtcctgccgagtgacgtgacgagatatcaactggacgggctgcagccggggaccgaataccgcctcaccctgtacactctgctggaaggacatgaagtcgcgacccctgcaactgtggtgccgactggcccagaattgcctgtaagcccagtcactgacttgcaggctaccgaactgcccggacagcgggtgcgggtcagctggtcaccggtgccaggggccacgcagtaccgcattattgtgagatccactcagggagtggaacgcactctcgtgctgcctgggtcccagactgcattcgacctcgatgacgtgcaggccggattgagctacaccgtgagagtgagcgcaagagtgggcccgcgggaaggatcggcctcggtgcttaccgtgcgtcgcgaaccagaaactccgcttgcagtccctggcctccgggtcgtcgtgtccgacgccacgagggtgcgggtggcttgggggccggtgcccggggcgagcggattccggatctcctggtcaaccgggtcgggcccggagtccagccagactctcccgccggactcgactgctactgacatcaccggactgcaaccgggaaccacctaccaggtggcggtgtcggtgctcagaggacgcgaggagggccctgctgccgtcatcgtcgcacggacggatcctctgggaccggtgaggaccgtgcacgttacccaagcctcatcatcatcggtgaccatcacctggactcgggtgcccggtgccactggctatcgggtgagctggcactccgctcatggcccggagaagtcgcagctggtcagcggagaggctacggtcgccgagctggatggcctggagccggacactgagtacaccgtgcacgtcagagcacatgtcgcaggcgtggatggaccacctgcttctgtggtggtgcggaccgctcccgagccggtcgggagagtgtcacgcctgcagatcctgaatgcttcgtccgatgtgttgaggattacctgggtgggcgtgaccggggccactgcttaccggctcgcatggggcaggtcggagggaggcccaatgaggcaccaaatcctgcctgggaataccgatagcgccgaaatccgcggtctggagggaggtgtctcgtatagcgtccgcgtcaccgcgcttgtgggagatagagagggaaccccagtgtcgatagtcgttactaccccaccggaagccccgccggcgcttggaaccctgcacgtggtccagcgcggagaacactcgctgcgcctcaggtgggagccggttccgagagcccaaggattcctgctgcattggcagcctgagggaggacaggaacagtcacgggtgctgggcccggaactgtcgtcgtaccatttggacggactggaaccggcaacccagtatagagtgcgcttgagcgtgttggggccggctggcgagggaccctcggcggaggtcacggctcgcaccgaatcccctcgagtgccgtccatcgagctccgcgtggtggacacgtccattgactcagttaccctggcgtggacccccgtctccagagcgtcgagctacatcctgtcatggcgccccctcagaggcccaggacaagaggtcccaggaagccctcaaaccctcccgggcatctcctcgagccagcgggtgaccgggctggagcctggtgtctcctacatcttctctctgactcctgtgctggacggagtgagggggccggaggcgtcggtgacccagaccccggtctgtcctaggggattggctgacgtggtgttcctcccgcacgccacgcaggacaacgcccatagagcagaggccaccaggcgcgtcctggaacggctggtgctggcactcggcccgctcggaccacaggcggtgcaagtgggacttctgtcctacagccaccggccgtcgcctctctttccgcttaacggaagtcacgacctcggaatcattctgcagcgcattagagatatgccgtacatggacccgtcaggaaacaacctcggtaccgccgtcgtgactgcgcaccggtacatgctggccccggacgcacccggacgccgccaacatgtgcccggagtcatggtcctgttggtggacgaacctctgcgcggagacatcttctccccgatccgcgaggcccaagcgtccggcctgaatgtggtgatgctgggaatggcaggcgccgatccggaacagctccggcggctggcgccgggaatggactctgtgcagactttcttcgccgtcgacgatggaccgtcgctcgaccaggcggtgtccggactcgcaactgctctctgccaggcatccttcaccacccagccgcggccggaaccatgtccggtgtactgccccaaggggcaaaagggagaacccggagagatgggccttcgcggacaagttggtcctccaggggatccgggcctgcctggaagaactggagcccctggacctcaggggccgccgggatcagcgaccgcaaagggcgagagaggattcccgggagccgacgggcgtccgggtagtccgggccgcgccggaaatccaggaaccccgggcgcccccgggctcaagggttcgccaggactcccaggaccacgaggcgaccctggtgaacgcgggccacgcggacccaaaggcgaaccaggagccccaggacaagtgatcggaggtgaaggccctggtctgccaggccgcaagggagatcctggtccatcaggtccacctggaccccgagggccgcttggtgaccctgggccgcggggccccccaggactgcctggtacggccatgaagggtgataagggcgaccgcggagagcgggggcccccaggaccaggcgaagggggaatcgccccaggagagcccggcttgccaggcttgccgggcagcccaggaccgcagggtccagtcggtccgcccgggaagaagggggagaagggcgattcagaagatggcgctccaggactcccgggacagccgggctcccctggggagcagggtcccagaggcccaccaggggccatcgggccgaaaggcgaccgggggtttccgggtccgcttggagaagccggtgaaaaaggggaaagaggccctccaggcccggcggggagccgggggttgccaggcgtggcaggaaggcctggtgccaagggcccagagggtcctccgggaccaactggacgccagggcgaaaagggcgagcctggacggcctggtgacccagcagtggtaggaccagcggtggcggggccgaaaggagagaaaggggatgtgggccccgctggcccgagaggagcaactggagtgcaaggggaacgagggccgcctggcctggtgctgccgggggacccagggcctaagggggatccaggtgaccgggggccgatcggactcaccggtcgcgcgggacccccgggagactcaggtcccccaggtgaaaagggtgaccctggacggccgggacctccagggcctgtggggcctagggggcgggacggcgaagtgggagagaaaggcgatgaaggaccgcctggagatccagggctcccgggtaaggccggtgaacgcggactgcggggcgccccaggcgtgcgagggccagtcggggaaaaaggcgaccaaggtgaccctggtgaggacggcaggaacggctcgcctggatcttccgggccgaagggcgatcggggtgagccaggacccccgggccccccgggacgcctggttgacactggacccggagcgcgtgagaagggagaacctggcgaccgcggtcaagaagggccgcggggaccaaaaggtgatcctggtttgccaggtgcacccggagaacgcgggatcgaaggctttcgcggtccgcctggcccgcaaggggaccctggtgtgcggggaccagccggcgaaaagggggaccgtggacccccaggacttgacggacgctcgggacttgatggaaagccgggagctgcaggaccttcaggaccgaacggagcagcaggaaaggcgggtgaccccgggagagatggactgccggggctcaggggagaacaaggtctgccagggccgtcgggaccgccaggcctccccggcaagccaggcgaggacggaaagcccggactgaatggtaagaatggagaacctggagatccgggagaggacggccgcaaaggcgaaaaaggtgacagcggcgcgagcggccgagagggacgagacggaccgaagggagaacgtggcgccccggggatcctgggaccacaggggccacctgggctcccagggcccgtcgggccgcctggtcaaggctttccgggagtgccggggggtaccggtccaaagggggatagaggagaaactggatccaagggggaacaggggctgccgggagagcgtggtctgcgtggagaaccaggctcagtgccgaacgtcgaccgcctgctcgaaacggctggtatcaaagcctcagcgcttcgcgagatcgtcgaaacttgggatgagagctcaggatcatttctgccagtgccggaacggcgccgaggccccaaaggagactctggcgagcaagggccaccgggaaaagaggggccaatcggattcccaggagagcgcggactgaagggagatcggggggatccggggcctcagggacctcctggtcttgcactcggtgaacgtgggccgcccggcccatcaggacttgcgggagagccaggaaagcctggcatccccggcctgccgggccgcgcgggaggagtaggagaagcaggtagacctggtgaacggggggagcgcggcgaaaaaggagagagaggcgaacagggacgggatggaccccccggcctcccgggtacgccagggccacctggcccacccggcccgaaggtgtcggtggacgagccaggaccaggactgtcaggagaacaaggaccaccgggccttaagggagccaaaggagaaccgggatcgaatggtgaccagggaccgaagggtgaccgaggtgtcccaggcatcaagggggacagaggcgaaccgggtccgagaggacaggatggtaatcccgggcttcctggagaacgaggtatggccgggcccgagggcaagcccgggctgcaaggaccgcgcggaccacctgggccagttgggggacatggggatcctggtcctccgggcgcaccgggattggctggtcccgcaggcccgcagggaccgagcggactcaaaggcgagccaggggaaaccggaccgccggggcgcggcctcactggcccaactggagctgtgggacttccgggcccaccgggaccgtccggacttgtgggacctcaaggctcacctggcctgccggggcaagtgggggagactgggaaacccggagcgcctggacgggatggtgcaagcggaaaggacggagatcgcggctcccctggcgtgccaggaagtccaggtctgccgggaccagtcggtcctaagggtgagccgggacctacgggtgcccctggacaggctgtagtgggtttgccgggggccaaaggtgagaaaggagctccaggggggctggctggggatcttgtcggagaaccgggggcgaagggtgataggggcctccctggacctcgaggagagaagggtgaggccggtcgggccggcgaaccaggtgacccaggagaggacggacagaaaggagccccggggccgaagggattcaaaggggacccgggagtgggagtgcctggaagcccaggcccgccgggccctccgggagtcaagggagatctcggacttccgggactcccgggcgctcctggcgtggtcggatttcccggccagactggaccacgaggagaaatgggccagccaggcccctctggagagaggggcctcgccggaccaccgggacgggaaggaattccgggacctttgggaccaccggggccgcccgggtccgtgggaccacctggagcctcgggactgaagggcgataaaggagatccaggcgtgggcttgcccggaccccgcggtgaacggggcgaacccggaatcagaggcgaagatggccgaccggggcaggaggggccgagaggtctgactggaccgcccggctctcgcggcgagcggggagagaagggagacgttggatccgccggtctgaagggcgacaagggtgactccgcggtgatcctgggcccacctggcccgcgtggcgctaaaggagacatgggggagagaggacctcgtggattggatggcgataagggacccagaggagataacggcgacccgggagacaagggttcaaaaggcgaacccggggacaaaggatcggccggattgcctggcctcaggggcctgctcgggccccaagggcaaccgggggccgccggcataccgggcgacccggggagcccgggaaaagatggagttccgggaatcaggggtgaaaagggggatgtgggattcatgggaccgcggggtctgaaaggagaacgcggcgttaaaggagcctgcgggctggacggggagaagggagataagggagaagcaggcccaccgggtcggcctggactcgcgggccacaaaggagagatgggtgaacctggtgtcccagggcaatcgggagcacccggaaaggagggattgatcggcccaaagggtgaccgcggattcgatggacagccgggtccgaagggggatcaaggtgagaagggggaacgcggaactccgggaatcggaggatttccgggcccgagcggaaatgacggatcggctggacctcccggaccgccaggatcagtcgggcctcggggacctgaaggcctgcaaggccagaagggagaaaggggcccgcccggagagcgcgtggtcggtgccccaggggtaccgggcgcaccaggtgagcgcggtgaacaggggcgccccggcccggctggaccaagaggcgagaagggagaggccgccctcacggaggatgacatccgcggtttcgtgagacaggagatgagccagcactgtgcctgccagggccagttcatcgcctcgggatcgcggccgctgccgagctacgcggccgacactgctggctcccagttgcatgccgtgccggtgctgagagtgtcccatgcggaggaagaagaaagagtgccgcctgaggacgacgagtactcagaatacagcgaatactcggtcgaagaataccaggatcctgaggccccatgggactcggacgacccatgttcgctgccactggacgaaggatcatgcaccgcgtacacccttcgttggtaccaccgggcggttactggaagtaccgaggcgtgccacccgttcgtgtacggaggatgcgggggcaacgcaaatcggttcggtactcgcgaggcgtgtgagcgccggtgcccgcctagagtggtccaatcccagggaactggaactgcacaggat

SEQ ID NO: 1470 - DNA, 8832 bp, Artificial Sequence
  derived and/or modified sequence
atgaccctcagacttctggtggcggcactgtgtgcgggcatactggcagaagctcccagagtgcgcgcgcaacatagagagagagttacctgtaccaggctttatgccgcagatattgtctttcttctggacggatcgtcgtcgattggcaggtcaaacttcagggaagttaggtcgttccttgaaggactggtcctcccttttagcggagcagcgtcagcacaaggtgtgcgctttgctactgttcagtattcggatgatccaagaaccgaatttggacttgatgcccttgggtccggaggtgacgtgatccgggcaattcgcgaattgtcgtacaaagggggaaacacgagaaccggagcagccatactgcacgtggcagatcacgtctttttgcctcaacttgcacgtccaggtgtgcccaaggtctgtattctcattaccgatggtaaaagccaagacctcgtggacactgctgcacagagactgaaaggccagggcgtgaaactttttgccgtcggcataaagaacgcagacccggaggagctgaagcgggtggcaagccaaccaacgagcgacttcttctttttcgtcaatgatttttcgattctccgaacccttctccctctcgtgtcgagacgggtgtgtaccactgccggcggggtgcctgtcactcgccctcctgatgattcgactagcgcaccacgtgatctcgtgctgtctgaaccttcctcacagtcgctgcgggtgcagtggactgccgcgtcgggtcccgtgactggctacaaagttcagtacactccacttactggactgggccagccactgccctcggaaagacaagaggtgaacgtgccagcaggagaaacctcagtgcgtctccgtggactgaggcctctcaccgaataccaggtcactgtgattgcactgtacgcgaactccattggtgaagcagtgagcggtactgcaaggacgaccgccctcgaggggcctgaattgaccattcagaatacgaccgcacattcgctcctggtggcatggagatctgtgccgggagccaccggataccgagtgacgtggagggtcctttcgggaggacccacccagcaacaggaactgggaccagggcagggttccgtgttgttgagggatcttgaacccggtactgattatgaggtgaccgtttcgactctcttcggaagatcggtcggccctgcaaccagcctgatggcacggacggatgcaagcgtggaacagaccctgcgacctgtgatcctgggacctaccagcatccttctgagctggaatcttgtccctgaggcacgaggttacagacttgagtggcgtcgtgagactgggcttgaaccacctcaaaaagtcgtccttccgtcagatgtgactcgttaccaactcgacggactgcaaccaggaacggaataccggctcaccctctacacccttctcgaaggtcatgaagtggccactcctgcaactgtggtgccaaccggtcctgaacttcctgtcagccccgtcacggacctccaagcaaccgagctgccgggtcagcgggtgcgggtgagctggtcgccagtgcccggagctacccagtaccggataatcgtgaggtctactcaaggagtcgagcggactctcgtgcttcccggaagccaaactgcattcgatcttgacgacgtgcaagcagggctctcatacaccgtcagagtctcagccagagtcggtccacgagagggttcagcatcagtgttgaccgtgagaagagaaccagaaaccccactggctgtcccagggctcagggtcgtggtgtccgatgccactagagtgcgcgtggcatggggacccgtcccaggagcgtccgggtttcgcatctcgtggtccactggatcgggaccagagtcgtcacaaaccctcccccctgattccaccgccacggatattacgggacttcagcccgggactacgtatcaagtggccgtctcagtgcttcgcggtcgagaagaaggtcccgcagcggtgatcgtggctagaacggatcctctgggacctgtccgcactgttcacgtgacccaggcctcctcgtcctcggtgactataacgtggacccgcgtcccaggagcaactggctaccgtgtctcctggcactccgcccacggacccgagaagtcccaattggtgtccggcgaagccacggtggctgaactcgatggactggaaccagatactgaatacactgtgcacgttcgtgcgcatgtggccggggtcgacgggcctccagcaagcgtggtcgtcaggactgcaccagaaccggtggggcgggtgtcaaggcttcagattcttaatgcatcgtcagatgtgcttcgcataacttgggtgggtgtgactggcgccaccgcatacaggcttgcatgggggagatcagaagggggtcctatgcggcaccaaattctgcccggaaacaccgacagcgcagaaatccgcggactcgaagggggagtttcttactccgtgagagtgactgcgcttgtcggagatcgtgaagggactcctgttagcattgtggtgactacccctcctgaagctccccctgcactgggaaccctgcatgtggtccaacggggtgagcattcactgcgattgaggtgggaacctgtgcctagggcccaaggattcttgttgcattggcagccagagggtgggcaagagcagagccgcgtgttggggcctgaacttagctcgtaccatctcgacggtcttgaaccggcaactcagtacagagttcgcctgtcagtgctcgggcctgccggcgaaggacctagcgccgaagtgaccgcaaggaccgaatccccaagagtgccttccattgaactcagggtggttgacacctcgatcgatagcgtgactcttgcttggactccggtgtccagggcaagctcgtacatcctttcgtggcgccccttgcgcggccctggacaagaagtgcccggttctcctcagactctccctgggataagctccagccaacgcgtcaccgggcttgaaccaggagtgtcgtacattttctcgctgactccagtgctcgatggggtgcgaggaccagaagcatctgtgacccagaccccagtgtgcccacggggactcgcagatgtggtctttctgccacatgccacccaggataatgcacatcgagcagaagcaactagaagagtgcttgagaggctcgtgttggcccttggtccacttggtccgcaagccgtgcaggtgggtctgctgtcgtactctcatagaccatcccctctcttcccgcttaacggttcacatgacttgggtattatcctgcaacgcataagagacatgccctacatggatcctagcggtaacaatctgggaactgcagtggtcaccgctcatagatacatgttggctccagacgctcctggtagacggcaacatgtgcctggcgtgatggtgcttctggtggacgaacctcttcgcggagatatcttttcccccattagggaggcacaggcttctggtcttaatgtggtgatgctgggaatggccggtgccgatcctgagcaactgagacgcctggcacctggaatggatagcgtgcaaactttctttgcagtggatgatggacctagcctcgatcaggcagtgtcaggcctggcaacggcactgtgtcaagcctcctttaccacccagccccggcctgaaccttgtccggtctactgcccaaaggggcaaaagggtgaacctggcgaaatgggtctgagagggcaagtgggacccccgggagatccaggactgccgggacgcactggcgcccctggacctcaagggccccctggcagcgcgaccgccaagggcgaaagaggtttccctggagcagatggtagaccgggatccccgggtcgggcaggtaatccgggtacccccggggcgcctggtctgaagggaagcccaggccttcccggtccccggggggacccaggtgaaagagggccaagaggacccaagggggaacccggggcacccggtcaagtgatcggtggcgagggccctggtctgcctggccggaaaggtgatcctgggcctagcggcccacccggaccgcgaggtcctctgggcgaccccggaccaagaggacctcctggacttcctggaaccgcgatgaagggcgacaagggagatcgaggcgaacggggacctcccggtcctggcgaaggtggaattgcacccggagagcctggactgccaggcctgcctggatcgccaggcccacaaggcccagtgggacctcctggtaagaaaggtgaaaaaggagactccgaggatggagccccaggacttcccgggcagcccgggtcgcctggtgagcaaggccctcggggaccgcccggagcgattggtcctaagggtgatcgtggattccctggtccactcggtgaagcaggtgaaaagggagagcggggaccacccggacccgccggatcaagaggccttccgggcgtggcaggacgccccggagctaagggtccggaaggacccccgggtccaactggtcggcaaggcgagaagggtgaaccaggtcgtccgggcgaccctgccgtggtggggcccgcagtcgccgggcctaagggagagaaaggagacgtgggtccagctggcccgcggggcgccactggagtgcagggagaaagaggaccgccaggcctggtccttcccggagatcctgggccgaaaggtgacccaggagacaggggacctattggactgactgggcgagcaggccctcctggtgatagcggaccccccggcgaaaaaggagatccagggcgcccaggtcctcctggtcccgtgggacctcgcggccgggacggtgaggtgggagaaaagggcgatgagggaccgccaggagatccgggacttcctggcaaggcgggtgaacgtggccttcgtggagcccctggtgtcagggggcccgtcggcgaaaagggagatcagggagatccgggtgaggatggacgaaacggaagccccggttccagcggaccgaagggagacagaggtgaacctggacctcccggacctcctggacgacttgtggatactgggcccggcgccagggagaagggtgaaccaggggaccggggtcaagagggacctcgcggaccaaagggagatccggggcttcccggtgcaccgggagagcggggtattgaaggctttagaggacctcccgggccgcagggagatccaggtgtcagaggtccagcaggcgagaagggtgacagaggacctcccggcctcgatggacgatcgggtcttgatggaaagcccggagctgctggaccctccggccccaacggtgcagcaggtaaagcaggtgaccctggacgagatggattgccaggtctgcggggcgaacagggactgcctgggccaagcggcccacccgggctgcctggtaagcctggtgaggatggtaagcctggacttaatggcaagaacggcgaacccggggaccccggcgaagatggtcgtaagggggagaagggtgactcaggagcgtcgggacgggaggggcgtgatggtccaaagggagaacgtggagccccaggcatcctgggccctcaagggcctccggggctccctgggccagtgggtcctcctggtcaaggatttccgggcgtgccaggaggaaccggtcctaagggcgacagaggcgaaaccggatcgaagggggaacaggggctcccgggcgagcgcggacttcgaggagaaccaggctcggtgccaaatgtggatagactgcttgaaacggctgggataaaggcttcggcgctgagggagatcgtggaaacttgggacgagtcatccggctctttcctgcctgtgcctgagcgtcgcagaggtccgaagggcgattcaggcgaacaagggccacctggtaaagaaggtcctattggtttccctggtgaaagaggccttaaaggagatcgtggggatcctggtccgcaaggaccgccagggctcgcacttggggaaagagggccccctgggccttccggtcttgccggagaacccggcaagccaggaatccctggactgccgggaagagccggtggtgtgggagaagcaggacggcccggagaaaggggggagcgcggcgaaaagggtgaaaggggcgaacaaggacgcgacgggccgccaggattgccaggaaccccaggcccgcctgggccgccaggtccaaaggtgtccgtggatgaacctggccctggtcttagcggagaacaggggcctccgggtcttaaaggcgcaaaaggagaaccaggatccaatggagatcaaggacctaagggagatagaggtgtgccaggtatcaaaggtgaccgcggggaacctggcccacggggacaggacggaaatcctggactgcctggcgagcgagggatggccggtccagaaggtaagccaggactccaagggcccagaggtcctcctggccctgttggcggacatggagatccaggtccgccaggcgcacccggactggcaggacccgcgggacctcaaggaccatcgggtctgaagggggagccgggggaaaccgggccacccggacgtggactcactggccctacgggagcagtgggactgccaggtcctccgggcccgtcaggcctcgtcggacctcaaggatccccgggattgccaggacaagtcggagagactgggaagccaggagctcctggtcgggatggagcatcagggaaggatggtgaccgtggttcaccaggcgtgcccggatcgccaggactccctggacctgttggaccgaaaggagaaccagggccaactggtgcacctggacaagcggtggtcggactccccggtgcaaaaggtgaaaagggggcaccgggaggcctggccggcgacctcgtgggggagcctggtgccaagggggatagaggtctgccaggtccccgaggcgagaagggtgaagcaggtcgcgccggcgaaccaggggaccccggagaagatggacagaagggcgcaccaggccctaaaggatttaagggagatccaggcgtcggagtcccgggatcaccgggtccgccaggtcctcctggtgtgaagggcgatctgggtctgcctgggctccccggcgcccccggtgtggtcggctttcccggacaaaccgggccgaggggtgaaatggggcagcctggtccctcgggagaacgcgggctggcagggcctcccggtagagaaggtattccaggccccctgggtccacctggtccacccggtagcgttggacctcctggagcatcaggactcaagggcgacaagggggaccctggtgtgggcttgccaggtcctcggggtgagcgcggggaacctggaatcagaggagaagatggaaggcccggacaggaagggccaagaggcctcacgggaccaccgggttcgaggggggagcggggtgaaaagggggatgtcggatccgctgggcttaagggtgataaaggagattccgccgtcatcctgggacctcctggaccacggggagcaaagggcgatatgggagaaagagggccgcggggacttgatggagacaagggacctaggggtgacaacggcgacccgggagataaggggtccaagggagagcccggcgataagggtagcgcggggcttcccgggctgcgcggactgttggggccccaaggtcaacctggagcggccggtattcctggtgacccaggttcaccaggcaaggatggtgtgccgggaattaggggggagaaaggggacgtgggctttatgggacccaggggcctcaaaggagaacggggtgtcaagggagcatgtgggctggacggcgaaaagggggacaagggcgaggcaggaccaccagggcgtcccggactggcaggacataaaggggagatgggagaacccggggtcccaggacaatcgggcgcacctggtaaagagggattgattgggccaaagggagataggggatttgatggacaacctggacctaagggagatcaaggcgagaagggagaacgcggcacgcccggaatcggcggatttcccggtccttccggcaacgatggatccgccggacctcctggtccgccaggttccgtgggaccacgcgggccagaaggattgcagggccagaagggtgagcggggacctccgggggaaagggtcgtgggtgcaccaggtgtgccaggtgcaccaggcgaacgcggagagcagggtcgcccagggccagcaggccctcgtggagaaaagggcgaggcagcccttactgaggacgacattcggggattcgtccggcaggagatgtcacaacattgtgcatgtcaaggacagttcatcgcgagcggttcgcgacctctgccttcctatgccgcagataccgcaggctcccaacttcacgcagtgccagtgctgcgagtcagccatgccgaggaagaagagcgcgtgcccccggaagatgatgaatactcggaatactcggaatactcggtcgaggagtaccaggatccagaagccccctgggattccgacgatccttgctccctgcctctggatgaaggctcatgtacggcctacacccttagatggtaccatagggccgtgaccggatccaccgaagcctgtcacccttttgtttacggaggctgcgggggaaacgcaaaccgatttggaactcgtgaagcatgtgaacgtcgatgtcccccgagagtggtgcaatcgcagggcactggtactgcccaagat

SEQ ID NO: 1471 - DNA, 8832 bp, Artificial Sequence
  derived and/or modified sequence
atgacactgagactgttagtagctgccctgtgcgccggtatccttgcagaagcacccagggtcagggctcagcatagagagagagtgacgtgcacccgcctatacgcggctgacatcgtttttttactagatggttccagctcgatcgggcgcagtaatttccgggaagttcggtcatttctcgagggtctggttttgccattctccggagcggcatcggcccagggagtacgattcgccaccgtccagtactccgatgatccccggacagagtttggtctggatgctctgggaagcgggggcgatgttattcgggctatccgcgagctctcctacaaaggcggaaatacaaggactggtgctgcgatcctgcacgtcgccgaccatgtcttcctacctcagctggcacgccctggcgtccccaaagtgtgcatcttgataaccgacgggaaaagtcaggacttggtagacacagcagcacaacggctaaaaggccagggcgtaaagctctttgcagtaggcataaagaatgccgatccggaagagttgaagagagtcgcgagccagcctaccagcgactttttcttcttcgttaatgatttcagcatactgcggaccttactcccactcgttagccgccgtgtgtgcacgactgctggcggggtccccgtcacgcgcccaccagacgactccacttccgcccctagagatctcgtactctctgaacctagctcccaaagtctgagggtccagtggaccgccgcctcggggccagtgaccgggtacaaggtgcagtacacgcctctcacaggactcgggcagccattaccctcagagcggcaggaagtgaatgtgccggccggcgaaacatcagtaaggctgcgtggactgagacccctgaccgaataccaagtgacagtgatagccctgtacgccaactccatcggcgaagcagtgtcaggaactgctaggacaactgctctggagggcccagagctgaccattcagaatacaaccgcgcactctcttctggtagcctggcgatcggtaccgggcgcgaccgggtaccgcgtcacatggagggtgctctctgggggtcccactcaacaacaggagttaggtcccggtcagggcagtgtgctcctgagagacctcgagccaggtacagactacgaagtgaccgtcagcaccctctttgggaggtccgtgggacccgcgacgagcctcatggcccggaccgatgccagcgtagagcagaccctccggcctgtgatcctggggcctacctcaatcttactatcttggaatcttgtgccagaggccaggggttacagactggaatggcggcgcgagacaggtctcgaaccaccccagaaggtagtacttcctagcgatgtaacgcgctaccagttagatggccttcagccggggacagaatacagactgaccctatatacgttactggaaggccacgaggtggctaccccagcgactgtggttccaactggcccggagcttccagtcagccccgtgacggatctacaggcaaccgagctcccgggtcaaagggttagagtttcttggtctcctgtgcccggcgcaacccagtaccgcataatcgtgcgttctactcagggagtagagcggacgctcgtgctcccaggttcccagactgctttcgatctcgacgacgtgcaggctggtctgagttacaccgtacgcgtgtctgcacgtgttggtccccgggagggttcagcttccgtactgactgtgcggcgcgagccagagacgccactggctgtcccaggcctcagggtagtggtgtctgatgctacccgggttcgagtggcttggggacccgtccccggcgcctccggtttcaggatctcttggtcgacgggcagcggtcctgaaagctcccagacacttccaccagactccaccgccacagacatcaccggactgcaacctggcacgacctaccaggtggcagtttctgtgcttcggggcagggaggaaggacctgccgctgtcatcgtggcccgcacagatcccctgggacctgtgcggaccgtccacgtcacccaggcttcaagcagttcagttactattacctggaccagggttcctggcgccaccggataccgtgtgtcatggcattccgctcatgggccagaaaagagccagttggtctctggggaggctacggtggccgagctggacggacttgagcccgacacagaatacacagtccacgtaagagcccatgtggctggggtcgacgggcccccagcaagtgtggtcgtgcgtacggcccctgagcccgttggccgagtatcacggctccagatcctcaacgcgagcagcgacgttctgaggattacctgggtgggcgtaacaggcgcaaccgcctatcggcttgcctggggccgcagtgaaggcggacctatgcggcaccagattctgccggggaatacggactcagccgaaatcagaggcctcgaagggggggtaagctacagcgtccgtgtgacagcccttgtgggggacagggaaggaacccctgtcagtattgtcgtgacaaccccccctgaggctcctccagcattgggcacgctccatgtagtgcaaagaggcgaacacagcctgcggttaaggtgggagccggttcccagagcccaagggtttctgctgcactggcagcctgaggggggacaagaacagagcagagttctgggaccagagctgagctcatatcatctcgatggcctagaaccagccacccagtaccgcgtgcggttgtctgtcctgggacccgccggggagggcccctccgctgaggtgaccgcccgaactgaaagtcctagggttccatcaatcgagttgcgcgtggtggacacatcaatcgactccgtgaccttggcctggacgccagtaagccgagccagtagttacatcctttcctggcgtcctcttcgcggacctggccaggaggtccccggatctccccagactctgcccggaatttctagctctcagcgcgttacaggccttgaacccggcgtgagctatattttctcccttacccctgtacttgacggagtaagaggaccagaagctagtgttactcagacacccgtgtgtccacgtgggctggccgacgtggtgtttctgccccacgcaacacaggacaacgcccacagggccgaggccaccaggagagtcctggaacgcttggtacttgctctgggcccactaggcccacaagctgtgcaggttggtctcctgagctattctcaccgaccctcaccattgtttcctctgaatggatcacatgatcttggtattatattgcaacgcatcagagatatgccttacatggatcctagcggaaacaacttggggaccgcggttgtaaccgcccacaggtatatgttggctccggatgcccctggacgcaggcaacatgtacccggcgtgatggtgctgctggtggacgagccattgcgcggcgacatctttagccccattagagaggcccaggccagtggcctgaatgtggtcatgttaggaatggccggagctgacccagagcagttgcgacgccttgcacccggaatggattccgtgcagactttcttcgcagtggatgacggaccctcactggatcaggccgtgtcaggcttggccaccgccctgtgtcaggcaagcttcacaacccagccacggcccgagccctgccccgtgtattgtcccaagggccagaagggagaaccaggtgagatgggcctgcggggacaggtgggcccaccgggcgaccccggcctccccggtaggaccggcgcaccagggcctcagggtcctcctggcagcgctaccgctaaaggtgagaggggattccctggcgcagatggacgcccaggaagcccgggccgcgctgggaacccgggcacaccgggtgcacccggccttaagggaagccccggactgcccggtccccggggagaccccggtgagcggggtccgcggggtccaaagggggagcccggggctcctggacaggtgattggaggagagggaccaggactcccaggacggaagggtgatcccggaccatccggccccccaggcccaaggggtcccctgggggaccctggtccaaggggtccgcctggcctgcccgggaccgctatgaagggtgacaaaggagaccgcggggagcgcggtccccccggccccggtgagggcggcattgcacctggcgagccaggcctgccgggacttcctggctccccgggaccccagggccccgtggggcccccggggaaaaagggggagaagggagatagcgaagatggtgcaccggggctgcctggacagcctggtagtccaggggaacagggccccaggggccctccaggggcaatcggccccaagggtgacaggggttttcctggccccctgggggaggcaggagagaagggagagagagggccacccggccccgccggcagtaggggcctccccggggtcgccggtaggcctggcgcgaaaggtcctgaaggtccacctggcccaacagggcgacaaggcgagaaaggggagccgggccgaccaggagaccctgctgtggtcgggcccgcggtcgccggccccaagggcgaaaagggcgatgtgggtcctgccggacctcgcggggccactggagttcaaggggagaggggaccaccgggtctcgtcctgccaggtgatcccggccccaaaggtgacccaggcgaccgcgggccaatcgggctgaccgggagggccggacctccaggagactctggcccgcctggggagaaaggagaccccggtcgacccggcccgccaggcccagtcggcccacggggccgagacggggaggtaggcgaaaaaggagacgagggtccccctggtgacccagggttgcctggcaaggccggtgagcggggtcttcgcggagcacccggggtaaggggccccgtgggagagaagggtgaccagggggatccaggagaggatggacggaacggctcaccaggtagctcgggccccaagggcgatcgcggcgaacccggcccccccggcccccccggacggttagtggatacaggacccggcgccagagaaaaaggagaacctggggataggggtcaggaaggtcctcgtggacccaaaggtgaccctggcctgcccggggccccaggagagaggggaatcgaaggtttccgaggacccccaggtccacagggcgatccgggtgtgagaggacctgccggcgagaaaggtgacagagggcctccagggctcgatgggcgctccgggctggacggaaaacctggggccgcagggccatctggccccaatggagcggccggaaaggcaggcgaccctgggcgggatgggctacctggactgcggggtgaacagggcctgcccggtccgagtgggcccccgggactgcctgggaagcccggggaggacggcaaacccggtctgaatggaaagaatggcgagcccggggacccgggagaggatggtagaaagggtgagaagggcgactccggcgcgagtgggagagagggacgggacggacccaagggggaacggggcgcccccggcattctaggaccgcagggccctcccgggctgcctggacctgtgggacctcccgggcaagggttccccggcgtgcccggcggaaccggaccgaagggagaccgcggggaaacaggcagcaagggcgagcagggactccctggagaacgcggcctgaggggcgagccgggttcggtgccaaatgtggacagactgctggagactgccggaattaaagccagcgccctccgggagatcgttgaaacctgggacgaatcctctggcagtttcctccctgtgcccgagaggcgaagaggccccaaaggggactctggtgaacaggggccaccagggaaggaaggcccaatcgggtttcctggtgaacgcggcctgaaaggtgaccgcggagatcccggcccgcagggcccgcctggcttggcccttggcgagcgcggccctcccggcccttccggactggcgggagagcctgggaaaccagggatacccggcttgccaggccgcgctggcggcgtcggggaagctgggcgccctggggagagaggggaacggggtgaaaagggcgagaggggagagcagggtcgggacggcccacctggattgccgggcactcctggtcccccaggaccccccggcccaaaagtgtccgtcgatgagccggggcctgggttgtcaggggagcagggtccccccgggctgaaaggggctaaaggagaacccggaagtaacggtgaccaagggcccaagggagaccgtggcgtaccgggcatcaagggagataggggagagcctggaccccggggccaggatggcaatccaggactgcctggcgagcgggggatggcgggcccggagggcaaacccggactgcagggccccagagggccacccggccctgtcggtgggcatggcgaccccggaccccccggagctccaggcctggcaggccccgctggacctcagggccccagtggactgaaaggtgagcccggcgaaacaggccccccaggacgtggactgactggccccaccggggcagtgggcctgccgggacccccaggaccttcaggactggtcggtccacaggggtcacccgggttgcctggacaggtcggagagacgggcaaaccaggagctcctggtagagatggcgcttcagggaaagacggcgatcgcggatcacccggagttcctggttcccctggcctcccaggtcccgttgggcctaaaggagagcccgggcctacaggagctcctgggcaggccgtggtcggactgccgggagccaagggagagaagggcgcacctgggggactcgccggggacctagtgggcgaaccaggtgccaagggggatcggggactacccggacctcggggcgaaaagggagaggcaggtcgggctggagaacctggagaccctggagaggacggtcagaagggagcgcccggacctaaaggtttcaagggcgaccccggagtgggagtgccaggcagtcctggacctccaggtccacccggtgttaagggcgacctgggcctccccggccttcctggcgcacccggtgttgtcggattcccaggacaaacaggtccacgcggggagatgggccagcctgggccttccggagagcgaggattagctggtccaccaggcagggaggggatacctggacccctggggccacccggccctccgggctcagtcggtccacccggagcatcaggtctcaagggtgacaagggagatcccggtgtgggcttgcctggccccagaggcgaaaggggcgagcctggaatccggggcgaagatggaaggccgggccaggagggccctcgaggcctcactgggcccccaggtagtagaggagagcgtggtgaaaagggggacgtaggttcggccggcctgaaaggggataagggcgatagtgccgtgattttggggccccccgggcccagaggggccaaaggggacatgggtgagagaggcccaagaggcctggatggagataaggggcctaggggggataatggagatccaggagataaggggagtaagggggagcccggcgataagggctcagccgggttacccggtcttagggggctgctgggaccgcagggccagcctggcgcagctggcatccctggtgatcccggcagtcctgggaaagacggcgtccctggcatcaggggcgaaaaaggggatgtgggatttatgggtcccagaggattgaagggcgagcgcggagttaagggagcctgtgggctcgacggtgaaaaaggagataaaggcgaggccggtccaccaggaaggcctggactggccggacataagggcgaaatgggcgagccaggcgtaccaggtcagtctggtgcccctggtaaagaaggactaatcggcccaaagggcgatcgagggtttgatggtcagcctggtcccaagggcgaccagggagagaagggtgaaagaggcacgcccggaattggggggttcccaggaccatcaggcaatgatggaagcgctggtccccctgggccgcccggcagtgttgggccacgggggccagaggggctgcagggtcagaaaggcgaacgtggaccgcccggagaacgggtggtaggggcaccaggggtgcctggggcgccgggggagagaggcgaacaaggaagacctggccctgcgggtccaaggggggagaaaggcgaggcagccctgactgaggacgatatccgcggatttgtacgtcaggagatgtcacagcactgtgcatgtcagggacagttcatcgcttctggcagcagaccccttccttcatacgcagccgatacggccggaagtcagctgcatgcagttcccgtcctgcgggtgagtcatgctgaggaggaggagcgggtgcctccggaggatgacgaatactccgaatacagcgagtactcggtggaggaataccaagatccagaggctccttgggactccgacgacccatgctctctacccctagatgagggcagttgtacagcctatactttgagatggtaccacagagccgtgacaggctcaaccgaggcttgtcatccttttgtgtacggaggctgcggaggaaatgctaatcgtttcggcaccagagaggcctgcgaaagaaggtgcccccccagggtggttcagtctcaggggacgggaacagcacaggac

SEQ ID NO: 1472 - DNA, 8832 bp, Artificial Sequence
  derived and/or modified sequence
atgaccctgcggctacttgtcgcggctctctgtgctggtattcttgccgaggctccaagagtgagggcacaacatcgagagcgtgtgacatgtacccgcttgtatgccgctgacatcgtattcctgctggacggctcatcttctatcggccggagtaattttcgggaggtgcggtcattcctcgaggggctggtccttccattctcaggcgccgcctccgctcagggggtgcgcttcgctactgtgcaatattctgatgatccccgtactgaattcggtctggacgcccttgggtcgggcggggatgtcattcgggccatcagggaactgagttataagggcgggaacactagaactggagcagcaatcttacacgtcgcggatcatgtgttcctgccacagctagctcgtcccggcgtgccaaaggtttgcatcttgatcactgatggcaaaagccaggacctggttgatacagcagcccaaagattgaagggacagggtgtgaagctttttgctgtcggcatcaaaaacgctgaccctgaagagctgaagcgagtggcctcacagcccacatctgattttttcttcttcgtcaacgacttctctattctcaggaccctgctccccctggttagccgaagggtgtgcaccactgcaggcggcgtgcctgtgacacgtcctccagacgacagcacgtccgcacccagagatctggtccttagcgagcccagctcccagtctcttcgtgtgcagtggaccgccgcatcggggcccgtgaccggatataaggtgcaatacacacctcttactggtctcggacagcctctgccttcagaacgccaggaggtgaacgtgccggccggcgagacgagcgtgcggctgcggggcctgaggcctcttacggagtaccaagtcactgtcattgccctgtacgctaatagcataggagaggccgtttcaggaacagcccggaccaccgctctcgagggaccggaactaaccatccagaatactacggctcacagcctgctggtcgcttggcggagcgtgcctggggcgaccggttacagagttacctggcgggtcttgagcggcggacctacacagcagcaggagctgggcccaggccagggatccgtattgttgagggaccttgaaccgggaaccgactacgaagttaccgttagtaccttatttggacgaagcgtggggcctgccacttcactgatggctaggacggacgcctcagtggagcagacactgagaccagtgatactaggtccgacctccatactgctgagctggaacctggtgcctgaagccaggggttacagattggaatggcgaagggagactgggttggaacctcctcagaaggtagtcctgccttcagatgtgactcggtatcagctagatggcctgcagccgggaactgagtaccggctgacgctttacactttgcttgagggccatgaggtagcaacgcctgcgaccgtcgtccccaccggtccagagctgcccgtgagccccgttactgatctgcaagcgacagaactgcccggacagcgggtgcgtgtcagctggtcccctgtccccggcgccacgcagtatcggataatcgttagatccactcagggggtggagcggaccttggttctaccgggaagtcagacggcctttgacctggatgacgtacaggccggactgtcttatactgttcgcgtgtccgcccgcgtcggcccacgagaagggtccgcatcagtcctgactgtgcgccgggagcctgagacacccctggctgttccgggccttcgggttgtggtttccgatgccacgcgcgttcgagttgcatgggggcctgttccaggagcgtccggatttcgcatctcatggtccaccgggagtgggcctgagagcagtcaaacactgccacctgatagcacggcgactgacatcacggggttgcagcctggtacaacgtaccaagtcgcggtgagtgtgctgcggggcagggaagagggacccgccgcagtgatcgttgccaggaccgacccattgggaccagtgcgaaccgtccatgtcactcaagcctctagcagttccgtcaccatcacatggaccagagttccaggggcaacaggttatcgcgtgtcatggcactccgctcacgggcctgagaagtctcagctagtaagcggcgaggcaacagtggccgagttggatggcctggagcccgataccgagtacacggtgcacgtccgggctcacgttgctggagtggatggacctccagcctccgtggtggtgagaacagcccctgagcccgtcgggagagtgtccaggctgcagattttgaacgcctcaagtgacgtgctgagaatcacctgggttggggtgacaggggcaactgcttacagacttgcctgggggcgttccgaaggtggccctatgagacatcagatactaccgggcaatactgactccgcagaaatccggggcctggaaggcggtgtttcctactctgtaagagtcacagcgttggttggggatagggaggggactcccgtgtcaatcgtggtgactacaccgcccgaggcgcctcccgcattgggaaccctgcacgtcgtacagagaggcgagcactctctgaggctgcggtgggagcctgtccctagggcccaggggttccttctccattggcagcccgaaggaggccaggagcagtcacgcgtactgggccctgagctctcgtcctaccacttggacggcctcgaaccagcgacccagtaccgggtacggctctctgtcttgggcccggcaggggagggtccaagtgctgaagtgacggccagaacagagtcccctcgcgtgcctagcatcgagttaagggttgtggatacctctatcgactctgtcactcttgcctggaccccagtgagtcgagcatcaagctatatcctgagctggaggccattgaggggaccggggcaagaggtgcctggatccccccagaccctgccaggcatttcttcctcacagagggtaactgggctggagcctggtgtctcctatatctttagcctgacgcccgtgctcgatggcgtccgtgggcccgaggcctcagtgactcagacccccgtttgccctcgcggcctggctgatgtagttttcctacctcacgccacacaggataacgctcatcgggcagaagccacccggagggtccttgagcgccttgtacttgccctaggaccgctggggcctcaggctgtgcaggtgggccttctctcctacagtcatcggccgagtccattgttcccactgaacggttctcatgatctaggcattattttgcagagaatccgggatatgccctacatggacccaagcgggaataacctgggaacagctgtggtaaccgcccacaggtatatgttggcccctgatgcccctggcaggcgacaacatgtgcctggtgtgatggtgctgttggtagacgaacctttacgcggtgacatcttcagccctattagggaggcccaagcttccggactgaacgttgtgatgcttggaatggccggagccgatccggaacagctgagaaggttggctcctgggatggattctgtgcaaacattctttgccgtggacgatggtccctcgctggatcaggccgttagtggcctggcaacagcattgtgccaggccagttttacaacccagcctcgtcctgagccatgcccggtctactgccctaagggccaaaagggagagccaggcgagatgggcctccggggccaagtcgggcccccgggcgatccagggctgccaggtagaaccggcgctcctgggccacagggcccccctggttccgcgactgcgaagggtgagcgtggattcccaggcgccgacggtcgcccaggcagtcctggacgggccgggaatcctggcacccccggggctccagggctcaaaggatctccaggcctccctggtccgcggggagacccaggcgaacgagggccaaggggccctaaaggggaaccaggcgcccctggccaggtaattggaggagagggcccaggcctcccagggcgcaaaggcgaccccggcccatctggacctccaggtccaagggggcctctgggcgatcctggtccgcgaggccctcccgggcttcccgggaccgctatgaaaggagataaaggcgacagaggtgagcgcgggcccccaggccccggcgaggggggaatcgcccctggggaaccgggtctgccagggctgcccgggtcgcctggaccccagggaccagtgggacccccgggaaagaaaggagagaagggggactctgaggacggagcccctggtctgccaggtcagcccggctctcctggcgagcagggaccaagagggcccccaggtgccattggtcctaaaggagatcgcgggtttcccggccctttaggcgaggctggagagaagggcgaaagaggccccccgggtccagctggatctagggggcttcccggagtggcgggccggcctggtgcaaagggacctgagggaccgccaggccctaccggacggcagggcgagaaaggcgagccaggtaggcccggcgatcctgccgttgttggaccagctgttgctggaccgaagggagagaagggagatgtcgggcccgctgggcccaggggtgcaaccggggtacagggggaacgggggcctccggggctagttttgccaggggaccctggcccaaagggagacccgggcgaccgtggtcctatcggactgacgggcagagcggggccgccaggcgatagcggccctccaggagaaaagggggacccaggacgtcccggacctcccggaccggtgggcccacgaggccgtgatggagaagttggtgaaaaaggcgatgaaggcccacccggggatcccgggctccctgggaaggcaggcgagagggggctgaggggggcccccggcgtgcgtgggccagtcggggaaaagggggatcaaggcgacccaggtgaggacggacgaaatggatcccctgggagctcaggcccaaagggagatcgaggcgaaccggggcccccaggccccccaggtcgcttagttgacaccggcccgggcgccagggagaaaggcgagccaggcgaccgcggacaggagggaccacggggtccaaagggcgatccgggtctgccaggcgcccctggggaacgcggcattgaaggatttcgggggccaccgggtccccaaggtgacccaggcgtgcgtggccccgcaggcgagaagggggacagaggtccacccggattagatgggcgaagtggattggatgggaagcccggggctgcaggcccctccggcccgaacggagccgccggtaaagcgggggatcctgggcgggacggactccccggtcttagaggagagcagggcctgcccggcccgtcgggccctcctggcctgccagggaaaccaggtgaggatgggaaaccaggactgaatggaaagaacggtgaacctggcgatcccggggaggatggtaggaagggggagaagggcgactccggggcctccgggcgggaaggccgagacggtccgaaaggcgaaagaggggctcctggaatcctggggcctcaagggccaccaggactaccgggccctgtaggtccaccaggacaagggttccctggggtgcctggtggaacagggcctaagggtgataggggcgaaacgggcagcaagggcgaacaagggctgccaggcgaacgggggctaaggggcgagccagggtccgttcctaacgttgaccgtcttctcgaaaccgccggaattaaggcgagcgcactccgggaaattgtggaaacgtgggacgagagttccgggtcgtttttacccgtaccagagcgacgccggggacccaagggggactccggagaacagggcccacccggaaaggaaggcccgatcggatttcccggggagcgggggttgaagggggatcgcggggatcctggcccgcagggccccccgggactggctttaggcgagcgcggacccccggggccttccggcctggccggcgaacctggtaagccaggtatcccgggcctacccgggcgcgctggcggggtcggcgaggctgggcggccaggggaacgtggcgagcggggggagaagggtgagagaggcgagcaaggccgcgacggacccccaggactgcccggcacacccggcccgccggggccccctggtccaaaagtcagtgtggacgaacctggccccggcctgagtggcgagcaaggtcctcctggcttgaagggcgccaaaggagaacccggatctaacggagaccagggtcctaagggcgatcgcggtgtcccgggaatcaaaggcgacaggggagagccaggcccccgcggccaagacggtaatccaggcctccccggtgaaaggggtatggccgggccagaggggaaaccaggactgcagggcccccggggaccccctggaccagtaggcggtcacggcgatccaggacctcctggcgccccgggcctggccggacctgcaggtccccaggggccttccggcctcaaaggcgaacccggagagaccggcccccctggccgaggtcttacgggacctaccggcgccgtggggctgccagggccccccggaccgtctggtctcgtcggcccccagggctccccaggactgcctggccaggtgggggagactggtaaacccggagcaccaggccgcgacggtgcatcaggaaaggatggtgatagaggtagccctggtgttccaggaagtcctggcctccccggacccgtaggccccaagggggagccaggacctaccggcgctcctggccaggccgtggtcgggttgcctggcgctaaaggagaaaaaggggctcccggcggcttggccggggatctggtcggtgagcctggggcgaagggagaccgcggactcccggggcccaggggagagaaaggagaagccggacgggctggcgaacccggcgatcctggcgaggacggacagaaaggtgccccaggccccaagggctttaagggggatccaggggtgggggtgccggggagtcctggccccccgggtcccccaggcgtcaagggcgatttaggactccccggactgcctggagcaccaggagttgtgggattccctgggcagactgggccgagaggagagatggggcagcccggacctagtggggagagaggactggccgggcccccgggacgcgagggaatccccggacccttggggccacctggacctccaggctcagtggggccacctggggcaagtgggctgaaaggcgataaaggcgatcctggagtgggtctaccaggcccacgcggagagcgcggagagccagggatccggggtgaggacgggagacccgggcaggagggccctaggggccttacaggcccacctggctctcggggtgagcgcggcgagaaaggagacgtcgggagtgctggcctgaagggcgataagggggactcagccgtgatactgggtcctcctgggccgcggggtgcgaaaggggacatgggcgaacgcggcccaagaggcctagatggggacaagggccctaggggggacaacggggaccccggggacaaaggatctaagggggagcctggagataaaggttccgccggcctccccggcttacgaggccttctcggccctcagggtcagcccggcgccgcagggatccctggcgatccaggaagccctggcaaggacggcgtcccagggatccggggagagaagggcgatgttggtttcatggggccccgcggactgaaaggtgaacgcggtgtcaaaggcgcctgtggcctcgacggcgaaaaaggcgataaaggggaggccggacctcctgggcgccccggattggcaggacacaaaggcgaaatgggtgagcctggggtcccagggcagagcggtgcaccgggaaaggaggggctcatcggtccaaaaggcgacagagggttcgatggccagcctgggccaaagggggatcagggagaaaagggcgagcgtggtacccctggcattggggggttcccaggcccttccggcaacgatggctctgcaggaccaccggggcccccgggaagtgttggcccaaggggccccgaggggctgcagggacagaagggggagagggggcccccaggcgaacgggtcgtgggtgcacctggggtaccaggcgcccctggcgaaagaggagagcaaggcaggccagggcccgccggccctcgtggggagaaaggagaagctgcattgaccgaagatgacattagaggctttgttcggcaggagatgtcccagcactgtgcatgtcaaggacagttcattgcaagtggatcccgacccttaccaagctatgccgcggacacagcaggatctcagctgcatgctgtgcctgtcctgcgagtgagtcacgcagaagaggaagagagagtccccccagaagatgacgagtactctgaatactcagagtacagtgtggaggaataccaggatccggaggctccctgggattcggatgacccctgcagcctcccactggacgagggctcttgtacagcatatacccttcgctggtaccaccgggcagtcactgggagcacagaggcctgtcacccttttgtctatggaggctgtggaggcaacgcaaataggttcggaactcgggaagcatgcgagaggagatgtcctcctagagtcgtccagtctcagggaacaggaacagcgcaggat

SEQ ID NO: 1473 - DNA, 8832 bp, Artificial Sequence
  derived and/or modified sequence
atgactctgaggcttctggtggctgccctgtgcgctggcatcttggcggaggccccccgcgtgagagcgcagcatcgggagcgggtgacttgcacccggctgtacgccgccgatatagtgttccttctcgatggaagcagctccattgggcggtctaacttcagggaagtccggtcctttctcgagggactggtcctcccgttctccggcgccgcttcagcacagggagtgcggttcgccacggtgcagtactcagacgacccgcggaccgaattcgggctcgacgcactgggatctggaggcgacgtgatccgcgccatcagagaactgtcgtacaagggaggaaacacccggaccggagccgcaattttgcacgtggctgaccacgtctttctgccgcagctcgctcgcccgggagtccctaaggtctgcatcttgatcaccgatggcaaaagccaggatctggtcgatactgcggcccaaaggttgaagggccagggtgtgaagctctttgccgtgggtatcaaaaatgctgatccggaagagctcaaaagagtggctagccagccgacgtccgatttcttcttctttgtgaatgacttcagcatccttcgcactctgttgccactcgtctcccgccgggtttgcaccaccgccgggggagtgccggtcactcggcccccggacgactccacctcggctccccgggatctggtgctgtcggagccgtcctcccagtcgctccgcgtgcagtggactgcagcttcgggaccggtgacgggatacaaggtacagtacacccctttgactggccttggacaaccactgccgagcgagcggcaagaggtgaacgttccagcgggcgagactagcgttcggctgcggggactcagacccctcacggagtaccaggtgaccgtcatcgccctttatgcgaactctatcggcgaggccgtgtctggaaccgcccgcaccaccgcactggaagggccagaattgaccatccaaaacactacggcccattccctgctcgtcgcatggcggtccgtccctggagcgactggttatagagtgacctggagggttctctcaggcggaccgacgcaacagcaggaattgggaccaggacaaggatcggtgctcctccgggatctggagccgggaactgactacgaggtgactgtgagtactctctttggccggtcagtgggaccggcaacctctttgatggccaggaccgacgcatcggtggagcaaactctgcgccccgtgatcctcggcccgactagcatcctgctgagctggaatctggtccccgaagcgcgcggatacaggttggagtggcgccgtgaaacgggacttgaaccacctcaaaaagtggtcctcccttccgacgtgacccgctatcaactggacggtctgcagccgggaaccgaataccgcctgaccctgtacaccctcctggaaggccacgaagtggcgaccccggctaccgtcgtgcccactgggcctgaactgcccgtctccccggtcaccgatcttcaggccactgaactgccgggacaacgcgtgagggtgtcctggtccccagttccgggcgccacccaatatagaatcatagtcagatcaacccagggtgtggaacgcactctcgtgctgccaggctcgcagaccgccttcgacctggatgacgtccaagctggcctgtcctacactgtgcgcgtgtcagctcgggtggggccgcgcgaaggttccgcctcagtgctcactgtgagaagagagccggagactcccctcgcagtgccggggctcagagtggtggtgtccgacgccactcgcgtgcgcgtcgcttggggacctgtgcctggcgcctccggcttccgcatctcttggagcactggatccggaccagagtcgtcacagacgctgccgccggactcaaccgctaccgacatcactggactgcagccggggactacctaccaagttgccgtgtcggtcctccggggccgggaagaaggaccggcagcagtgatcgtggcccggactgatcccctcggacctgtccgcaccgttcatgtcactcaggcaagctcctcatccgtcacgatcacctggactagagtgcccggagccacgggatacagggtgagctggcactcggcccacggacccgaaaagtcacagctcgtgtcgggtgaagccaccgtggccgaactggacggactggagcctgacactgaatacaccgtgcatgtgcgcgcgcacgttgcgggtgtcgacggaccgccggcctcggtggtggtcagaaccgccccggaaccagtgggcagggtgtcccgcctccaaattcttaatgccagcagcgacgtgctgaggatcacctgggtgggagtgacgggagcgacggcctatcggctggcatgggggcgctcggagggcggaccgatgcgccatcaaatcttgccaggaaatactgattcggctgagattcgcggactggagggaggagtgtcctactcagtgcgggttacggcgctcgttggcgacagggaagggaccccggtgtcgatcgtggtgactactcctcccgaagccccgcctgccctcgggactctgcatgtcgtgcaacgcggagagcattccctccggctgaggtgggagccggtcccgcgggcccagggatttctgttgcattggcaacctgaaggtggtcaggaacagtcaagggtgctcggcccagaactctcgtcgtatcatcttgacgggctggaaccggcaactcaataccgggtgcgtctgagcgtgctgggaccggcaggcgagggcccatcggcagaagtgactgcccggaccgaatcaccgcgcgtgccttcaatcgagctgcgtgtggtcgatactagcatcgactcagtcaccctggcgtggaccccagtgtcccgggcgtcgtcgtacattctctcgtggcggcctctgagaggaccaggacaagaggtcccgggatctcctcaaacgttgccgggcatctcatcctcgcagcgggtgactggtctggaaccgggtgtgtcatacatcttctccttgactccggtgctggacggagtgagaggcccagaggcctcagtgactcaaactcctgtgtgcccgaggggactggcagatgtggttttcctgccacatgcaacgcaagacaatgcgcaccgggccgaagccactaggagagtgcttgagaggcttgtgctcgctctgggaccgctgggaccccaggctgtccaggtgggactgttgtcgtacagccaccggcctagccccctgttcccacttaatggatcacatgacttgggaattatcctgcaaagaatcagagatatgccgtacatggatccctcgggaaacaacctgggaaccgctgtggtgactgcacacagatacatgctggcacccgatgctcctggtcgcagacaacatgtcccgggagtgatggtcctcttggtggacgaaccgcttcggggagacatcttcagcccaatcagagaagcccaggcctcgggcctcaacgtggtcatgctgggaatggctggagcggaccctgaacaactccgccgcctcgcgccaggaatggatagcgtgcaaacttttttcgcggtagacgacggcccaagcctggaccaagccgtctcgggactggcaaccgcactgtgccaggcttctttcaccacccaaccgcggcccgaaccgtgcccagtctactgcccgaagggccaaaagggtgagccgggcgagatggggctgcgcggccaggtcggaccacctggggacccgggtctgcccggccggactggagcccctggaccgcagggcccgcccggatcggcaaccgccaaaggtgagcggggtttcccgggggcggatggtcggcctggaagccctggaagggcaggcaatcccggcactccgggagcgccgggtctgaaaggtagcccgggattgcctggaccgcggggagatcctggagaaagaggaccgagaggtcctaaaggagagcctggagctccgggacaagtaatcggcggcgagggtccgggactcccagggcggaagggagatcctggcccatccgggccaccgggaccgcgcggacctcttggggacccaggacctagaggacctccggggctgccaggaaccgcgatgaagggtgacaagggtgaccgcggagaacggggcccgccgggcccaggcgaaggaggaatcgccccgggagaaccgggactgccgggactgccaggatccccaggccctcaagggccggtcggtccgccgggcaagaaaggtgaaaagggcgactccgaggatggagctccaggacttccgggccagccgggatcaccgggagaacaaggcccgcgcggcccgcccggagcgatcggccctaaaggcgacagaggattcccagggcctctgggcgaagctggagaaaaaggggaaaggggaccacccggaccggccggatcgcgggggctcccgggtgtggccggcagacctggggcgaagggacccgaaggcccgcctgggccaacgggaaggcagggcgaaaagggagaaccggggcgccctggtgacccagcagtcgtcggccccgcagtggccgggccaaagggtgaaaaaggagacgtgggacccgctgggccaagaggagcgaccggagtgcaaggagaacgggggccacctggcctcgtgctcccgggggacccgggaccgaagggggaccccggagacagagggccaatcggacttactggacgggccgggccgccgggcgattcaggacctccgggcgaaaaaggagatcccggccggccgggcccgcccggaccggtgggacctcgcggacgggacggagaggtcggggaaaagggcgacgaaggacccccaggtgatccgggactcccgggcaaggccggagagcgcggtctgcggggcgccccaggagttcggggcccggtcggagagaaaggtgaccaaggagatccgggagaagatggaagaaacggatcacctggatcgtccggacctaagggcgaccgcggtgaaccaggccctccgggcccacccggacgtctggtcgataccggaccgggtgccagggagaagggtgagccgggtgatcgcgggcaagagggtcctcgcggacccaaaggggatcctggactcccaggtgctccgggtgagagaggcatcgagggctttcggggcccaccgggtccacagggagatccgggggtgcgcggacctgcgggtgagaagggcgaccgcggcccgcctggcctggacggacgaagcgggctcgacggaaaaccgggcgcagctggtccgtccggcccaaacggagccgccggaaaggctggagatccaggaagagacggactgcccggcctgaggggtgagcaaggcctgcccgggccgtcgggtcccccgggtctgccggggaagccgggggaggatggaaaaccaggtcttaacggcaagaacggcgagcctggcgacccgggcgaagatggccgtaagggagaaaaaggcgatagcggggcatcaggacgcgagggtcgggacggccctaagggtgaaaggggcgcgccgggaatactcggaccgcaggggcctccggggctcccgggcccggtcgggccgccagggcaaggatttccgggagtgccgggcggcaccgggccaaaaggggaccggggcgagactggttcaaagggcgaacagggactgccgggtgagcggggattgaggggtgaaccaggatcggtgccgaacgtggacaggttgctggagacggcgggaatcaaggcctccgcactgcgggaaatcgtggaaacctgggacgaatcctcgggatcgttcctcccagtcccggagcgcagaagaggaccgaagggtgattccggagagcagggtcctccagggaaggaaggtccgattgggtttcctggagagcgggggcttaagggtgataggggtgatccaggccctcagggcccgccaggactggccctcggagaacgcggaccgcccggtcctagcggcctggcaggagagcccggaaagccgggcatcccgggactcccaggacgggcaggcggcgttggcgaggccgggcgcccgggagagcgaggcgaacggggagaaaagggggaaagaggagagcagggaagagatgggcccccggggttgcctggaaccccaggaccaccgggaccacctggtcctaaagtgagtgtggacgaaccaggtccgggcctttcaggagagcaaggaccacccgggctgaagggggccaagggagaaccaggctcgaacggggaccaggggccaaagggagatcgcggagttccaggaatcaaaggggaccgcggcgaacccggcccaagaggacaggacggtaacccgggcctgcccggtgaacggggcatggcgggacccgaagggaaaccgggactccagggcccgcgcggaccgcctggaccggtgggtggacacggtgaccccggcccacccggcgcaccgggattggccggtccggccggaccgcaggggcctagcgggctgaagggagagcctggtgaaactggtccacccgggcggggattgactggacctaccggggccgtgggcctccctggtccgccgggaccgagtggattggtaggaccgcagggatccccggggctgccgggacaggtgggagagactgggaagccaggagcaccaggacgcgacggggccagcggcaaagatggagatagaggtagccctggtgtccccggaagtccgggcctgccgggcccagtcggaccgaagggggaaccggggccgaccggggcaccgggccaggcggtcgtgggcctgccaggtgcaaagggagaaaagggcgcacctggcggtctggccggtgacctggtgggcgaaccaggagccaaaggagacagagggctcccgggaccacgcggagagaaaggcgaggcgggccgcgcgggcgaacctggggacccaggtgaggacggacagaaaggagcaccgggcccgaagggattcaagggagatccaggggtgggagtgccggggagcccgggacctccgggaccgccaggagtcaaaggagatctgggactgcccggactgcccggagcaccgggtgtggtgggattccctggtcagactgggccgcgcggagaaatggggcagcccggcccgagcggggaacgtggcctcgccggacctccaggtcgcgaagggatcccgggcccgttgggcccgccaggaccacctggatcggttggacccccgggggcctccggactgaagggcgacaagggtgatccgggcgtcggtctgcctggtccgcggggtgaacgcggggagcccggtattagaggagaagatggaaggcccggccaggaaggacctagaggtctgaccggacctcctggatctcgaggggaacggggtgagaaaggcgatgtgggctcagcgggacttaagggagataagggagattcagctgtgattctgggaccgccaggcccgcgcggtgcgaagggggacatgggagaacgagggcctcgggggcttgatggtgataaaggtccgaggggagacaatggtgatcctggtgacaaaggctcgaagggggagccaggagacaagggctccgccggtctgccggggctgcgtggtttgctcgggccacagggacagccgggcgcggctggaattccaggcgatccgggcagcccagggaaagacggagtgccgggaataagaggagaaaagggagatgtgggattcatgggaccacgaggactgaagggcgagcggggagtgaagggagcctgcggtcttgacggggaaaagggagataagggggaggccggaccacctggccgcccaggactggctggacataagggtgaaatgggagagccaggagtcccgggccaatccggagctccgggaaaggaagggctcatcggacccaagggagatagaggattcgacgggcagccaggaccaaagggtgatcagggcgaaaagggagagagaggcactccaggaatcggcgggtttcctggaccgagcggcaatgacggctccgccggccctcctggacctccaggctccgtgggaccgagaggaccggagggactgcaaggccagaagggagagcggggtcccccgggtgagagggtcgttggcgctcctggagtgcccggcgccccgggcgaacggggcgagcagggcagaccgggcccggcgggcccaagaggagagaagggggaagctgccctgactgaggacgatatccgcggattcgtgcgccaagaaatgtctcagcactgcgcctgccagggccagtttattgcttcgggatcacgcccgctgccctcctacgcggccgatacggctggatcccagctgcacgccgtcccagtcctgagagtttcgcacgctgaggaagaagagcgggtgcccccggaggacgacgagtactccgagtacagcgagtactcagttgaggagtaccaggatccagaagccccctgggactcggacgatccctgcagcctgccgctggacgaagggagctgcactgcttacaccctgaggtggtaccaccgtgccgtgactggctccacggaggcgtgccacccgttcgtttacggtggatgtggcggaaacgccaaccggttcgggactagagaggcttgtgagcgccggtgtccaccgcgggtggtgcaatcgcagggcaccggcactgcgcaggat

SEQ ID NO: 1474 - DNA, 8832 bp, Artificial Sequence
  derived and/or modified sequence
atgacgctacgattgctcgtggccgccttgtgcgccgggattcttgccgaagcgcccagagtacgtgctcagcaccgcgagcgcgtcacctgcactcggctctacgccgctgatattgtgtttctgcttgacggcagctcttctatcggtaggtcgaactttcgcgaggtgaggtccttcttggagggccttgtcctacccttctcaggcgccgcaagtgcccagggggttagatttgctactgttcagtacagcgatgatccacgaactgagttcggtttggacgcgttggggagcgggggtgacgtgatcagggccattcgcgaactgtcttataagggaggcaataccagaaccggggctgccatcttacatgtagcggaccatgtgttcctgccccagctagctaggcccggtgtgccgaaggtgtgtatcctgataactgatggcaaatcacaggacctggtcgacaccgccgcccagaggctcaagggccagggtgtgaagctattcgccgtaggcattaagaatgccgatcctgaagagctgaagcgggtcgctagccaaccgacctcagacttctttttctttgtcaacgatttctcgattctgcgcacactgctgcccctcgtctctagacgtgtctgtactacagccgggggggtgccagtcactaggccacccgacgactccacaagcgcccccagggaccttgtcctcagcgaaccctctagtcaatccctaagggttcagtggactgccgcctccggccccgtcaccggatataaggtgcagtacacaccactgacagggttgggacaacccctgccaagtgagcgccaagaggtgaacgtgccagcaggcgaaacctccgtgcgactcagaggactccgcccactgacagaataccaggtgaccgtcatcgccctgtacgccaactcgatcggggaggctgtctcagggacggccagaacaacagccttagaaggccccgagctgaccatccagaataccaccgcccactctctgctcgtcgcatggaggtctgtgcccggagctacggggtacagagtcacctggagggtcttgtccggtgggccgactcaacaacaggagctgggtccgggacagggatctgtgttgcttagggatctggaacctggcacagattatgaggtgaccgtgtccactctttttggcaggagcgtcggaccagcaacgagcttgatggccaggactgacgcttcagtagagcagacactgcgacctgtgatcttgggacccacttcaatcttgctgagctggaacctcgttcctgaagcaagaggttatagactggaatggcgccgggaaaccggtctcgagcctccacagaaggtggtactcccttctgatgtgacaaggtatcagctggacggactgcagcccggtacagaatatcgactcactctgtatacactgctcgagggacatgaggtagccacccctgcaacggtcgtgccaaccggacccgagctgccagtctcacctgttacagaccttcaagccaccgaactgcctgggcagcgcgtgcgagtcagttggtcacccgttccaggcgccactcaatatcggataatcgttaggtccactcagggagtggagcggacattagtgcttcccgggtctcagacagcgttcgatcttgatgatgtgcaggcgggtttgagctataccgtgagggtgtctgcccgggtgggtcccagggagggctccgctagtgtgcttactgtaagaagagagccggagactcctctggctgtgccaggactccgcgtcgttgttagtgacgccactagggttcgggtcgcctggggaccagtccccggggcctctgggttccgaatctcctggtccacgggatcaggacctgaaagttcccagacgctgccgcccgattccacagccaccgatatcacaggtctccagcctgggaccacttatcaagtggctgtttctgtgctccggggacgcgaggagggcccggcagccgttatcgtagccagaactgatcctttgggcccagtgcgaacagtgcatgtcacccaggctagcagctcctcagttactataacctggacacgcgtgccaggtgctaccggctatagggtttcttggcattccgcgcatggacccgagaaatctcagctggtttcaggcgaggccacagtggcagaactggacggactggagcccgataccgagtataccgtacacgtgcgggcgcacgtggccggggtggatggtccccccgcatctgtggtagtcaggacagcacctgaacccgttggacgtgtgagcagattgcagattttgaacgcttcctccgatgtgcttcgcatcacctgggtaggcgtgactggagcaacagcctatcggcttgcatggggcagatcggaaggaggtcccatgcgccaccagattctgcctggcaataccgactctgccgagatacgaggactggaggggggggtatcctacagtgtgcgggtcacggcacttgttggagaccgggaaggcactccggtttcaatagtagttaccactcccccagaagctcctcctgccctgggaacacttcacgttgtccagaggggcgaacattcgctgcgtctccgctgggagccagtgcctagagcacaggggttcctgctgcactggcaaccagagggtgggcaggaacagtcacgagtgttggggcctgagttatcgagctaccacctggatggtttggaacccgctactcaatatcgagtccggttatcagtccttggccccgccggcgagggaccgtctgcggaggtgacagccagaacagaatctccgcgtgtcccctcgatcgaactgcgggtggtggacacttctattgattccgtgacattggcatggactccggtatcaagggcttcttcatatattctgtcgtggagacccctgcgcgggcctggacaagaggttcccggatctccacagaccctgcccggaatcagctcttcgcagcgagtcactggactggaacccggtgtgagctacatcttcagcctgaccccggtgttggatggcgtgcgaggcccagaggcgtctgtgactcagacccccgtctgtccccgcggtcttgccgatgtcgtctttctcccgcatgcgacacaagataatgctcatcgcgctgaagccactcgacgggtactcgaacgcctggtcttggcattgggaccccttggcccgcaggccgtgcaggtaggcctgttatcatatagccataggccatcacccctgttcccactgaacggttcgcacgaccttggtataattttacagagaattagggacatgccttacatggatccctccggaaacaacctggggacagctgtagtgacagcccaccggtacatgcttgcacctgacgcccctggcaggagacagcatgtgcccggtgtcatggtgctgctggttgatgaaccactgcggggcgacatctttagccctatccgagaagcacaagcctcaggtctgaatgtagtcatgctaggcatggccggggccgatcctgagcagcttcgaagactcgccccggggatggacagtgtgcagacctttttcgcagtcgacgacgggccttccctggaccaagctgtgtcagggctcgcgacagccttatgtcaggcatcttttacaacacagccgagacctgagccatgtcccgtttattgtccaaaaggccagaagggcgagcccggtgaaatggggctaagaggacaggtggggccccctggtgaccctggattgccggggagaacaggcgcacccgggccgcaggggcccccaggtagtgcaaccgccaagggggaaagaggattccccggcgccgacggcagaccaggatctccggggagagcgggcaatcccgggactccgggggcccctggccttaaggggagccctggcctccctgggcctaggggagatcctggtgagcggggccctagaggaccgaagggggaacccggagccccaggtcaggtcatcggaggcgagggccccggattacccggtagaaagggagatccaggtccttccggcccgcctggcccaagagggccgctgggggaccccggcccacgcggtccacccggcttgccaggcactgcgatgaaaggcgataagggggaccgcggggaaaggggtcccccggggcccggagaggggggtatcgccccaggggaaccaggcttgcccggattgcctggatcccccggcccacagggacccgtgggccccccagggaagaaaggagaaaagggggatagtgaggatggggcaccagggctgcccggacagcccggtagtcccggagaacagggtccaagaggccctcccggggcaattggaccgaaaggtgatagagggttcccagggcctttgggcgaggccggtgaaaagggggagcggggcccccccgggccagcaggaagtcgcggcctgcctggcgtggctgggaggcccggcgcaaagggtcccgaaggacccccaggcccgaccggaaggcagggtgaaaagggagagcctgggagaccgggtgaccctgcggtggtggggcccgcagtcgccggccctaaaggcgagaagggtgatgtggggcctgctggacctcgaggcgcgactggtgttcagggtgaacgcgggccacctgggcttgttctgccgggagatcctgggcctaagggcgacccaggagatcggggtcccatagggctcaccggccgagccggtcccccaggcgattctggacctccaggagaaaagggcgaccccgggaggccgggaccgcctgggccagtgggccctagaggccgcgacggggaggtgggcgaaaagggggacgaaggacctccaggtgatccgggattgcccggcaaagcaggcgagagagggttgagaggcgcacccggcgtacgtggccccgttggtgagaagggtgatcagggcgacccaggggaggatgggaggaacgggagcccaggctcaagtggccctaagggcgaccgaggggaaccaggcccaccgggtccacccggcagactcgtcgacaccgggccaggcgcgcgggagaaaggtgagcccggcgatcgaggtcaagagggacctcgtggccctaagggcgatcccggcctccctggggcacctggcgaacggggtatagagggcttccgcggcccgccgggccctcagggtgatcccggagtccgtggccctgctggtgagaagggggaccggggaccacccggccttgacgggcgcagtggcctggacggaaagcccggggcagctggacctagcggacccaatggagctgcggggaaagccggagacccaggcagagacggtcttccagggcttcgcggggaacagggtctgcctggcccgagcggacccccgggtctacccggcaaacccggggaggatgggaaaccaggtctgaatgggaaaaacggagaacccggagatcccggagaggatggtcgcaagggcgagaagggcgatagcggggcctcgggtcgcgaaggtagggacgggccgaaaggggagcggggggcccccggcatcctcggtccccaaggaccacctgggctgcccggacctgtcggcccccctggacagggatttccaggcgttccgggagggaccggaccaaaaggcgacaggggggagaccggctcgaagggcgagcaaggactgccaggagagaggggcctgaggggggaacctggctcggtgccgaacgtcgatagactgctcgagactgcaggcataaaggctagtgcactgagagagattgtagaaacctgggatgaatcatccgggtcttttttgcctgtgcccgagcggagacgggggcccaaaggggatagcggtgagcagggccctcctggcaaggaagggccgattggctttcctggagagaggggcctgaagggggaccggggcgatcctggaccccagggtccccccggactcgctctgggagaacggggccctccaggaccctctggacttgcaggcgagccgggcaaaccagggatccctggcctccctgggagggccgggggagttggggaagccggacgacctggcgaacgcggtgagcgcggtgagaagggcgaacgtggcgagcaaggccgcgacgggccacctgggttgccagggactcccggcccaccaggcccccccggaccgaaggtgtccgtggacgagccaggacctgggctgagcggagagcaggggcctcctgggctcaaaggagctaagggagaaccaggctccaacggagaccaagggcccaaaggagatcggggtgtgcctggcattaaaggcgatcgcggcgagccgggaccccgtggccaggacggcaatccgggcctgcccggtgaacgcggcatggcgggaccagagggaaaacctggcctgcagggcccaagggggccacccggccccgtgggagggcacggtgatccaggcccacctggagcgccgggactggctgggcccgcgggcccccagggtccgtcggggctgaaaggagaacctggcgagacggggccgcccggcaggggcttaacaggaccgactggtgcagtaggtttaccagggccccctggcccttccggccttgttggccctcagggtagccccggacttccaggacaggtaggggaaactggaaaaccgggggccccgggtagggatggggcgagcggaaaagacggtgataggggatcaccaggcgtgcccggctcccccgggctgcccggtcccgtggggcccaaaggggaacctggtccaacgggcgccccagggcaggccgtagtcggcctccccggggccaagggagagaagggcgctcctgggggcctggccggggacctggtgggggaacctggggccaagggcgatcggggattgcctggaccaagaggtgagaagggcgaagccgggagggctggggaacccggagatcccggtgaggacgggcagaaaggcgcccctgggccaaagggttttaagggggacccgggagtcggggttccaggcagccccggccccccggggccacccggtgtgaagggggatctgggtctgcccggattgcccggcgcacctggagttgtaggctttccaggccagactggacccagaggcgaaatggggcagcctggcccgagcggcgagagaggcctggcgggtccgccggggagggaaggtatacctggaccactgggcccgcctggtcccccggggagcgtggggccacccggggcgtctggtctgaagggagacaagggcgaccccggtgtgggcctaccaggtcccaggggagagaggggggagcccgggatcaggggggaggatgggaggcccggccaggaagggccccgcgggctgactggacctcccggtagcagaggagaaagaggtgaaaaaggtgatgtaggatccgctggtttgaagggagacaagggcgattcagctgtgattctggggccaccgggcccaagaggcgcaaagggcgacatgggtgaacggggtccccgcggcttggacggggacaaagggcctaggggagacaatggtgaccccggtgataagggtagtaagggcgagcctggggacaaggggtctgcaggtctaccaggacttcggggactcttaggcccccaaggacagccaggagcagctggaattcccggtgaccccggctcccccggcaaagacggcgtgcccggcattcgcggggagaagggcgatgtggggttcatgggcccacgaggcctgaagggcgagcgcggagtgaagggagcctgcggattagatggggaaaagggagataaaggcgaggcgggccctcccggacgacctgggttagccggccacaaaggggaaatgggcgagccaggggtccctggacaatcaggcgctcccggcaaagagggtctaattggaccaaaaggtgatcgggggttcgacggccagccgggacctaagggtgaccagggagagaagggggagcgtggcactccaggcatcggaggcttccctggtccctccggcaatgatggatcggcaggccctccagggcctcccggttccgtcggaccgcgaggacctgaggggctgcagggacaaaagggagaacgggggccacctggggagagagtggttggcgcccccggcgtgcccggcgccccaggcgaacgtggtgaacaggggaggcctgggccagcaggaccaaggggcgagaaaggagaggctgccttaaccgaagacgatattcggggttttgtaagacaggagatgtctcagcactgcgcgtgtcagggccagttcattgcctctggctcacggcccctgccaagctacgcggccgatacagcgggctcccagctgcacgcggtgccggtccttagggtaagccacgctgaggaggaagaacgggtcccaccagaggacgacgagtattctgaatactcagaatattccgtcgaggaataccaggatcctgaggccccatgggatagcgatgatccctgttccttgccactagacgaagggtcatgtacagcttacaccctgaggtggtatcaccgggctgtgaccggcagcacagaagcatgtcacccatttgtgtacggcggatgcggggggaatgccaataggtttggcactagagaggcttgcgagcgaaggtgtcccccacgggtggttcagtcgcaaggaaccggtacggctcaggac

SEQ ID NO: 1475 - DNA, 8832 bp, Artificial Sequence
  derived and/or modified sequence
atgactctgcgtctgcttgtcgcagcactgtgtgcaggcatactggctgaagcgccgagagtgcgcgcacaacatcgggaacgtgtgacttgtacccgcctgtacgcagccgacatcgtgtttctcctcgatggatcatcgagcatcggacgctccaactttagagaagtgcggtcatttctggaaggattggtgcttcctttttccggagcagcctcagcccagggagtgagatttgcaactgtgcaatattccgatgatccacgcaccgaatttgggctcgatgcacttggatccggtggtgatgttatccgagccattagggaattgtcctacaagggcggcaacacccgtacgggagcagcaattctgcacgtcgccgatcacgtattcctcccccaacttgcaaggcctggagtgcctaaggtgtgtatcctgattaccgacggaaagtcccaggatctggtggataccgccgcacaaagacttaagggtcagggagttaagctgttcgccgtgggcatcaaaaatgctgaccctgaagaactcaaacgcgtggcgtcccagccgacctccgatttcttcttttttgtgaacgattttagcattctgaggactcttctgccacttgtcagtagacgtgtctgcaccactgctggaggagtcccagtcactagaccgccggacgattcgacgagcgcccctagagacttggtcctgtccgaaccctcttcgcagtccctgagggtgcagtggactgcagccagcggtccagtgaccggctacaaggtgcaatacactcctctgactggcctcggccagcctctgccgtccgaacgtcaagaagtcaatgtcccagctggtgaaacctcggtgcgccttcgcggtctgcgccctcttaccgaataccaggtgactgtcatcgcactttatgcaaactccataggcgaggcagtgtcagggactgcgcgcacgaccgcacttgaagggccggaacttactatccaaaacacgacggcccattcgctgctcgttgcatggcgctcggtgcctggcgcgactgggtaccgagtcacctggcgggtgctgtcgggcggtccaacccaacaacaggaattgggacccggtcaaggcagcgtcttgcttagggatcttgaacctggaacggactacgaagtgactgtctcaaccctcttcggtcgttccgtgggccccgcaacctcgcttatggcccggaccgacgcatcggtggagcagaccctccggcccgtgattctgggccctactagcattctgctttcctggaacttggtgccagaggcgaggggatacaggctggagtggcggcgggaaaccggtctggagcctcctcaaaaagtggtgctgccatcagacgtgacccgataccagctggacgggcttcaacccggtactgagtacagactgacgctttacaccctgttggaaggacatgaagtggcgactccagcgaccgtggtgccaaccggacctgaattgccagtcagccctgtgaccgatctgcaagcaaccgagcttccggggcaacgtgtccgggtgagctggtcgccagtcccaggggcaactcagtaccgaattatcgtgcgttcgactcagggagtggagcggactcttgttctgccagggtcacaaacggcctttgatcttgacgacgtccaagcaggactctcctacactgtgcgggtgagtgcaagagtgggacctagagaaggatccgcttcggtgcttacggtgcggcgggaaccagaaactcctctggcagtcccaggcctgcgggtggtggtgtcggacgcaaccagggtgagggtggcatggggaccagttcccggggcatcaggctttcgtatttcctggtcaaccggttcaggtccagaatcatcacaaacccttccaccagactcgaccgccactgatataacgggactgcagcctggtactacctaccaagtggccgtgagcgtgctgagaggaagagaggaaggtcctgctgcagttattgtcgcgcgtacggatccattgggaccagtgagaaccgtgcatgtgacccaggcgtcgtcatccagcgtgactatcacctggactagagtgccaggagccacgggttaccgcgtcagctggcattcggcgcatggacccgagaagtcgcaacttgtcagcggggaggccactgtggccgagctggatggacttgaacctgatactgagtataccgtgcacgtgcgagcccacgtggcaggcgtggatggtccaccagcgagcgtggtggtcagaactgcaccggaaccagtcggtcgtgtgtcgcggctgcagatccttaatgcgtcctcggacgtgctgcggattacctgggtcggtgtcaccggagcaactgcataccggctcgcatggggccgatccgaaggaggtccgatgcgtcaccagattctgccaggaaacaccgattctgcagaaattcggggacttgaaggaggagtttcctactccgtcagagtgacggcattggtcggcgatcgtgaaggaactccagtgtctatcgtggtgactactccgccggaggcaccgcctgcactggggactctccatgtggtgcagcggggggaacatagccttagactccgatgggagccagtgccgagagcacaaggatttctcttgcactggcagcctgagggtggtcaggaacaatcccgcgtgcttggtccagaactttcgtcctaccacctggatggccttgaacctgcaactcagtaccgagtgcggctttccgtgcttgggcctgcaggtgaaggaccttcggcagaggtcaccgcccggactgagtcgcctagagtgccatcaatcgagctccgagtcgtcgatactagcatcgactccgtgaccttggcatggacccctgtcagcagggcatcgtcttacatcctttcatggcgtccccttagaggtcctggccaagaagtcccgggaagccctcagactctccctggaatctcatcgtcacaacgcgtgaccggactggaacctggtgtcagctacattttcagccttaccccagtccttgacggagtgcgcggacccgaagctagcgttacccagacccctgtgtgcccgagaggtcttgcagacgtggtgttcctcccccatgcaacccaagataacgcccatagagcggaagccacgagacgcgtcttggaacggctcgtgctggcactcggtcctctcgggccccaggcagtgcaagtgggacttctgagctacagccatagaccctccccgctgtttcccttgaacggatcccatgatctgggcatcatcctccaaaggattcgggacatgccatacatggatccttcggggaacaacttgggtactgccgtggtcactgcccaccgctacatgctcgcccctgatgcacctggccgacgacagcatgtgcctggagtgatggtccttctcgtcgatgaaccgctgcggggtgacattttctcaccaatccgggaagcacaggcatcgggtctgaacgtggtgatgcttgggatggccggcgcggaccctgaacaactgagacggctggcacccggcatggatagcgtccagacttttttcgccgtggatgatggtccgtcccttgaccaggccgtctcgggtttggcaaccgcgctgtgtcaggcctcgttcaccacccaacctcgtcccgaaccttgtccggtgtactgtcctaagggccaaaagggggaacctggtgagatgggtcttagaggccaagtcggacctccaggtgatccaggattgcccggtagaacgggagcccctggcccacagggacctcctggatcagcgaccgcaaagggcgagaggggctttcctggagcagatggccgacctggttcacctggtagagcaggcaacccggggactccaggcgcgcctggtcttaaggggagccccggacttcccggcccaaggggtgatccaggggagaggggtcctcgcggtccaaaaggagaaccaggggcaccaggccaagtcattggaggggaagggcccgggctcccgggtcgcaagggcgatcctggtccctctgggccacccggtccaaggggccctctgggtgaccccgggcctcgcggccctcctggactgccaggaacggcaatgaagggtgataaaggggatcgcggtgaacgtggtccacccggacctggagaaggaggaatagcacccggagaaccgggcttgccagggctgccgggttctcctggacctcaaggccctgtcggtccccctggaaagaagggagaaaaaggggattccgaggatggagcacctggacttccgggtcagcctggctcaccgggcgagcaggggccccgcggtccaccgggagcaataggacccaagggtgaccgcggatttcctggtccgttgggtgaagctggggagaagggtgagaggggacctccaggtcctgcaggttcccggggactgccgggtgtcgccggcaggccaggcgcaaagggaccagagggtcctccgggccccaccggacgacagggagagaagggggaaccaggacgtccaggtgatccggcagtggtgggtcctgccgtggcaggacctaagggggagaagggagacgtggggccggcaggaccaagaggagcaaccggcgttcagggcgagagaggaccacctggcctcgtgctgcctggggatccaggtcccaaaggagatccaggggatagaggtcccattggactcaccgggagagcaggccctccaggagattcgggtccaccgggagagaagggcgatcccgggcggcccggtccaccagggcccgtggggccgagggggagagacggagaggtgggtgaaaagggagatgaaggccccccaggagatccaggactccccggaaaggccggggagcgaggacttcggggtgcccccggggtcagaggcccggtgggagaaaaaggtgaccagggagatcctggagaagatggcaggaatggctcaccaggaagctcgggaccaaaaggtgaccgcggagaaccaggacctcccggtcctcctggtaggctggtggataccggtcccggtgcgcgggaaaaaggcgagccgggtgacagaggtcaagaaggcccacggggacccaagggtgaccccggtctgcctggtgccccgggcgagaggggaatcgagggttttcgcggccctccggggccacagggtgatcctggagtccgaggccctgcaggggaaaaaggcgaccgggggccaccgggattggacggacggtcgggactggatggtaagcctggggcagcaggacctagcggccctaatggagcagccggcaaggccggagatccgggtagagatggactccctggactgcggggtgaacaggggctccctgggccatcgggtccgcctgggcttccaggcaagcctggagaagatggaaagccagggctcaacggcaagaacggagaaccaggcgaccctggcgaggatggaaggaagggggaaaagggcgattcaggagcatcgggcagagaaggcagagatggacctaagggagaaagaggagcacctggtatactgggccctcaaggaccccctggtctgccaggtcccgtggggccaccaggacagggattccctggagtgcccggtggcaccggaccaaaaggggaccgcggtgaaaccggatccaaaggagagcagggactcccaggagaaagaggactgagaggagaacctggttcagtgcccaacgtggataggcttcttgaaactgccggtattaaggccagcgcccttcgcgagattgtcgaaacctgggacgaatcctccggatcctttctccccgtacctgaacgcagaagaggtccaaagggtgattccggagagcaaggcccacctggcaaggagggaccaattgggttcccaggtgaacgaggacttaaaggtgacagaggggatccgggaccacagggacctcctgggctggcattgggggaaagaggacctcctggcccctcggggcttgcaggagagccgggaaagcctggaatcccagggctccctgggagagcaggaggggtgggtgaagcggggaggcccggtgagagaggggagagaggcgaaaagggagaaagaggtgaacaaggacgggacggaccacctgggctgccaggcactcctggaccacccggtccccccggacctaaggtgtcagtcgatgaacctggacccgggctctccggggaacagggtcctccaggcctgaagggagcaaagggtgagccgggatcgaatggcgaccagggtcctaaaggggatagaggtgtgccaggcattaagggtgatcggggggaaccaggaccaagaggacaggacggaaacccagggctcccaggagagagaggaatggcaggtcctgaaggaaagccaggtttgcaaggtcctcggggaccccccggacctgtgggcggtcatggagatccaggcccacccggtgcacccggactggcaggccccgcaggaccccaggggccttcaggactcaaaggggaaccaggtgaaactggaccaccagggagaggtctgactggtcccacgggagcagtcggacttcctggtcctcccggcccttccgggctggtgggaccgcaaggaagcccagggctgcctggccaagtcggagagactggaaagcctggtgccccaggtagagatggagcaagcggaaaggatggagacagaggttcaccaggagtgccaggatcgcctggtctgcccggaccagtgggtcctaaaggtgagcctggtcctaccggggcgcccggtcaggccgtggtgggacttccaggcgcaaaaggagaaaagggcgccccagggggtttggcaggtgatctggtcggagaaccaggagcaaagggagatcgcggattgcccggcccacgcggcgaaaaaggagaagccggacgagctggcgagcccggggaccctggggaagatggacaaaaaggtgcacctgggccaaagggatttaagggcgatcctggggtgggcgtgcctggctctcccggccctcccggtcctccgggagtgaagggtgatctgggtttgccaggactgccaggagcccccggtgtggtgggctttccaggccaaaccggacctagaggtgaaatgggtcagccgggaccttcgggagagcgaggcctggcgggaccgcctggtagggaagggatacctggcccccttggaccacctggccccccggggagcgtgggcccaccgggtgcctccgggctgaagggagacaaaggagatcccggagtgggtttgccaggccctcgtggcgagagaggagaacccggaatcagaggggaggatggaaggccagggcaggaaggtcctcgaggacttacgggaccgcctggcagccggggcgaaagaggtgagaaaggagacgttggctcagcaggactgaaaggagataaaggggattccgcagtcatcctcggacctcccggtcctcgaggtgcaaagggtgatatgggtgaaagaggtcctcgcgggctggacggagacaagggtccccggggagataacggcgacccgggcgataagggctccaaaggggaacccggtgataaaggatcagctggtttgcccggtctgcggggtctgttgggcccgcaaggtcaacccggagcagcgggcataccaggcgaccctggctcacctggcaaggatggtgtgcccggaattcgaggggagaagggggatgtgggattcatgggaccacgcggcctcaagggagaaagaggagtaaagggagcgtgcggccttgacggagaaaaaggggataaaggagaggccgggccaccgggtcgtcccggcctcgcggggcataagggggagatgggagaacctggagtccctggacaatccggagcaccgggaaaggaaggccttattggtcccaaaggagatagaggcttcgacggtcagcccggacctaaaggggaccagggtgagaagggagaacgcgggactccaggaattggtggatttcctggtccctcaggaaatgatggttctgccggtcctccagggccacctggttctgtgggacctagaggaccagaaggacttcagggtcagaagggtgagcgcggtcctcctggcgagcgggtcgtgggtgcccccggagtccccggtgcacctggagagcgtggagaacaaggacgccctggacccgccggtccaaggggtgaaaagggcgaagcggcgctcactgaagatgatattcggggatttgtgcgccaggaaatgtcgcagcactgtgcatgtcagggacagttcatcgcctccggaagccggccacttccaagctacgcggcagacaccgccggttcccaattgcacgcagtgcccgtgcttcgcgtctcccacgcggaggaagaagaacgggtgcctcctgaagatgatgagtattccgaatactcagagtactccgtggaagaataccaagatccggaagcaccatgggattcagacgacccttgttccctgccgttggatgagggttcgtgcactgcatacacgctgcggtggtaccacagagccgtgaccggttccaccgaagcatgccacccatttgtgtacggtggatgcggcgggaacgcgaaccgatttggaactagagaagcatgcgaaagacgctgccctccacgcgtcgtgcaatcccaaggtaccggtacggcacaagac

SEQ ID NO: 1476 - DNA, 8832 bp, Artificial Sequence
  derived and/or modified sequence
atgacgctccggctgcttgtggccgcactgtgcgccgggatcctggcagaggctcctcgggtccgggcgcaacatcgggaacgggtgacttgtacgagactctacgcggctgacatcgtgtttctgttggacggttcctcgtcgatcgggcggtccaacttcagggaggtccggtccttcctcgaggggctggtgctgcctttcagcggcgcagcctccgcccagggagtccgctttgccaccgtgcagtacagcgacgatccaagaaccgaattcggacttgatgccctgggatcaggaggggacgtcattagagcgatccgggagctctcgtacaaaggaggaaacactagaaccggagctgcgattctgcacgtggccgaccatgtctttctgccacagttggcccggccgggagtgccgaaggtgtgtattctcattaccgacggaaagtcacaggacctggtggacaccgccgctcaacgactgaagggacaaggagttaagctgttcgcggtgggtatcaaaaacgcggacccggaggaactgaagagggtggccagccagccaacgtcggatttcttcttctttgtcaacgacttttccattttgcgcactctgctgccgttggtgtcgagacgtgtctgcaccaccgcaggaggagtgccggtcacgaggccaccggacgattcgacttctgcaccgcgtgacctggtgttgtcggaaccatcgtcccaatccctcagagtgcagtggactgccgcatcggggccagtgaccggctacaaggtgcagtacactccgctcaccgggctgggccagccactgccgtcggaacggcaagaagtgaacgtcccggccggagaaaccagcgtgcggttgcgcggactgcggccgctgaccgagtaccaagtcaccgtgatcgccttgtacgcaaattctatcggagaagctgtctccggtaccgcacgcaccaccgccctggagggaccagagctgaccattcagaatacgacggcccactcactgttggtggcgtggcgctcggtgccgggcgcaacggggtatcgggtgacgtggagggtgctgtccggcggcccaactcaacaacaagaactcggaccaggacagggctccgtgctgctgagagatctggaaccggggaccgattacgaggtgaccgtctcgaccttgtttgggcgctccgtcggcccagccacgtcgctcatggcccgcaccgacgccagtgtcgaacaaaccctgcgccctgtgatcctgggacccacctcaatcctgctttcttggaacctcgtgcccgaggccagaggataccgcctcgaatggcggcgggaaaccggacttgagccaccacagaaagtagtcttgccgtcagatgtgactcgctaccagctcgatggactgcagccgggcactgagtacagactcactttgtacacccttctcgaagggcacgaagtggcgacgccggccaccgtcgtgcctactggaccggaactgccggtgtcaccagtgactgatctgcaagccactgaactcccaggtcagcgagtgagagtgagctggtcaccggtgccgggagcaactcagtaccgcatcatcgtgcggtccacccagggagtggagcggaccctcgtgctgccgggatcgcagactgcattcgacctggacgacgtgcaggcagggctctcttacaccgtgcgagtctcagcccgagtgggccctcgcgaaggaagcgcatccgtgctgaccgtgcgcagggagccggaaaccccgctcgcggtgccagggctgcgggtggtggtgtcggacgcgactagggttagggtggcatgggggccagtgccaggagcgagcggttttagaatcagctggtctacgggatccggaccggaatcgagccaaaccttgccgcctgattcgaccgccactgacattactgggctccagccaggcactacctaccaggtcgcagtttccgtgctgcggggccgggaagagggaccggcggccgtgatcgtcgcgcggactgacccgctggggcctgtgcggacggtgcatgtgacccaggcgagcagctcctcagttactatcacgtggacgcgggtcccgggcgccactggataccgcgtgtcctggcattcggcccatggaccggagaagtcccagcttgtgtcaggagaggccactgtagctgagttggatggcctcgagccggacaccgaatacaccgtgcacgtgcgcgcccatgttgcaggagtcgacggaccaccggcgtccgtcgtggtgcgtaccgccccggaaccagtgggacgcgtgagccgcctccagatcctcaacgcatcttcagacgtgctgcgcatcacctgggtcggagtgacgggagcgactgcatacagattggcttggggtcggtcggaagggggaccgatgcggcaccagatcctgccgggcaacaccgatagcgctgaaatcagaggcctggagggaggcgtaagctactccgtgagagtgaccgctctggtaggcgatcgggaaggaaccccggtgagcatcgtcgtgacgacccctccggaagcgccgccggcactcggaaccctgcacgtggtgcagcgcggggagcacagcctgcggcttcggtgggagccggtgccgagggctcaaggatttctgctccactggcagccggaagggggacaagaacagtcgagggtcctcggcccagaactgagctcgtatcatctggatggactggaacctgcaactcaataccgtgtgagactgtccgtcctgggtcctgccggggaaggcccgtccgcggaagtgaccgcgaggaccgaatcacctagagtgccctccattgagctccgggttgtggacaccagcatcgattccgtgactctggcctggactccagtctcacgcgcctcctcgtacatcctctcgtggcgcccgcttcgcggcccgggccaggaagtcccaggctcgccgcagaccctcccaggcatctcctcgtcacagcgcgtgactggcctggagccgggagtgtcgtacattttctccctcactcccgtgctggacggggtgcggggcccagaggcctcggtcacgcaaaccccagtgtgccctagggggctcgccgacgtggtgttcctgccacacgcgacccaggacaatgcgcacagggctgaagcaactcggcgcgtgctggagaggctggtgctcgccttgggcccactgggaccgcaagctgtccaggtggggctcctttcttacagccatcgcccgtcccctctgttcccgctcaacggcagccatgaccttggaattatcctgcagcgcatccgggacatgccatacatggacccgtcgggcaataacctgggaactgctgtcgtgaccgcccaccgctacatgcttgctccagacgcgcccggccgcagacaacatgtgcctggagtgatggtgcttctggtggatgaaccgttgaggggagacatcttctccccgatccgggaagcgcaggcgagcggattgaatgtggtcatgctgggcatggccggtgctgacccagagcaactccggcggctggctccgggtatggattcggtccaaacgttcttcgctgtggacgatggaccgtccctggatcaggctgtgtccggcctggcgactgcactgtgccaggcatcattcactacccagccgcgcccggaaccatgtcctgtgtactgcccgaaaggacaaaagggggaaccaggagagatgggactccgggggcaagtcggaccaccaggcgatcctggactgccgggacggactggagccccgggcccacaagggccccctggatccgcgactgccaagggggagagaggattcccgggagctgatgggcggccgggaagtccgggccgggctggtaacccggggacccctggcgccccgggacttaaaggttcgcccgggctcccggggccgaggggtgacccaggagaacggggcccgaggggaccgaagggcgagccaggcgcacctggacaggtcatcggaggcgagggaccagggctgccgggacggaagggtgacccgggaccaagcgggccgcctggaccacgcggacctctcggagatcccggaccgcgcggcccacctggactccctgggaccgccatgaaaggcgacaaaggagatcgcggcgaacgcggacctccgggaccgggcgaagggggaattgcaccgggcgaaccgggcctgccagggctccccggctcacccggaccgcagggaccggtgggcccgccgggaaagaagggcgaaaagggcgactctgaggacggtgcacctggactgcccggccagccgggctcgccaggagagcaaggaccacgtggcccgccgggagcgatcggaccaaaaggtgaccgtggattccccggcccgctcggggaagcaggagaaaaaggagaacgagggccacctggccccgccggctccagaggactcccgggcgtggcaggtaggccgggtgctaagggcccagagggtccgccaggcccaactggtagacaaggtgaaaagggagagccgggacggcctggagatcctgcagtggtcggacctgcagtcgcaggtccgaaaggggaaaagggagatgtgggacctgcgggaccccgcggggcaactggcgtgcagggagaacggggcccgccaggactcgtgctgcctggggaccccggaccaaagggggatcctggcgatcggggcccgatcggacttactggtagggccggacctccgggcgattccggaccaccaggggagaaaggcgacccaggtcggcctggaccaccaggaccagtcggtcctcgaggcagagatggagaagtcggcgagaagggagatgagggtcccccgggggaccccggcctgcctggcaaggcaggagagcggggcctgagaggcgccccaggcgtcaggggaccagtcggagaaaagggtgaccagggcgaccctggagaagatggaagaaatggcagccctggatcctccgggccaaagggcgacagaggggagccgggaccacctgggccaccggggcggttggtggatactggcccaggagctcgggagaagggggagccaggagatcgcggacaagagggaccgagaggccctaagggcgaccctggactccctggcgccccgggagagcgcggaatcgaaggattcagaggaccgcccggtccccagggggacccaggagtgcgcggtcccgccggtgaaaaaggggatcggggtccgccgggactcgatgggagatcaggcctcgacgggaaaccgggagccgctggaccgtccgggcctaacggagcagcgggaaaagctggagatcccggacgggacggactgccgggactgcgcggcgaacaagggctgcccggcccgtccgggcccccaggactccctggcaaaccaggggaagatggaaagccggggctcaacggaaagaatggagagccgggtgatcctggagaggacggacgcaagggggaaaagggggattccggagcatccggacgcgaaggccgggatggcccaaagggagagagaggagcgcctggcatcctcggcccgcagggaccgccgggtttgccgggaccagtcgggcctcctggacagggatttccaggagtgccggggggaaccggacccaagggcgatcggggtgagacgggaagcaagggggaacaagggttgcctggcgaacgcggtctgcgtggggaacccggatcggttcccaacgtcgaccgcctgctggaaactgcgggtatcaaggccagcgccctgagggaaatcgtagaaacttgggacgagagctcaggctccttcctgccagtgcccgagcgccgtagagggccgaagggcgactccggggaacagggccctcctggaaaagaaggacctattgggttcccgggagagagaggattgaaaggcgatagaggcgaccctgggccgcaaggtcctccgggacttgcattgggtgagcgcggaccccctggcccgtcgggattggctggtgaaccaggtaaacctgggatcccagggcttccgggacgcgctggcggcgtgggggaggcgggcagaccaggagaacgcggggaaagaggagagaagggggagcggggtgagcagggtagagacgggcccccgggacttccgggcaccccgggaccaccggggccaccgggaccgaaagtctccgtggacgagccgggtccgggactcagcggcgaacagggcccgccagggcttaaaggagcgaagggcgagccaggatcgaacggggatcagggaccgaagggagatcggggagtccctggaattaagggagatcgcggtgagccgggaccacgcggccaggacggaaaccctggccttcccggagagcggggcatggcgggaccggaaggtaagcccggccttcaaggtccacgcgggccgccgggtcctgtcggcggacacggcgacccgggaccgccgggtgctccaggactggccggtcctgccggaccccagggaccaagcggccttaaaggagagcctggagaaacggggccaccgggcagaggattgaccggccctactggtgccgtcgggctgccgggaccaccaggaccctcgggcctggtgggcccgcaaggttcaccaggactgccaggacaggtgggagaaactggtaaaccaggtgcgccaggtcgggacggagcaagcggaaaggatggtgatagaggtagcccaggggtaccaggatcgccaggcttgcctggtccagtgggcccaaagggggaaccggggcctaccggcgccccgggacaagcggtggtgggactgccgggtgcaaagggtgagaagggagcccccggaggccttgcaggggatcttgtgggagaacctggtgccaagggagacagaggtctgccagggccgcgcggagagaagggcgaggccggacgagccggcgagcctggcgatcccggagaggacggacagaagggtgccccggggccgaagggattcaagggggacccgggcgtgggagtgccgggatcaccggggccgccaggcccaccgggagtcaagggcgacctgggactgcctggattgccgggagccccgggagtggtgggtttcccgggtcagaccggtccgcggggagaaatgggtcaacccggtccgtccggggagagaggattggccggacctcctgggcgggagggcatcccaggcccgcttggaccgcctggcccaccgggctcggtgggtccgcccggagcgtcaggacttaagggtgataagggtgacccaggcgtgggtctgccgggaccgaggggggagcggggagaaccgggcatcaggggcgaggacggcagaccgggccaggaaggcccgcggggcctgactggaccgccgggatcccgcggagaaagaggagaaaagggagatgtcggatcggctggactcaaaggcgataagggagattcggccgtgatcctgggaccgccaggcccaagaggagcgaagggagacatgggggaacgcggcccgcgcggactggacggagacaaggggccgagaggtgacaatggggatccaggggataaaggatcgaagggagagccgggtgacaaaggaagcgccggactgcctggcctccggggattgctgggaccgcagggacagccaggcgcggccggaattcccggcgacccagggagccctggaaaggacggtgtgccgggaatcagaggagagaaaggtgatgtgggatttatgggaccgagaggtcttaaaggagagcgcggggtcaagggagcctgcggactggatggagagaaaggtgataagggggaggccggaccgccaggccgccctggactggcgggccacaagggtgaaatgggcgaaccaggagtgccgggacagtcgggagcgccaggaaaggagggcctgattggacctaagggcgatcggggattcgacggccagcccggcccaaaaggggatcagggtgaaaaaggagaacgcgggaccccaggaatcggcggattcccggggccgtcgggaaatgatggatcggctggtccgccgggacctccgggctcagtggggccacgcggaccagagggactccaggggcaaaaaggagaaaggggtccgccgggggagcgcgtggtgggcgctcccggagtccccggcgcccctggagagcggggcgaacaagggaggcccggacctgcagggcctcgcggcgagaagggcgaagctgccctcactgaagatgatatccggggattcgtgagacaagaaatgagtcagcattgcgcgtgccagggacagtttatcgccagtggatcacggccgctgccgagctacgcggcagacaccgccggcagccagctccatgccgtgcccgtgctcagggtgtcccacgccgaggaggaggaacgagtgcccccggaggacgacgaatactcggaatactctgagtattctgttgaggaatatcaggaccctgaggctccatgggactcagacgatccttgcagcctcccgctcgatgaaggctcgtgtaccgcatacacccttagatggtaccaccgggctgtgactggttccactgaagcatgccacccattcgtgtacggtggatgtggaggcaatgccaaccgctttggtactagagaagcctgcgaacgccgctgcccgccgagggtggtgcaaagccagggaaccggaaccgcgcaggac

SEQ ID NO: 1477 - DNA, 8832 bp, Artificial Sequence
  derived and/or modified sequence
atgaccctccgcttgctcgtggcggcattgtgtgcaggaatcctcgcagaagctccacgcgtgagagcgcagcatcgagaacgcgtgacctgtaccaggctgtacgcagcagatatcgtgttcctgctggacggttcatcgtccattggacggtcaaactttagagaagtgcgttcctttctggagggactcgtgcttcctttctccggggcggcatccgcacaaggcgtgcggtttgcaactgtgcagtattccgacgacccacgaactgaatttggacttgacgcgcttggctcgggtggtgacgtgataagagctattcgggagctgtcatacaagggaggtaatactaggaccggagccgcaattctccatgtggccgatcatgtgttccttccccagttggcccgcccgggagtgcctaaggtgtgcattcttatcaccgatggcaaatcgcaagacttggtcgatactgcagcacagaggctgaaaggccagggggtgaaattgttcgcagtgggaatcaagaacgcagatccagaagaactgaagcgagtggcgtcccagcctacctccgatttcttcttcttcgtgaacgattttagcatcttgagaaccctgctgccactggtgtcacgtagggtgtgtaccaccgcaggaggtgtccctgtgacccggccccctgatgattccacctcggcacctagagatctcgtgttgtcggagccgtcctcgcaatcgctgcgagtgcagtggactgcggcatcggggccagtcactggctacaaggtgcaatacactccgttgaccggcctgggtcaaccactgccatcggagcggcaggaggtgaatgtgccagcaggagaaacttcggtgcggcttcgtggcctccgccctctcacggagtatcaagtgactgtgattgcactgtacgcaaactcaattggagaggctgtctcaggcaccgcacggactactgcattggaaggacctgaactgaccatccaaaacactaccgcccattcactgctcgtggcatggcgctccgtccccggagccactggttacagggtcacctggcgtgtgctctctggtggacctacccagcaacaagaactgggaccagggcaaggctcggtccttcttcgcgatttggagccaggtacggattacgaggtgaccgtttccactttgttcggcagatccgtgggtccagcgacttcgctcatggcaaggactgatgctagcgtggaacagacgttgcggcctgtgatacttggacctacgtccattttgctttcctggaacctggtgcccgaggccagaggataccggttggaatggcgtagagaaaccggccttgagcctccgcaaaaagttgtcctgcccagcgacgtgaccagataccaactcgacgggctgcagcctggtactgagtaccgattgacgctgtacaccctgctggagggacacgaagtggcaactccagccaccgtcgtgcctacgggaccagaacttcccgtgagccccgtgaccgatcttcaagcaaccgaactgccaggacaacgagtgcgtgtgagctggtcgccagttccaggcgcgactcaataccgaatcatcgttagatcgactcagggagtcgaacggactcttgtgctgccaggatcgcagactgcatttgacttggatgatgtccaggcaggtcttagctacacggtgcgagtcagcgcacgtgtcggtcctagagaaggttcggcgtcggttctgactgtgaggagagaaccagaaacccctcttgccgtgcctggtcttagggtcgtcgtctcggatgcaacgagagtccgcgtggcgtggggcccagtgccgggggcatcgggatttagaatctcatggtcgaccggcagcgggcctgagtcatcccaaaccctgccccctgattcaactgcaaccgacatcactggtctgcagcctgggaccacttatcaagtggcagtctcggtgctgcggggtagggaggagggacccgccgcagtgatcgtggctcgtaccgatcctctgggtcctgtcaggacggttcatgtcacccaggcttcgtcctcgtcagtgaccattacctggacccgggttccgggagcaacggggtacagagtgtcgtggcattcggcacatggaccagaaaagagccagctcgtgtccggtgaagccaccgttgcggagcttgatggcctcgaacctgacactgaatacacggtgcatgtgagagcgcacgtggctggggtggatggtccacccgcatctgtggttgtgagaaccgcacctgaacctgtcggcagagtgtcacgcttgcagattttgaacgcatccagcgacgtgctgagaattacctgggtgggagtcactggtgcaactgcttataggcttgcgtggggacggtccgagggtggcccaatgaggcaccagattcttcccggaaacactgatagcgcagaaatccgcggccttgagggcggagtgtcatactcagtgcgcgtgactgcacttgtcggggacagggaaggcactcctgttagcattgtcgtgactaccccacccgaggcgccgccagcgctgggaaccctccacgtggtccaacgtggagagcattcactccggctgagatgggaaccggtgcctcgcgcgcaggggttcctcctgcattggcagcccgagggaggccaagaacaatcaagagtgctgggacctgaactttcgagctaccatctggacggactggagccagctactcaataccgtgtgagacttagcgtgctcggtcctgccggggagggtccgtctgccgaggtgactgcaagaactgaatccccacgcgtgccttcgatagagcttagggtcgtggatacttccattgatagcgtcaccctggcctggacgcccgtctcgcgagcatcaagctacatcctgagctggaggccgctgcgaggaccaggacaggaagtgcctggatctccacagacccttcctggcatttcatcgtcacaacgggtcactggccttgagccaggagtgtcctacattttctcgctcacgcctgtgctcgacggagtcagaggacctgaggcttcagtcactcagactcccgtgtgtccaaggggcctggccgacgtggtgtttctgcctcacgcaacccaggacaacgcacaccgtgcagaggccactcgtcgcgtgctcgagcggcttgtcctggcactgggtcccctgggtccacaagcagtccaagtcggcttgttgagctactcgcaccggccttctccactttttcctcttaacggttcccatgatctcggaatcattctccaaagaatcagagacatgccatacatggatccatctggcaacaatctcgggaccgccgtggtcaccgcccatagatacatgcttgctcccgacgctcctggccgtagacagcacgtgcccggggtcatggtgctccttgtggatgaacctcttcggggagatatcttcagcccgattagggaagcccaagcaagcggattgaacgtcgtcatgttgggaatggcaggtgcagaccccgaacaacttagacgcctggcacctgggatggactcggtgcaaaccttttttgccgtggacgacgggccctcgctggatcaggcggtgagcggcctggcaaccgcactctgccaggcgtcctttaccacgcaacctagacccgagccttgtccagtttactgtcctaagggacagaaaggtgagcctggcgagatgggccttcgcggacaggtcggtccaccgggtgaccctgggcttccgggacgcactggagcccctggacctcagggtccacccggttctgcaaccgcaaaaggtgaacggggattccccggcgcagatggacgacccgggtccccgggccgtgcagggaatccgggcactccgggtgcccctggactcaaagggtcgcctggtttgccaggccccagaggcgatcctggtgaaaggggtccacggggcccgaagggtgagcctggtgcccccgggcaggtgatagggggagaaggacctggcctgcccggcaggaagggtgatccaggaccgtcggggccaccaggtccgcgcggcccactgggcgaccctggcccaagaggcccaccaggcctccctggcacggctatgaagggtgataagggtgatcgtggtgaaagaggacctcctgggcccggcgaaggaggaattgcaccgggagaacccggacttcctggactgcctggatcaccagggcctcaaggacccgtcgggccaccagggaaaaagggagaaaagggagattcagaggacggagccccaggcctgcccggacaaccaggttccccgggagaacaaggcccgcggggaccgcccggcgcaatcggccctaagggggatcggggatttcccggaccgctgggtgaagcaggggaaaagggggaacggggaccaccagggcccgccggatcaagaggacttcctggagtggccgggaggcccggggccaaaggtccggagggtcctcctggacccaccggtagacaaggagagaagggagaaccagggcgccccggagatcccgccgtggtgggccctgcagtcgcaggccccaaaggcgaaaagggtgacgtgggcccggccggtccacgaggtgcaactggggtccagggagaacgaggtccacctggacttgtgctccccggtgatccaggaccgaagggggacccgggagatagaggacccatagggctcaccgggagagccggtccaccgggggattctggcccccctggtgagaagggagatccgggaaggcctggcccgcctggtccggtgggtccacggggccgggacggagaagtcggagagaaaggggatgaaggaccacctggtgatcccggtctgcctggtaaagcaggagagcggggtctgagaggcgccccaggagtcagaggccccgtgggagaaaagggggaccaaggtgatccaggtgaagatggaagaaacggtagccccggtagctcaggacctaagggagatcgtggagagcctgggcccccgggaccacccggtcgcctcgtcgataccggacctggcgctagggaaaagggcgaacccggggaccgagggcaagaaggtcctcgtggacctaagggagatcccggactgccaggcgccccaggagagcgcggaattgaagggtttcgtggtccaccaggtccccaaggtgaccctggagtgcgaggaccggcaggagaaaaaggagatcgaggccctcccgggcttgatggaagatcaggactggacggtaagccgggagcggccgggccttccggtcccaacggggcagccggaaaggccggtgaccctgggcgagatggacttcccggtctgcggggggagcaaggccttcctggtccaagcggaccacctggactgcccggaaagcccggagaggatggcaagcctggcctgaacggtaaaaacggagaaccgggggatcctggtgaagatggtcgcaagggtgaaaagggcgattcaggggcatcggggcgagagggacgcgatggtcctaagggcgaaaggggcgcacctgggattcttggcccgcaaggtccacctgggctgccaggaccagtcggcccgccaggccaaggttttcccggggtgccaggcggaactgggcctaaaggagatcgcggagaaaccggttcaaagggagagcagggtctgccaggtgaacgagggcttaggggcgaaccgggtagcgtccctaatgtggatagattgctcgaaactgcagggattaaggcgtcagcactcagagagattgttgaaacctgggatgaatcctccggatcctttctgcctgtgccagaacggcggagaggacctaagggagactcgggggagcagggtcctcctggtaaggagggacctattggatttcctggtgaaagggggctgaaaggcgatagaggtgatcctgggccccagggacctcccggtctggcactgggagaaagaggtcctcctggtccttccgggctggcaggagaaccaggcaagcctggcataccggggttgcccggaagagcaggaggcgtcggagaggccgggcggcccggggaacggggagagagaggtgaaaagggcgaaaggggtgagcaaggtagagacgggcctcctggcctgcccggaactcccggaccgccagggcctcctggtccgaaggtgtcagtcgacgaacctgggccaggcctttcgggtgagcaaggtcctcctggtctgaagggtgcaaagggggagcctggtagcaacggtgatcaaggacctaaaggggaccggggagtccctggaattaagggagatcgtggggaacctggtcctagaggccaggacggaaacccaggactccctggtgaaagaggtatggcaggtccagagggaaagcctggtctgcaagggcctcgcggtccccctggacctgtcggaggacacggcgatcctggcccccctggagctcctggtctggcaggaccagccggaccccagggaccttccggtttgaagggtgaacctggtgaaactggaccccccgggcggggtctgaccggacctaccggggccgtcggccttcccgggccacctggaccatcaggacttgtcggaccacaaggttcccctgggctccctggacaagtgggagaaaccgggaagccaggggcacccggccgggacggagctagcggaaaggatggcgatcggggatcgcctggagtgccaggatcccctggtttgccaggacctgtcggaccaaagggagaaccagggcccaccggtgcaccaggacaagctgtggtgggacttccgggagcaaagggcgaaaagggtgccccaggtgggcttgccggagatctcgtgggtgaacccggcgcgaagggtgatcgcggactgccgggacctcgcggggagaagggcgaagccggtagagcgggagaaccaggagatcctggtgaagatggacagaagggagcaccaggacccaaggggtttaaaggcgatccaggtgtcggagtccctggatcgccagggcctcccggcccacctggtgtgaagggagatctgggcttgccaggtctgcccggtgcaccgggcgtggtgggattccccggacagacggggccaagaggagaaatgggtcaacctggtccatccggagaacgaggactggcgggtcctcctggcagggaaggaatccctggtccgctgggccctccgggtccacctggttcagtcgggcctcccggagcctcggggctgaaaggggataagggagatccaggagtgggtttgcccggcccaaggggagaacgcggtgagcctggaattagaggggaagatggtagacccgggcaagagggtcctcgcggactcactggcccgccgggatccagaggagagagaggagaaaagggcgacgtgggtagcgctggactcaagggggacaaaggagacagcgccgtgattcttggccctcctggtccgcgcggggcaaagggggatatgggcgaaagaggtccacgtggtctggatggcgacaaaggacccagaggcgataacggggatccaggtgacaagggctcgaagggagaacctggcgacaagggaagcgcaggactgccaggactgcgtggcctgctgggacctcaaggtcagcctggtgcagcaggtatccccggcgatcccggatcccctggtaaagatggagtgcctggcattcggggtgaaaagggagatgtcggctttatggggccaaggggactcaagggagaaagaggagtgaagggcgcttgcggacttgatggtgaaaaaggggacaagggtgaagccggaccaccagggcgccccggacttgccggccataagggcgaaatgggtgagccaggtgtccccgggcagtccggagctccaggtaaggaaggtcttattggtccgaaaggtgatcgcggatttgacggacagccagggccaaagggagatcagggcgaaaagggcgaacgtggcaccccaggaatcggaggttttcctggtccatcgggtaacgacggcagcgcaggtccaccaggaccaccaggttcggtgggacctcgcggaccagagggactgcagggacaaaaaggagaaaggggacccccgggagaaagagtggttggggcaccaggagtgcccggagcgccaggggagcgaggagagcaaggacgtccaggtccggccggaccaaggggagaaaagggtgaagcagccctcacggaggacgacataagaggatttgtgagacaagagatgtcgcagcactgcgcatgtcagggccaattcatagcaagcggatcccggcctcttccttcctacgctgcagacactgccggatcgcaactccatgctgtgcctgtgctgcgagtgtctcatgctgaggaagaagaacgagtgccacccgaagatgatgaatactctgaatacagcgaatactcagtggaggaataccaggatcccgaagcaccttgggattctgacgatccttgttcactccccttggacgagggttcctgcaccgcttacaccctgcgctggtaccaccgcgcggtcaccggtagcactgaggcatgtcatccttttgtctacggtggatgtggggggaatgcaaatcgcttcgggaccagggaagcatgcgagaggcgctgtcctcctagagtcgtgcaatcgcagggaactggaaccgcacaagat

SEQ ID NO: 1478 - DNA, 8832 bp, Artificial Sequence
  derived and/or modified sequence
atgaccctcaggctcttggtcgctgcactttgcgccggcatactggccgaggcaccgagagtgcgcgcccagcacagagaaagagtcacgtgcactcgcttgtatgctgcggacatcgtgtttctcctggacggttcatcaagcattggcagatctaatttcagagaagtcaggagttttctggaaggactggtgctccccttctccggtgcggcttcagctcagggcgtgaggtttgctacggtacagtactctgatgatcccaggacagaatttggattggatgctttgggttctggtggtgacgtgattcgcgcaatccgcgaactctcatacaaaggaggaaacaccagaaccggagctgctatcctgcacgtggcggaccacgtctttttgccacagctcgctcgccctggagtgcccaaggtatgtattttgattaccgatggtaagtctcaggatctggtggacacagctgcgcagaggctgaagggccaaggagtaaaactgtttgccgtcggtatcaagaacgccgatccggaagagctgaaaagggtagcatcacagccaacctctgatttcttctttttcgtcaacgattttagcatcctgaggaccctgttgcccctggtttctagaagagtctgcactacagctggcggagtccctgtcacacgcccacccgacgacagcacgtctgccccaagagatctggttctgtcagagccctctagtcagtccctgagagttcagtggaccgctgcctctggccctgttaccggatataaagtgcagtacacaccactgacaggacttggacaaccactcccaagtgaaaggcaagaagtcaacgtccccgcgggcgagaccagcgtcaggttgcgcggcctcaggcccttgacagagtaccaagttacagtgatcgccctctatgcaaactctattggcgaagcagtgtccggaaccgcaagaaccaccgcacttgagggtcccgaattgacgattcagaacactacagctcactccttgctcgtggcttggagatccgttccaggtgccactggctacagggttacgtggagagttttgagcggtggtccaacgcagcagcaggagctgggcccaggtcaaggtagtgttctcctgagggacctggaacccggcacggattacgaggtgaccgtctccaccctgttcggtcgcagcgtgggaccagctacgagtttgatggcgagaacggatgcttctgttgaacaaacacttcgccccgtcatattgggaccaacctccatcctgctgagctggaacctcgtgccggaggcacgcggttaccgccttgaatggaggcgcgagaccggactcgagccacctcagaaggtggtcctgcctagcgacgtaacacgctaccagttggatggtctgcagcccggtacggaataccgcttgaccctgtataccctgttggagggccacgaagtggcgacaccggctacagtcgtgcccactggccctgagctgcctgtttcccccgtcactgacctccaggccaccgaactccctggtcaacgcgttagagtttcttggagtccagtccctggtgcaactcagtaccgcatcattgtaagatccacacaaggcgtggaacgcacattggtactccctggaagccaaactgcctttgacctggatgacgtgcaagcaggactctcttacacagtaagagtgtctgctagagttggtccccgcgaaggcagtgccagtgtgctgactgtgaggagagaacccgagacccctctcgccgtccccggcctgagagtcgtcgtctcagacgccactcgcgtgagggttgcatggggaccagtgccaggcgcctctggattcaggatatcctggagtactggctcaggccctgagagctcccagaccctgccccccgattctaccgctactgacattaccggtctgcagcccggaacaacataccaggtggccgtgtccgtgcttagaggtagggaggagggacctgcagctgtcatcgtggctaggacggatccccttggccccgtgcgcaccgtacacgtgacacaagcatccagcagcagtgtaacaatcacatggacgcgcgttcctggcgcaacaggttacagggtgagttggcactctgcccatggccctgagaaaagtcagttggtatccggagaagccaccgtcgctgaactggacggtcttgaacccgatacagagtacacggttcacgtaagggcccacgtcgccggtgtggacggtcctccagctagtgtagtggtgaggaccgcgccagagcctgtgggacgcgtgtctaggcttcagattttgaatgcttcttctgatgtcctcaggatcacctgggtgggagtgactggtgccactgcttatcgcctggcttggggcagatcagagggtggcccaatgagacaccagattctgccaggcaacaccgactccgcagaaatccgcggtttggaaggaggtgtgagctatagtgttagggttactgcgctcgtgggtgatagagagggaacacccgtcagtatagttgtaacaactcccccagaagctcctcctgcgctcggtaccctccatgtggtgcagcgcggagagcatagcttgagattgagatgggagcctgttccccgcgcccaaggattcttgttgcactggcagccggaaggtggccaggaacaaagtcgcgtcctgggtccggagctgagctcttaccatttggacggtctggagcctgccacacagtatagggttaggctgtcagtcctgggccctgctggcgaaggaccgtctgcagaggttacagctagaaccgagagtcctagagtaccatctattgaacttcgcgtcgtagatacctctattgattcagtcaccctggcgtggactcctgtctcacgcgcctcttcatacatccttagctggaggcccctgaggggaccaggtcaggaggtgcccggttctccccaaaccctcccaggcattagtagttctcagagagtcaccggcttggaaccaggtgtctcctatatttttagcctcactccagtgctggatggagtacgcggtccagaagcgagcgtgacacagacacctgtgtgtcctaggggactggccgatgtcgtgttcctcccccacgccactcaggacaacgcacatagggctgaagcgacccgcagagtccttgagaggctggtgctcgccctcggtcctctgggaccgcaagccgtccaagtgggccttcttagttattcccataggccctccccattgttcccactcaacggctctcatgacctcggaatcatcctccagaggataagggatatgccttacatggatcccagcggtaacaacctcggcacggccgtcgtgacagcccacagatacatgttggcccctgatgcccccggccgccgccagcatgtcccaggtgtgatggtgttgctcgtagatgagcctcttcgcggtgacatcttctcaccaattagagaggcgcaagcctccggcctgaatgtggtgatgctcggaatggccggcgcagaccccgaacaattgaggagactggcacctggcatggactctgtgcagactttcttcgcagtggacgatggcccttctctcgaccaggcagtgagtggcctcgccaccgccctttgccaagcttctttcaccacacagccacgcccagagccgtgcccagtgtactgtccaaagggacagaaaggcgagcctggcgaaatgggtctcagaggccaggtgggtccccccggagacccgggactcccaggcaggacgggtgcccctggtccacagggccctcctggatctgcgaccgcaaagggtgaacgcggattcccaggcgctgacggtagaccaggatcccctggaagagcgggaaatcctggcacgcctggagcgcctggtctgaagggcagtccaggactgccgggcccacgcggtgacccgggcgaaagaggaccaagaggacccaaaggcgaacccggagctccaggacaggtgatcggaggagagggacctggcctgcctggaaggaagggcgacccaggtccatctggcccaccgggacctaggggtcctttgggtgaccccggtcctcgcggacccccaggccttccaggaactgctatgaagggtgacaaaggagacaggggcgaaaggggccccccaggccccggtgaaggaggaattgctcctggagagccaggattgcctggactcccaggatctcccggaccccagggacctgtaggcccacccggtaaaaaaggtgagaagggtgacagcgaggacggagcccccggcctcccaggacagcccggtagccctggagagcaaggtccccgcggaccaccaggcgccattggacctaagggcgataggggctttcctggaccccttggcgaagcaggagagaagggcgagagaggtcctcctggccctgccggctccaggggtttgccgggcgtggctggtagacccggcgctaaaggccctgagggacctcctggtcccaccggaagacagggagagaaaggtgaaccgggtagaccaggagaccccgcggttgtcggtccggcggtcgctggaccaaagggtgagaagggagacgtgggcccagctggaccacgcggcgcgactggagtgcaaggtgaaagaggcccacctggattggtgctgccaggagaccctggtcccaaaggtgacccaggcgataggggtcccatcggactgactggtagagcaggcccacctggtgactccggaccgccaggagagaaaggcgatcctggccgcccgggaccccccggaccagtcggacctcgcggcagggacggtgaagtcggcgaaaaaggagacgagggtcctcctggagaccctggcctcccaggtaaagcaggcgaacgcggactcaggggtgctccaggcgttagaggacccgtcggcgagaagggtgatcagggcgatcccggtgaggacggtcgcaacggcagcccgggctcctcaggcccaaagggcgatcgcggagagcctggacccccaggccccccgggacgcctcgtggacactggccctggcgctagagaaaagggtgaacctggtgacaggggccaggagggaccccgcggtcccaagggagacccaggcctcccgggtgctcccggcgagcgcggaattgagggcttccgcggaccaccaggaccccagggagatccaggtgtacgcggccccgcgggcgagaagggagacagaggaccacccggcttggacggaagaagcggtctcgacggaaagcctggagctgctggtccttcaggtcccaacggtgctgcaggcaaagccggagaccccggaagagatggacttcctggacttcgcggtgagcaaggactgccaggtccatccggtccacccggactccctggtaagccgggagaggatggtaagccgggtctgaacggaaaaaatggcgagcctggagatcctggagaggacggcagaaagggcgagaagggtgacagtggcgcgagtggcagggagggtagggacggccctaaaggcgaaagaggtgctcctggaatcctgggcccacagggaccacccggactcccgggcccagttggaccccccggccagggctttcctggcgtaccaggcggcacaggcccaaagggagacaggggtgagactggttccaaaggcgaacagggcctgcccggtgaaagaggtctgaggggagagccgggctccgtaccgaacgtggaccgcctgcttgagacagcgggtataaaagccagcgctctgcgcgaaatcgtcgagacctgggatgagtcatctggctccttcctgcctgtgcctgagaggaggaggggcccaaagggcgactccggcgagcagggaccccccggcaaggaaggaccgattggttttcctggcgaaaggggcttgaaaggcgacaggggcgaccctggaccccaaggcccacccggtctggctttgggtgagagaggaccgccaggtccctccggtctggcaggagaaccgggtaagccgggcatccctggcttgccaggccgcgccggtggtgtcggagaggccggaaggcccggagaacgcggagagaggggtgagaaaggtgagcgcggcgagcagggcagggacggacctccaggcctgccaggcacaccaggtcctcccggtccacctggcccgaaggtgtcagtcgacgaacccggtccgggtttgtccggtgaacagggcccccccggcctgaaaggcgccaagggtgagccaggctctaacggtgaccagggccccaagggtgatagaggagtccccggaatcaaaggtgatagaggcgagcctggcccacgcggtcaagacggcaatcccggcctgccgggagaaaggggaatggctggcccggaaggtaagcccggcctccagggtccaaggggaccacctggtcctgtgggcggtcacggagatcctggcccgccaggcgctcctggtttggccggaccagcaggtccacagggtcccagtggactgaagggagagccaggcgagacaggcccgcctggcaggggtcttacgggtccgacgggcgcagttggtctccctggtcccccaggcccctccggcctggtcggtccccagggtagtcctggacttcctggtcaggtgggtgagactggcaagcctggagcacccggtagggacggagcgtcaggaaaggacggcgataggggtagccccggagtccctggctcccccggcctgcctggtcccgtgggaccaaagggagagcctggccctacaggagccccgggtcaagccgttgtaggtttgcccggagccaagggcgagaagggtgctcctggcggactcgccggagacctggtgggcgaacccggcgctaagggcgatagaggcctgccgggcccaaggggtgagaagggagaggcaggccgcgctggtgaaccgggagaccccggcgaagacggtcagaagggagcccccggccctaagggtttcaaaggtgaccctggagtgggagtacctggcagtcccggtccccccggccctcctggcgtcaaaggagatctgggtctgcctggtctgcccggcgcccccggcgtggtgggattcccaggacagacaggtcctcgcggagaaatgggtcaacccggaccgagtggtgagaggggccttgctggccccccaggcagggagggaatacctggtcctctgggtccgcccggtccccctggaagtgtcggaccgcccggcgctagcggactgaagggtgataagggagatccaggagtgggactccccggtccccgcggcgaaaggggagaacctggcatacgcggagaagacggtaggcctggacaggagggccctcgcggcttgaccggtccccccggatccagaggcgagaggggcgagaaaggcgacgtgggcagcgcaggcctgaaaggtgacaagggtgactctgctgtgatcctgggaccgccaggtcctcgcggtgccaagggcgacatgggagaaagaggtccgagaggactcgacggtgacaaaggtcctagaggtgacaatggcgaccccggagacaagggcagtaagggcgaacccggtgacaagggtagcgctggtttgcccggactgaggggactgttgggtcctcaaggtcagccaggtgcagccggaatacccggtgatcccggatcacccggtaaggacggagtgcctggaatccgcggtgaaaagggcgacgtcggattcatgggtccccgcggattgaaaggagagagaggcgtgaagggtgcttgtggactggacggcgaaaagggcgacaagggtgaagccggtccgccaggtagacctggtctggccggccataagggagaaatgggcgaacccggagttccaggccaatccggagcccctggcaaagaaggtttgattggccctaagggcgatcgcggtttcgacggtcaaccaggccctaagggagatcagggcgaaaagggcgagaggggcacaccgggtattggaggatttcccggaccctccggtaacgatggctctgcgggaccccctggtccgcctggctccgttggccctagaggcccagagggtctccagggtcagaagggtgaacgcggtcctcccggagaaagagtggtcggagcacccggtgtccccggtgcgccaggcgagcgcggcgagcagggcaggcctggacctgcaggtccaaggggtgaaaagggcgaagcggccctgactgaagacgacattagaggattcgtcagacaagaaatgagccagcactgcgcctgccagggtcagttcatagcaagtggttcccgccccttgccaagctacgccgcagacactgcaggatctcagctccacgcagttcccgtgctcagagtgtcccacgccgaggaggaagagagagtacctcccgaggatgatgagtacagcgagtactcagagtactcagttgaagagtatcaggacccggaggccccttgggacagtgacgacccctgcagtctgcccctggacgagggttcctgcactgcgtatacactgcgctggtatcacagggccgtaaccggatctaccgaagcctgtcaccctttcgtttatggaggttgcggcggcaacgctaatagatttggtacgagagaggcttgtgagagaaggtgtcctccccgcgtggtacaatctcagggcacgggaactgcgcaggat

SEQ ID NO: 1479 - DNA, 8832 bp, Artificial Sequence
  derived and/or modified sequence
atgactcttcggctgctggtggcagcactctgtgcaggaatactcgctgaggcacctcgtgtgcgagctcaacacagggaaagagtcacgtgtaccagactctacgccgcagatattgttttccttcttgatggctcctcaagcattgggcgaagcaactttcgtgaagtgaggtcgtttcttgaaggtttggtgctgccattcagcggggcggcatcggcacagggggtgcgcttcgcaactgtgcagtacagcgacgacccccggaccgaatttggacttgacgcacttggtagcggtggagatgtgattagagcaattagagagcttagctacaagggtggcaacacccggactggtgcggccatacttcatgtggccgaccacgtgttcctgcctcaactcgcaaggccaggtgtgcctaaggtttgcattctgattactgacggaaagtcccaggacctggtcgacacggctgcccaacggctgaagggacagggggtcaagctcttcgcagtcgggataaagaacgcagatcccgaagaactgaagagagtggcatcccagcctacctcagatttcttcttttttgtcaatgatttttctatacttcgaactcttctccctctcgtgagcagacgcgtctgtactaccgcaggaggagtgcctgtgaccaggcctccagacgattcgacgagcgctccccgcgaccttgtgctttcggaaccttcctcacaatcgctgcgcgtgcagtggactgccgcgtccggacccgtgaccggatacaaagtgcaatacactcctcttaccggccttggacagccacttccatcagaaaggcaggaagtgaatgtgcctgcaggagaaacctcagtccgtctgaggggactgcgtccgctgaccgaataccaagtcactgtcattgccctgtacgcaaacagcataggcgaagcagtctccggaaccgcaagaaccactgcactggaagggcctgaactgactatccaaaataccaccgcgcatagcctgcttgttgcttggcgatcggtgcccggagccaccggttaccgtgtgacttggagagtcctgtccggaggaccgacccaacagcaagagcttggacccggtcaaggttcggtcctgcttagagatcttgaaccaggaaccgattatgaggtcaccgtttcgaccctttttggccgatcggtcggccccgcaacttcgcttatggctcgtactgatgcatccgtggagcagacccttcgacctgtgatcctcggtcctacctcaatccttctgtcatggaatcttgtgcctgaagcgagaggataccggctggaatggaggagagaaaccgggctggagccaccccagaaggtcgtgctgcctagcgatgtgacgagataccaattggatgggcttcaaccgggaactgaataccgtctgactttgtacactctgcttgagggtcatgaagtggccactccggctactgtggtgccaactgggccagaattgccagtgagccctgtgaccgacttgcaggccaccgaacttcctggccaacgcgtccgcgtctcttggagcccagtgcccggggcaactcagtataggataatcgtcagatcgactcagggggtcgaaaggacgctggtgcttccagggagccaaactgcatttgacctggatgatgtgcaagcggggctgtcctacactgtgagagtgtccgcgagagtcggtcccagggaaggttcagcctcggtcctgactgtgaggagggaacctgagactcctctggcagtcccagggctccgcgtggtcgtatccgatgcaactagagtcagagtggcctggggaccagtgcctggcgccagcggattccgcatttcatggagcacgggtagcggaccagaatcgtctcaaaccctcccacccgattcgactgcgactgatatcactggcctgcagcccggcactacttaccaagtggccgtgtccgtactccggggacgcgaggagggacctgcagccgtgattgtcgccagaaccgaccctctgggtccagtcaggactgtgcatgtgactcaggcatcgtcatcgtcggtgaccattacctggactagagtaccaggtgctactgggtacagagtgtcatggcattcagcacatggcccagaaaagagccaactcgtgtcgggagaagcgaccgtggcggaattggacgggcttgaaccagataccgagtacaccgtgcacgtgagagcccatgtcgccggagtggacggcccaccagcaagcgtcgtggtgagaaccgcccctgagcctgtgggcagggtttccagacttcaaatcctgaacgcctcttccgatgtgctccgcattacttgggtgggggtgactggcgcgactgcttaccgtctggcatggggtcgttcagagggtggacctatgaggcaccaaattcttccaggcaataccgattccgcagaaattagaggcctggaaggaggggtcagctactccgtgcgggtcacggccctggtgggagacagggaagggactcccgtgtccattgtggtgaccacccctcctgaggcgccacctgctttgggtactttgcacgtggtccaacggggagaacattcccttcgcctgagatgggaacctgtgccgcgcgcgcagggattcctgcttcattggcaaccagaaggagggcaggagcaatcgcgcgtgctgggacccgaactgtcgagctatcacctggacggcctggagccagctactcagtacagggtgcggctttcagtgctgggccctgcaggggaggggccctcggccgaggtcactgcccggaccgagtcgcctcgcgttccctcgatcgaacttcgggtggtggatactagcatcgattccgtgacgctcgcttggacccctgtgtcgcgtgcttcatcgtacattctgtcatggcgccctcttagaggccccggtcaagaggtcccagggagccctcaaaccctgcccggaatttcgtcctcacaaagggtgaccggattggagcccggcgtgtcctacatcttttcgcttactccggtgcttgacggagttaggggaccagaagcatcagtgacccaaacgcctgtgtgtcccaggggactggcggatgtggtctttctcccgcatgcaactcaggataacgcccacagagcagaggctaccagaagggtgcttgaaagattggtgctcgccctgggccccctgggcccgcaggctgtgcaagtcggacttctgtcctactcccacaggccctcccctctgtttccgcttaatggtagccatgatctcggcataatcctgcagcggattagagacatgccatacatggacccatcgggaaacaatcttgggaccgcggtcgtcaccgcacatcgatacatgctcgctccagacgccccgggtcgtagacaacacgtgcctggcgtgatggtgctccttgtggacgaaccactgcggggtgacatctttagtcctatcagggaagcgcaggcctcaggacttaacgtggtgatgctgggcatggctggtgctgatcccgagcaactcagacgtctggcaccaggtatggattcggtgcaaacgttctttgcggtcgatgacggaccatccctggatcaagccgtatccggcctcgcaaccgcactttgccaagcgagcttcaccacccaaccgcgcccagagccttgtcccgtgtactgcccaaagggacagaaaggagagccgggagaaatgggacttcgcggacaggtgggaccaccgggcgacccaggtttgccaggtcggaccggtgcacccggaccacaggggcctccaggtagcgcgactgcaaaaggagagagagggtttcctggcgctgatgggcgcccaggttccccaggtagagctgggaacccgggaactcccggtgcaccaggcctcaagggttcgccagggctgccaggaccacgcggggatcctggtgagagggggccgcgtgggcctaagggtgaacccggagcacctgggcaggtgatcggaggagaagggccggggcttcctggtcgtaagggtgatccaggaccgtcaggtccaccgggcccacgaggaccactgggggatccagggcctcgcggaccaccaggactcccaggtactgcgatgaagggcgataagggtgataggggcgaaagagggcctccaggtccgggagaaggcggtatcgctcccggtgagccaggattgccagggctgcctgggtcacctgggccacaaggacctgtgggtcctcctggtaagaagggagagaaaggagattcggaggatggggcgcctggcctcccggggcagcctggatctccaggagaacaaggcccacgcggtccacccggtgcaatcgggcctaagggcgatcgcggcttccctggtcctctcggagaggcgggagaaaagggtgagcgagggcctcctggaccagctggtagcagagggttgccaggagtcgcaggtcgtccgggtgcgaaaggtcctgagggaccgcctggtccaaccggaaggcagggcgagaagggagagccaggacggcctggcgatcctgcagtggtgggtcctgcagtggcgggtccaaagggggaaaagggcgacgtgggccctgccgggcctaggggggcaaccggtgtccaaggcgagcgtggcccacctgggctcgtgctgcccggtgaccctggacccaaaggcgaccccggcgatcgagggcctattggacttaccgggagagcgggaccgccaggagacagcggaccacctggggagaagggagatcctggacgtccaggaccgcctggtccagtgggtcctaggggccgggatggggaagtcggagaaaagggagacgagggacccccaggagatcccggtttgcctggaaaagcaggagaacgtggactccggggcgcccctggggttcggggaccagtcggtgaaaagggagatcaaggagatcccggagaggacggtcgcaacggttcgcctggttcgagtggccctaagggtgacaggggagaaccaggaccaccggggccgcctggccgccttgtcgacaccggtcccggagccagagagaagggggagcctggagatcggggtcaggagggaccacggggaccaaaaggtgaccctggactgcctggcgcgcctggagaacgaggtatcgaaggttttaggggaccacctggacctcaaggtgaccctggtgtgcggggtccagcgggtgaaaagggggaccgtggaccaccaggactcgatggcagatcgggactcgatggcaaaccaggagccgcaggaccttcgggaccgaacggtgcagcggggaaggccggagatcccggacgcgatggcctcccaggcctgcgaggagaacaaggactgccaggcccgtcgggaccccctggcctcccaggcaagccaggcgaagatggcaagccaggactgaacgggaaaaacggagagccgggcgatccaggcgaagatggacggaagggcgaaaagggagattcaggagcatcgggacgggagggacgggacgggcccaaaggtgaaagaggggctcctggcatccttggccctcagggtccaccaggccttcctggcccggtcggccccccaggtcaaggctttcctggagtccctgggggtactggacctaagggggaccgaggcgaaactggatcaaagggggaacaaggattgcctggagaacgggggcttagaggagaacctgggtccgtccctaatgtcgaccgtctgctcgaaaccgcgggtattaaggccagcgcacttcgtgaaatcgtcgaaacctgggatgagagctccggctcatttctccctgtgccagagcggcggcgcggtccaaaaggggattccggggagcaaggtcctcctggaaaagaaggccctattggatttccaggggaacgcggccttaagggagatcgaggcgatccaggacctcaaggacctccaggactggcgctgggcgagaggggtccacccggaccgtccggacttgcaggagagccaggcaaacccgggattcctggactgccaggacgagcaggcggagtcggagaggcaggacgccctggcgagcgcggggagcgcggggaaaagggcgaacgcggggagcagggtcgagatggtcctccaggccttcctggtactcccggcccacctggaccgcctggacccaaggtgtctgtggacgaaccgggacctggtctttcgggcgaacaaggtcctcccggccttaaaggagcaaaaggagaacctggctccaacggagatcaggggcccaagggtgataggggggtgccaggtatcaaaggagacaggggtgaaccgggtcctcgtggacaagacggtaatcccgggctgcccggggaacggggcatggcaggtccagagggaaagccagggttgcagggacccaggggacccccagggccggtggggggccacggcgatccgggcccacctggagccccgggactggcaggccctgctggccctcagggtccttcgggacttaagggtgaacctggtgaaaccggcccacctgggcggggactcaccggtccaaccggagcggtggggttgccaggacccccaggaccatctggccttgttggtcctcagggaagcccaggactgcctggccaagtgggcgagactgggaaacccggtgcacctggtcgcgatggagcaagcggaaaagatggagatcggggctcacctggggttcccgggtcaccgggcctccccggtccagtggggcctaagggagaacctggaccaactggcgccccaggacaagcagtggtcggccttcctggggcaaagggagagaaaggcgccccaggtggactggcaggagatctggtcggcgagccaggggccaagggtgatcgtgggctgccaggccctaggggggagaagggagaggctggccgcgcaggagaaccaggagatcccggagaagatggtcagaagggtgcccctggcccaaaaggattcaaaggagatcctggtgtcggtgtccccggctctcctgggcccccaggaccccctggtgtgaaaggagatctgggccttcccggattgccaggtgcacctggcgtggtgggattcccaggacagactggaccgagaggggagatgggtcagcctggaccgagcggcgaacgcggactggcgggaccccctggacgtgagggtatccctgggccacttggccccccaggacctccagggtcggtgggaccaccaggagcatcgggacttaagggtgacaagggagatcccggcgtgggactgcctggacctcggggagaacgaggagaaccgggtatccggggagaagatggcagacccggacaggaaggaccgagggggcttacggggcctcccggcagccgaggagaacggggtgagaagggagatgtgggatccgccgggctcaagggagataaaggggattccgccgtgattctcgggccacctggacctagaggagccaagggagatatgggggaacgcggccctcggggacttgacggagataagggtccgcggggagataacggtgatcccggtgataagggatcgaaaggagagcctggtgataagggaagcgcaggactcccaggactgcgaggattgcttggccctcaaggtcagcccggagcagcgggaatcccaggagatcctggttcgcctggcaaggatggagtgccgggaattcgcggtgaaaagggtgacgtcggatttatgggacctcgcgggctgaagggtgagcgcggagtgaaaggcgcttgtgggcttgacggagagaagggagacaagggagaagcagggcctcctggacggcctgggctcgccggacataaaggagaaatgggggaacctggggttcctggacaatcgggggcacctggaaaggaaggactcataggaccgaagggggaccgtggatttgatggtcagcccggtccaaaaggggatcaaggagagaaaggagaacgtggcacgcccgggataggaggttttcctggacccagcggaaatgacggttccgctggacctcctggacctcctggttcagtgggacctcgcggacctgagggattgcagggccagaaaggtgagagggggcctccaggggagagagtggtcggtgcacctggcgtgccaggagcacctggtgaacgcggcgaacagggccgaccaggtccagcgggccctagaggtgagaagggtgaggcagcccttacggaggatgacatcagaggatttgtccgccaagaaatgtcccagcactgcgcatgccagggtcagttcattgcaagcggttcccgccccctgccatcatacgcggcagacaccgcaggttcccaacttcatgcagtccctgtgctccgagtgagccatgcggaagaggaggagcgggtgcctccagaagatgatgagtactccgaatactccgagtactccgtcgaggaataccaagaccccgaagcaccttgggattcggacgatccttgttcgctccctcttgacgagggtagctgtactgcatacacccttcggtggtaccatcgtgcggtcacgggttctactgaggcatgccacccctttgtttacgggggttgtggcggcaatgcaaacagatttggcactcgagaggcatgcgaacggcggtgcccaccacgggtggtccagagccaaggtactggaactgcacaagat

SEQ ID NO: 1480 - DNA, 8832 bp, Artificial Sequence
  derived and/or modified sequence
atgacccttagactgctggtggccgccctttgtgccggaatcctcgcggaggcgccgagggtccgggcacagcatagggaacgggtgacgtgtacccggttgtacgcggcagacatcgtgttcctcctcgacggctcgtcgtccatcggtagatcaaacttcagggaagtgaggtccttcctggaagggctcgtgctgccgttcagcggagccgcatcagctcagggagtgaggttcgcgactgtccaatacagcgacgatccgcgcaccgaattcggactggacgccttgggatcgggtggagacgtgatccgcgcgatcagagaactgagctacaagggagggaatactagaactggagccgcaatcctgcacgtggcggaccacgtctttctcccgcagcttgcacggcccggcgtgcctaaggtgtgcatcctcatcactgacggcaaatcgcaggacctcgtcgacactgccgcccagcggcttaagggccagggagtcaaactgttcgcggtgggtatcaagaatgcggatccggaggagctgaagagggtggcatcccagccgacctcagacttcttctttttcgtgaacgatttcagcatcttgcggaccctcttgccgctggtgtccagaagggtgtgcaccactgcggggggagtcccagtgactcggcccccagatgactccacctccgccccacgggatctggtgctttccgagccctcgagccagtccctgcgggtgcagtggaccgccgcatcaggtccagtgactggatacaaagtgcaatatacgcccctgaccggcctcggacaaccactgccgagcgaacggcaggaagtgaatgtgccggcgggagagactagcgttaggctgcgcggtctgcgcccactcactgaataccaggtcactgtgattgccctgtacgcgaattcgatcggagaggccgtgtcgggcactgccagaactaccgctctggagggcccggaactgaccatccagaataccaccgcccattcgctgctggtcgcctggcggtcggtgccaggagccactggataccgcgtgacctggcgcgtactgtcgggaggacccacgcagcagcaggagctgggcccgggccagggaagcgtcttgttgcgcgacctcgaacctggcactgactacgaggtcactgtgtccaccctgttcggccggtccgtggggccggccaccagcttgatggcccgcactgacgcctcggtggaacagaccctcagaccagtgatcctgggaccaaccagcatccttctctcgtggaacttggtgcccgaggcgcgcggataccgcctcgagtggcgcagagaaactggactcgaacccccacagaaggtggtcttgccgtccgacgtgaccagataccaactggatggcctccagcccggaactgagtaccgcctgactctctacaccctgctggagggacacgaagtggcaaccccggcgactgtggttccgactgggcctgagctgccggtgagcccggttacggacttgcaggctaccgagctcccgggacagcgcgtgcgtgtctcctggagccccgtgcctggggcaactcagtaccggattatcgtgaggtcgacccagggcgtggagcggaccctggtgctgcccggctcacaaaccgctttcgatcttgacgacgtgcaagcaggtctttcatatactgtgagggtgtctgccagagtggggcctcgggaaggatcggcgtcggttctgactgtcagaagagagccggagacgcccttggcggtgcccgggctgagagtggtcgtgagcgatgctaccagagtccgagtggcatggggcccagtcccgggcgcctcgggattccgcatctcatggtcaacgggctctgggccggagtcgtcacaaactctgccgccggactccaccgctactgacatcactgggctgcagcctgggaccacctaccaagtggcagtctccgtgctgcgggggcgcgaggaggggcctgcggccgtgatcgtcgcgagaactgatccactgggtccggtgcgcactgtgcacgtcactcaagccagttcgtcctccgtcactatcacctggaccagggtcccgggcgcgactgggtaccgggtgtcgtggcattcagcgcacggcccagaaaaatcccaattggtttcaggcgaagccactgtggcggaactggatggtctggagccggacaccgagtacaccgtgcacgtgagggcgcatgtcgcgggcgtggacgggccgcctgcctcggtggtggtgcggaccgccccggaaccggtgggacgcgtgagccggctccagatcctcaacgcttcgtcagacgttcttcgcatcacctgggtgggagtgaccggagccaccgcttaccggctggcgtgggggcgctccgaagggggtccgatgaggcatcagatcctccctggaaacaccgactcagcagagataagaggcctggagggaggagtgtcgtacagcgtgcgggtgaccgcgctggtgggagatcgcgaggggacgccggtgagcatcgtggtgaccaccccgccagaagcaccgcctgccctgggaactttgcatgtcgtccagcgaggtgagcattcgcttcggctccgctgggaaccggtgcctagagcgcagggattcctgctccattggcagcctgaaggaggccaggagcagtcgcgtgtcctcggacctgagttgagctcataccatctggatggacttgaacctgcgacccagtatcgcgtcaggttgagcgtgctcgggcctgccggggagggaccatcggcggaagttaccgctcggaccgagtccccgagagtccctagcatcgaactcagggtggtggacaccagcatcgactcagtcaccctggcatggactccagtcagcagagcctccagctacattctgtcctggaggcctcttcgcggcccaggccaggaggtgccgggaagccctcaaaccctgccaggaatatcatcaagccaacgcgtgaccggcctggaaccgggtgtctcgtacatcttttctctgaccccagtcctggacggcgtgagaggtcccgaagcctcggttacccaaaccccagtgtgcccgagaggactcgctgacgtggtgttcctgccgcacgcgactcaggacaatgcccacagggcagaggccacccgacgagtgctggagcggctcgtcctggcgctgggcccccttggtccacaggccgtccaggtcgggctgctgagctacagccatcgcccgtcgccactgttcccgcttaacgggagccatgaccttggaatcatcctccaacgaatcagagatatgccgtacatggatccgtctggaaacaacctcggaactgcggtggttactgcgcaccgctacatgctcgctccggacgcgcctggacggcgccaacacgtgcctggcgtgatggtcctcctggtggacgaacccctgcggggagatatcttctcgccgatccgcgaggcccaggccagtggactgaacgtggtgatgctgggcatggccggcgcagatccagaacaattgcggcggctcgccccaggaatggactctgtgcagactttcttcgccgtggacgacggaccctcgctcgaccaggcagtgagcggcttggccacggcgctctgccaggcatctttcactacccaacctcgcccagagccatgcccggtctactgcccaaaaggacagaaaggcgagccgggagaaatgggactgcgcggccaggtgggaccgcctggagatcccgggctcccgggtcgcaccggcgcccctgggccgcaaggaccaccgggcagcgccaccgccaagggagaacgcggttttccgggagctgacggacgcccgggaagccccggccgggccggaaacccggggacccctggcgctcccgggctcaagggatccccgggactgcctgggccgcgcggtgaccccggtgagcggggaccccgcgggccaaaaggagaacccggggcccccggacaagtgatcggaggcgagggtcccggactgccggggcggaaaggtgacccgggaccatcagggcctcccgggccaaggggccctctcggcgacccgggaccgcgcggcccacccggcctgcctggaacggctatgaagggagataagggcgacagaggtgagcggggtcctcctggacctggagaaggaggaatcgccccgggagaacctggactgccgggtctgccgggatccccgggcccgcaaggaccggtgggcccgccaggaaagaaaggtgaaaagggagattcggaagatggtgcccccggactgccagggcagccaggatccccgggggaacaggggccgagaggacccccaggagctatcggacctaagggggaccgcggattcccgggaccgctgggggaagccggagaaaagggagaaagaggcccaccgggaccggctggatccagagggctgccgggcgtcgccggacgaccgggtgcgaagggaccagaaggcccgcccggccctaccggccggcagggtgagaaaggagagccgggtcggcccggcgatccagccgtggtcggacctgctgtggcaggtccgaagggtgaaaagggggacgtgggacctgcgggaccacggggagctaccggcgtgcagggtgaacggggccccccggggttggtgctcccaggcgacccgggcccaaaaggagatcctggggatcgcggaccaatcgggctgactggacgcgccggtccgccaggcgactcaggacctccaggagagaagggtgacccgggacgtccggggccgccagggcctgtgggaccacgaggcagggacggggaggtcggggagaagggagatgaaggaccgccaggggacccaggcctccctggcaaagctggtgagagaggactgcgcggagctccgggcgtgagaggaccggtaggtgagaagggcgaccagggggacccaggagaggacggtcggaacggctcgcctggatcctcgggacctaagggagacagaggcgaaccaggacctcctgggccgccgggccgcctggtggacactggacctggagcaagggaaaaaggggagcccggcgaccggggccaagaagggccacggggacctaagggggaccccggactcccgggagcgccgggagaaagagggatcgagggtttcagaggcccacctggcccgcaaggcgacccgggcgtccggggaccggccggcgagaaaggcgaccgcggaccgccgggactggacggacggtccggcctcgacggcaaaccaggcgcggccggaccttcgggacccaatggagcggccggaaaagccggagatcctgggcgcgacggactgccgggattgcgcggcgagcagggtctgccgggaccgtccgggccgcctggcctgccgggaaagccaggcgaggatggcaagccgggactgaatggaaaaaacggtgagcctggagatcctggagaagatggacgcaagggagaaaagggtgattcaggagccagcggccgcgagggacgcgacggaccaaaaggagaaagaggcgcgccgggaatccttggcccgcagggcccgccagggcttccgggaccagtgggtcccccgggacaaggatttccgggggttccggggggcaccggcccgaagggggaccgcggcgaaactggatcgaaaggtgaacagggcctgccgggtgaaagaggtctgcgcggagagcctggatcagtgccaaatgtggacaggctcttggaaactgctggaatcaaggcctccgccctgagagaaatcgtggaaacttgggacgaaagctcgggatcgtttctgccagtgcccgagaggcgccgcggaccaaaaggggactcaggcgagcaaggaccaccgggcaaggaggggccgatcggattcccaggcgagagaggtctgaagggcgaccgtggggatccgggaccgcagggcccaccagggctcgccctgggagaacggggtcctcctggcccgtcaggcctggccggcgagcccggaaagccaggtatccccggactgccggggcgcgcgggaggcgtcggagaagcgggacggcctggagaacgaggcgagcggggcgaaaaaggcgagcggggagagcagggtagggacgggccaccaggactgccggggacgccaggacctccgggacccccaggaccgaaggtcagcgtggacgagccaggaccgggcctgtcgggagagcagggaccaccaggcctgaagggagcaaaaggcgaaccaggatcaaacggggaccaggggccgaagggagatcgaggtgtgccgggcatcaagggcgaccgcggcgagcctggacctcgcggacaggacgggaaccctgggctgcctggagagcggggtatggctgggccggagggcaagcctggactgcaaggcccacgcggcccgccaggcccagtggggggacatggggaccccggcccacctggtgccccaggccttgcaggcccggctgggccacaaggaccaagcggattgaaaggagaacctggggagacgggaccgccaggaagaggcctcactggtcccaccggagcggtgggactgccgggccctcctggcccttcgggactcgtgggaccgcaggggtccccaggcctgccgggacaggtgggtgaaacgggtaaacccggcgccccgggtagagatggagcatccggaaaggacggcgacagaggctcaccgggagtgccgggctcgccgggactgcctggcccggttggcccgaaaggagagccggggccgactggagccccaggacaagcggtcgtgggcctgccaggggccaagggggaaaagggcgcaccgggtggactggcgggcgacctcgtgggagagccgggagccaagggggataggggactgcctggcccaagaggagaaaagggagaagccggaagagcgggagagccgggtgaccccggagaggacggccagaagggggccccggggccgaaaggcttcaagggggacccaggggtgggcgtgccgggtagcccgggaccgcccgggccgccgggggtgaaaggcgatttgggactcccgggactgcccggcgcgccaggagtagtgggattcccgggacagaccgggccgagaggcgagatgggacagccgggcccgtcaggcgaacggggcttggcaggacctcccggtagagaaggaatcccgggcccactcggaccgccaggaccgccaggatcggtcggaccgccgggagcatccggcctgaagggcgataaaggtgacccgggtgttggattgccgggacctagaggggaaagaggagagcctggcatccgcggagaagatggacgcccggggcaggaaggcccgcggggactcaccggtccgccagggtccagaggcgaacggggagagaagggagacgtggggtccgcgggcctcaagggagataagggggattctgccgtcattttggggcctccgggacctcgcggagccaaaggtgacatgggagaacgtggaccaaggggactggatggagacaaggggccccgcggggataacggggacccaggcgacaagggaagcaagggcgagccaggagacaagggatcggctggacttccgggccttcgcggcctgctgggaccacagggtcagccgggagcggcgggcattccgggagatccgggctcccctggaaaagacggagtccctggcattcgcggcgaaaaaggggatgtgggatttatgggcccacgcggactgaaaggggaacgcggggtgaaaggagcatgcggactggatggagagaaaggtgataaaggggaggctgggccgccgggaaggccaggactggcaggacacaagggagagatgggcgagcccggagtgcccggacaaagcggagccccgggtaaggaaggcctgatcggaccgaaaggcgatcgcggattcgacggccaaccaggaccaaaaggcgaccaaggggaaaagggtgaacgcggaacccccggaatcggcggcttccccggacctagcggaaacgacggatcggcggggccgccgggaccaccgggcagcgtcggaccgagggggcccgaaggactgcagggacagaagggcgaacgcggacccccgggcgaacgcgttgtgggtgcacctggcgtgccaggggcgccaggagaacggggggaacaaggaaggcccggacctgccggaccccggggagaaaaaggtgaggcagcgctcactgaggacgacattcgcggctttgtccggcaagagatgtcccagcactgcgcgtgccaaggacagttcatcgcgtccggatccaggccgttgccgtcctacgcagcagataccgcagggtcgcagctgcatgctgtgccggtcctcagagttagtcacgccgaagaggaagagcgcgtcccgccagaggacgacgaatactccgagtattccgagtactctgttgaggaataccaagacccggaggcaccgtgggattcagacgatccctgcagcctgcctctcgatgaaggttcttgtaccgcctacaccttgaggtggtaccaccgcgccgtgaccgggtccaccgaagcatgtcatccgttcgtatacggaggatgcggagggaatgctaaccgcttcggcacccgcgaagcgtgtgagagaaggtgcccgccgagagtggtccagtcgcagggcaccggaaccgcgcaagac

SEQ ID NO: 1481 - DNA, 8832 bp, Artificial Sequence
  derived and/or modified sequence
atgaccctgaggctgctggtggcagcgctctgtgcaggcatcctggccgaagcgccgcgggtccgtgcgcagcatcgggagcgcgtgacttgcacccgcctgtacgccgcagacatcgtgttcttgctggacggatcttcatcgatcggacggagcaacttccgcgaagtgcgctccttcttggagggcctcgtgctgccattcagcggtgcagccagcgctcagggagtccggttcgccacggtgcagtactcagatgacccgcggactgagtttggtctggacgcccttggcagcggaggggacgtgatcagggccatccgggagttgtcctacaagggaggaaacacccgcactggcgctgcaatactgcacgttgccgaccacgtgttcttgccccagctcgcccggccgggggtccctaaggtctgcatcctcatcaccgatggaaaatcacaagatctcgtcgacaccgcggcccagcgcctgaagggtcaaggagtgaagctgtttgcagtgggcatcaagaacgctgaccctgaagagctgaagcgcgtggccagccagccgaccagcgatttcttcttcttcgtcaatgatttcagcatccttcggaccctgctgccacttgtgtcccggagagtgtgtacgaccgccggcggagtaccggttactcggccgcccgatgactcaacctcggcaccgcgcgacctggtgttgagcgagcccagctcacagtcgttgcgcgtgcagtggaccgcagcctcagggccggtgactggttacaaggtgcaatacacccctctcaccgggctgggccagccactgccatcagaacgccaggaagtgaacgtgccggcaggagaaactagcgtcagactccgcggactccgccccctcaccgaataccaggtgactgtgatcgctttgtacgcgaactcaatcggagaggcggtgtcgggaactgcaagaaccaccgcgctggaaggaccggaactgaccatccaaaacaccaccgcgcatagcctgttggtggcctggcggtcggtcccgggcgctaccggatatcgagtgacctggcgagtcctttcgggcggtcccacgcagcaacaggaactcggacctggacagggatcggtattgctccgcgaccttgagccgggtacggactacgaagtgaccgtgagcaccctgttcggtcggtccgtgggcccggccacgtcgctcatggccaggacggacgcaagcgtcgaacaaaccctgcggccggtgattctgggaccgacctcgatcctgctttcgtggaacctggtgcccgaagcgagaggatacagactcgaatggagacgggaaacgggcctggaaccgccgcaaaaggtggtgctgccgtcggacgtgaccagataccagctggatggactgcaacctggaactgagtacagactcacgctgtacactttgttggaagggcatgaggtcgctacccccgccaccgtcgtccccaccggaccggaactccctgtgtcaccggtgacggacctgcaggccactgaactccccggacaacgcgtcagagtctcgtggagccctgtcccgggagccacccaataccggatcatcgtgcggagcactcagggagtggaacggacgctcgtgctccccggatcccaaactgcctttgacctggatgacgtgcaagctggcctgtcgtacactgtccgcgtgtcggcgcgtgtgggacctcgggaaggttcggcgtctgtgctgacggtcagaagggaaccggagactccactggcagtcccgggcctccgcgtcgtggtgtcggacgcaacccgcgtccgagtggcctggggaccagttccaggcgcctcaggtttccggatcagctggtcaactgggtccggaccagaatcgtctcaaaccctgccgccggacagcaccgccaccgatatcacgggactgcagcctgggaccacttatcaggtcgcggtgtcagtgcttagaggacgcgaagaaggcccagctgctgtcatcgtggcgcggactgatccactcggaccggtcaggactgtgcatgtcacccaggcttcatcgagctcggtcaccatcacctggactcgggttccaggtgccactggatacagggtcagctggcactccgcgcacggacccgaaaagtcccaactcgtgtccggagaggccaccgtggcagaactggacgggctggagccggacaccgagtacactgtgcacgttagagcacatgtcgccggagttgacggcccccctgcatctgttgtcgtacgcactgcaccggaacccgtgggacgagtgtcaagactgcaaatcctcaacgcgtcgtccgacgtcctcagaatcacttgggtgggcgtcacgggagcaaccgcttaccggctcgcatgggggcgctcagaaggtggccccatgcgtcaccagattttgcctggtaatacggattcggcagagatccgtggtctggagggaggggtgtcttactctgttcgcgtgactgcgttggtcggggacagggaaggaactcccgtctcgatcgtggtgactacccctcccgaggcccctccggccctgggcactctgcatgtcgtccagaggggagagcactcgctgcggctgcggtgggaaccggtgccgagagctcagggctttcttctgcattggcagccggagggcgggcaggaacagtcccgggtgcttggcccagaactcagcagctaccacctcgatggcctcgagcccgccactcaataccgggtgcggctgtccgtgctcggacccgccggagaaggaccgtccgcagaggtgaccgcacgcaccgagtcaccgcgggtgccgtcaatcgaattgcgggtggtcgacacctcgatcgattcagtgaccctggcctggactcctgtgtcgcgggcctcctcatacattcttagctggcgcccgctgcgggggccaggacaagaggtgccgggatcaccacagactcttcccgggatctcgtcgtcccagcgcgtgaccggtctggagccgggcgtgtcctacatcttctctctgactcctgtgctcgatggagtgcggggtccagaagcatccgtgactcagacgcctgtgtgcccgcgcggactggcggatgtggttttcctgcctcacgctactcaggataatgcgcatagggcagaggcgacgcgccgcgtgctggagagactggtgctggcactgggacctctgggaccacaagccgtgcaggtgggactgctgagctacagccaccgcccttcgccgctgtttccgctgaatggctcccacgatctcggcattatccttcaaagaatccgggacatgccatacatggacccttccggtaataaccttggaactgccgtggtgactgcacaccgctacatgctcgcccctgacgcgcctggtagacgccaacatgtgccgggcgtgatggtcctcttggtcgacgagccgctgaggggggacatcttcagccctatccgggaagcgcaggcttcagggctgaacgtggtaatgctcggcatggcaggagccgacccggagcaactgcgacgtctcgctccgggaatggattcagtgcaaactttcttcgcagtagacgacggaccttctctggaccaagcggtgagcggactggctactgctttgtgtcaggcttccttcaccacccagccaagaccagagccctgcccagtatattgtcccaaaggacagaagggagaaccaggcgagatgggtctgaggggccaggtgggaccgccgggtgacccggggctcccgggcaggactggtgccccgggacctcaaggacccccaggttccgcgactgccaagggtgaacgcggattcccaggagcggatggccgcccgggatcgccgggtagagcaggaaacccgggcactcctggcgcaccgggacttaaaggatcgccaggactgccgggccctagaggcgacccgggcgagcgaggaccacggggaccgaagggtgaacctggagcgcccggacaggtgatcggcggtgaaggacctggcctgcccggacggaagggcgacccgggcccgtcgggacccccgggtccgcgcggaccactgggggacccaggaccacgcggaccgccaggactgcctggaactgcgatgaaaggagataaaggagatagaggcgagcgcgggcccccagggcccggagagggcggaattgccccaggagaaccgggacttccagggcttccgggctcgccgggacctcagggtccggtggggcctcccgggaagaagggagaaaagggagactcggaggacggtgcgccgggactgccggggcaaccaggatcgcctggagagcaggggccccgggggccaccgggagcaatcggcccgaaaggagatcgaggattcccgggcccgttgggtgaagcgggtgaaaaaggagagcgcgggccgccgggccccgccggttcgcggggcctcccaggagttgccggaaggccaggagccaaaggtcccgagggcccgccaggtccgactggacggcagggagagaaaggagaaccgggccggccgggagatccggccgtggtcggtccggccgtggcgggccctaagggagaaaaaggcgacgtcggtcctgccggccccagaggggctactggagtgcagggagaacgcggcccgccgggactcgtgttgccgggggacccgggaccgaagggcgatccaggagatagaggcccgatcggacttaccggcagggcaggaccccctggagactcaggcccgccaggagaaaagggagatccgggcagaccaggccctccaggacctgtgggaccgcggggacgggatggtgaggtgggggaaaaaggcgacgaaggcccgccaggcgatcctggcctgccgggtaaagccggcgaacgggggttgcggggtgcaccaggcgtccgcgggccagtcggcgaaaagggagatcagggtgaccctggagaggacggaagaaacggatcgccaggatcgagcggaccaaagggggatagaggtgaaccaggaccaccgggcccaccgggacgcctggtcgatactggacctggagctcgcgaaaagggagaaccgggcgaccggggacaggaaggtccgcgcggaccaaagggtgacccaggccttccaggggccccgggcgaacgcggtattgagggatttcggggaccgccaggaccgcagggagatccgggcgtgaggggaccggccggtgagaaaggtgacagaggcccaccggggcttgatggcagatcaggcctggatggaaagccgggcgcggccggcccgtcgggcccgaacggagcggcgggaaaggccggcgatcctggcagggacggactgccaggactgcggggagaacaaggcttgccgggaccatccggcccaccaggactcccaggcaagccgggggaggacgggaagccgggactgaatggtaagaatggagagccgggagatccaggcgaggacggaaggaagggcgagaaaggcgatagcggagccagcggaagggagggccgcgatggcccgaagggagagcgcggcgcaccgggtatcctcggaccacagggcccgcctggattgccaggacccgtggggcccccaggtcagggtttcccgggggtcccaggaggcaccggtccgaagggcgaccggggagaaactggctcgaagggagaacaagggctcccgggggagagagggctgagaggtgaacccgggtcagtcccgaacgttgaccgcctgctggagacggccggcattaaagcgtcggccctgcgggagatcgtggaaacctgggatgagtcctcgggatcgttcttgcctgtgccagaaagacgcaggggacctaaaggagactcgggagaacaaggtccgccgggaaaggaaggacctataggttttccaggagaacggggactcaagggtgatcggggagatccgggacctcagggacctccgggtttggccctcggagaaaggggaccgccaggtccaagcggactggctggagagccaggtaaaccgggcatcccaggattgccgggacgggcgggcggagtgggtgaggccggacgcccgggagaaaggggagaaaggggagaaaagggagaacgtggcgaacagggacgcgacgggccgccgggactcccgggtaccccgggtccgcctggaccgccaggcccgaaggtgtcggtggatgaaccagggcctggattgagcggggaacagggaccgccgggcctgaagggcgcgaagggtgagcctggaagcaatggtgatcaaggcccgaagggggaccggggtgtgcctggaatcaaaggcgataggggcgaaccggggcctagaggacaagacggcaacccgggactgcccggtgagcgggggatggctggtccggaggggaagcccggactgcaaggaccgcgcggtccgccgggtccagtgggtgggcatggtgacccgggacctccaggggctcccggacttgcaggcccggccgggccgcagggaccatcagggctcaaaggggagccgggtgaaaccggtccgccgggacgcggtttgactggaccaactggcgcggtgggtctgccgggacctccaggaccgtcgggactggtggggccacagggctcccctgggctgccgggccaagtgggtgaaaccggaaaaccgggggcacctggacgggatggagcgtccggcaaggacggagatcgagggtcccctggcgtgccggggtccccgggactgccgggaccggtcggcccaaaaggagagccgggccctaccggagccccgggccaagcggtggtgggactcccaggcgccaagggagaaaaaggagcccctggaggactggccggtgacctggtcggggaaccgggcgctaagggagacaggggattgccggggccacgcggagagaagggagaagccggaagagcaggcgagccgggcgacccgggagaggacggacagaagggcgcaccgggacctaagggattcaagggggaccccggagtcggagtgcctggctcaccgggaccgccaggccctcccggagtgaagggagatctggggttgccgggactgccgggggcgcccggggttgtcgggttcccaggacagaccgggccacgaggggaaatgggccagccagggccctcgggagaacgcggcctggctggtccgccgggcagggaggggatccctggcccactcggacctcctggtcctcctggcagtgtggggccaccgggcgcatccgggctgaagggagacaaaggcgacccgggagtgggccttccaggaccaaggggagagaggggagagccaggaatcagaggcgaagatggacgccctggacaggagggtcctcggggtctgactggccctcccggatcgagaggtgaacgtggagagaagggagacgtcggaagcgcgggtttgaagggagataagggggactcagccgtgatcctgggtccgccagggccccgcggagcaaaaggagacatgggtgagcgcgggccacgcggacttgacggagataagggaccacggggagataatggggacccgggcgataaggggtccaagggggaacccggagacaaaggatcggctggcctgccagggctccgcggccttctgggaccgcagggacaaccgggcgcagccggaatcccaggcgacccgggtagtccggggaaggacggtgtgcctggtatcagaggtgaaaagggagatgtcgggttcatgggcccacggggcctgaaaggtgaacggggagtgaagggggcctgcggactggacggtgaaaagggagacaagggagaagccggaccgccgggcagacccggactcgcaggacacaagggagagatgggcgagccgggcgtgccaggacagtcgggcgctcctggaaaggaaggacttatcggcccaaagggagatcgcggattcgatggacaaccaggacccaagggagatcagggcgagaagggcgagagagggaccccgggcatcggcggcttcccgggaccatcggggaacgacggatcagccgggccgcctgggccgccgggatctgtcggaccaagaggtccagaagggttgcaaggccagaagggtgagagaggaccgccaggagaacgcgtggtgggcgccccgggagtgcctggcgcccccggagaaagaggcgagcaaggacggccaggtcctgcggggccacgcggagaaaaaggggaagccgcattgacggaagatgacataagaggatttgttaggcaagagatgtcccaacactgcgcctgtcagggacagtttatcgcgagcggtagccgtccgttgccatcgtacgccgcggataccgcaggctcccagctgcacgccgtgcctgtgctgcgcgtgtcccacgcagaggaagaagagagggtgcccccggaagatgacgagtactcagagtattcggaatactccgttgaggaataccaggacccggaagcaccttgggacagcgacgacccgtgctcactcccgcttgacgagggaagttgcactgcttataccctgaggtggtaccatagagcagtgacgggatccaccgaagcgtgccacccttttgtgtacggaggttgcggaggaaatgccaaccggtttggaaccagggaagcatgcgagcgcagatgcccgcctcgcgtggtccagtcccaggggactggaaccgcgcaggat

SEQ ID NO: 1482 - DNA, 8832 bp, Artificial Sequence
  derived and/or modified sequence
atgaccctgaggctgttggtggcagctctttgcgcaggaatcttggcggaagcgcccagagtgcgcgcccaacatcgcgagagagtcacctgcacccggctctacgcggccgatattgtgttcttgctggatggatcgtcatcgatcggaagatcgaatttcagggaagtgaggagcttcctcgaaggtctggtgctccctttcagcggagcggcctccgcgcaaggtgtccgattcgcaaccgtgcaatactcggacgatccgcggactgaattcggactggacgccctgggttcgggtggggacgtgatacgggccatccgggaactctcgtacaagggcggaaatacccggactggagcggcgatcctgcacgttgcggaccacgtctttctgccccaactggctcggcctggagtgccgaaggtgtgcatcctgattaccgatgggaagtcccaggacctcgtggacaccgcggcgcaacggctgaagggacagggagtgaagctcttcgctgtcggcatcaaaaatgccgacccggaggaactgaaacgcgtggcatctcaacctacttctgatttcttcttcttcgtcaacgatttctccatcctccgcaccctcctccctctggtgagcaggagagtctgcacgactgccggaggcgtccctgtcactcgcccgcccgacgactccacctcggcaccccgggacctcgtcctttcggaaccttcatcccaatcactgcgggtgcagtggactgccgcctccggaccggtgaccgggtacaaagtccagtacaccccgctgactggattgggtcagccactcccctccgaaagacaagaagtcaatgtgccagccggggaaacctcggtgcgccttagaggactccggccgcttaccgagtaccaggtgactgtgattgcactctacgcaaactcgatcggggaggctgtgagcggaacggctcgcaccaccgcactggaaggcccggagcttacgatccaaaatactactgcccactcgctccttgtggcttggcggtccgtgccgggagccactggataccgcgtgacctggcgggtgctgtcaggcggcccaactcagcagcaggagctgggaccagggcaggggtcagtgctcctgagggatttggagccagggacggattacgaggtgactgtctctactctgttcggacgctccgtggggccggccacttctcttatggcccggacggatgcatccgtggagcaaactctgcgaccggttatcctggggccaaccagcatcctgctgtcgtggaacctcgtgccggaagcacgggggtaccggctggagtggcgcagagaaaccggactggaaccccctcagaaggtggtgttgccctcggatgtgacccgataccaactcgacgggctgcaaccgggaactgaataccgactgacgctgtacactcttctggaaggccatgaagtggccacgccagctactgtggtgccgactggcccggaacttccagtgtccccggtcacggaccttcaggctactgagctcccgggacagcgggtgcgggtgtcctggagcccagtgccgggtgccactcagtacaggatcatcgtccgcagcactcagggagtcgaaagaaccctggtgctgcctggatcgcaaaccgccttcgacctggatgacgtccaggcaggcctcagctacactgtgcgcgtgtcagccagggtgggtccgcgagagggatcggcttcagtgcttacggtaagacgagaacctgagacgccgttggcggtcccgggactgagagtcgtcgtgtctgacgcaactcgggtgagagtcgcatggggacctgtccccggggcctccggatttcgcatctcatggagcaccgggagcggacctgaatcgtcacaaactcttccaccggatagcaccgccactgacatcactggactgcagcctggaactacctaccaggttgctgtgtcggtgctcagaggacgtgaggaaggaccggcggccgtgatcgtcgcaagaactgacccactcggaccagtgcggactgtgcacgtcacgcaggcctcatcgtcatccgtcaccatcacctggacccgcgttccgggagcgaccggataccgcgtatcgtggcatagcgcccatggaccagaaaagtcccagcttgtcagcggagaagccaccgtggcggaactggacgggctggaacccgatactgaatacaccgtccacgtcagagctcacgtcgcgggagtggacggcccacctgcttccgtcgtggtgagaaccgccccagaacccgtggggagggtgagccgcctccaaatccttaacgcgagctccgatgtcctccggattacttgggtgggggtgaccggagctactgcctaccgccttgcctggggacgatcggaaggtggaccgatgcggcatcaaatcctgccgggcaacaccgattcggcagaaatcaggggactggaagggggagtttcatactcagtccgtgtcactgctctggtgggcgaccgggagggaacgcctgtgtctatcgtggtcactaccccgcccgaggcccctccggcactcggaacgctccacgtggtgcaacgcggagaacactcactgcgcctgcggtgggagcccgtgccgcgcgcccagggtttccttctgcattggcaacccgaaggaggccaagaacagtcccgggtgctgggaccggagttgtcaagctatcatctcgatggacttgaacccgcaacccagtacagagtccggctttccgtgttgggccctgcgggagagggcccgagcgccgaagtgaccgctcggaccgagtcccctcgcgttccgtccatcgagctcagagtggtggatacctcgattgactcggtgaccctggcctggaccccggtgagccgcgcttcctcgtacatcctgtcgtggaggccgctgagaggcccaggacaggaagtgccaggctcgccgcagactctgccgggtatttcaagctcgcagcgcgtcactggtctggaaccgggagtgtcatacatcttcagcctcaccccggtgttggatggtgtccgcggacccgaggcttccgtgactcaaacgccggtgtgcccgcgcggactcgccgacgtcgtctttctgccacatgcgacccaagataacgcccaccgcgccgaggcaacgcggcgcgtgcttgagcgcttggtcctcgccctgggaccactgggaccgcaggcagtgcaagtcggactgctgtcctactctcaccggccctcccctctcttcccactgaacggctcccatgacctgggaatcatcctgcagcggatccgagacatgccgtatatggatccatcaggaaataacttggggaccgccgtcgtgactgcccaccgctacatgctcgcgccggatgccccagggcggcgtcagcatgtcccgggagtgatggtcctgctcgtggacgagcctctccggggtgacatcttctcgccaatcagagaggcgcaggccagcggtttgaacgtggtgatgctcgggatggctggcgccgacccggagcaactgaggcggctcgcgccgggaatggactcagtgcaaacctttttcgccgttgacgacgggccgtcattggatcaggcagtctccggcctggccactgcgctgtgccaagctagcttcaccacccagcctagaccagagccgtgcccggtgtactgccccaaggggcagaagggcgagccaggagaaatgggactgagagggcaggtcggtcctccgggcgaccctggcctgcctggcagaaccggagcccctggccctcaggggcctccggggtcggctactgcgaaaggagaacgcgggtttcccggtgccgacggacggccgggcagccccggaagagctggtaacccgggaacccctggggcaccaggactcaagggcagcccaggactgcccggtccgagaggtgatcccggagagaggggcccgcgcgggccgaaaggagagcctggcgccccgggacaggtgatcgggggtgaaggcccgggtttgccgggacggaagggcgatcctggcccgtctggaccgccgggaccgcgcggaccgctgggagatccgggacctagaggaccgccaggactgcctggaactgccatgaagggagacaagggtgacagaggcgaaagaggcccgccagggccgggcgaaggaggtattgcgcccggagagccgggactcccaggactgccaggaagcccagggccccaaggacctgtcgggccaccggggaaaaagggagaaaagggagactccgaggacggggctccgggactcccaggacagccaggatcgccaggagaacagggcccgagaggccccccgggagccatcggtccgaaaggagacagggggttccctggcccgctgggcgaggccggcgaaaagggagagcgtggaccgcctggcccggcgggatcaagaggactcccgggggttgcggggcgcccgggtgcgaaggggccggagggcccacccggacccaccggacggcagggagaaaagggtgaacctgggcggccaggagatccggcggtggtggggccagccgtggcgggccctaagggagagaaaggggatgtcgggccggctggaccacggggcgccactggagtccaaggtgagcggggaccacctggactcgtgctgccgggagatcctggacccaagggggacccgggtgaccggggacccatcggactcactggccgcgcaggaccaccaggagattcggggccgcctggggagaagggagatcccgggcgccctgggccacctggaccagtcggaccacgcggccgggacggagaagtgggagaaaagggagacgaaggacccccgggggatccgggactcccaggaaaagctggagagcgcggactgagaggagctccaggcgtgcgcgggccggtcggagaaaagggggatcagggcgaccccggtgaagatggacggaacggttccccaggatctagcggtccaaagggagatcgcggagagcctggccccccaggcccgccaggccgcctggtcgataccggtccaggagccagggagaagggagagccgggagatcgcggtcaggaaggtcctagaggcccgaagggcgatcctggactgccaggagccccaggagaacggggaatcgagggctttagaggaccgccaggtccccagggggatccaggagtgcgggggccggccggtgagaagggggaccggggaccaccggggctggatggacggagcggactcgacggaaagccgggagccgccggcccgtccggaccaaatggagcggccgggaaggccggggatccaggtcgggatgggctgcctggactgagaggagaacaggggctcccagggccatccggacctcctggcctcccgggaaagcctggcgaagatggaaagccgggactcaacggcaaaaacggcgagccgggtgacccaggagaggacggcaggaaaggtgaaaaaggagattcgggagcgagcggacgtgagggtcgcgatggcccgaagggcgagcggggagcgcctggaatcctgggtccgcagggaccaccaggactgccggggcctgtcggaccacctgggcagggcttcccgggtgtgccgggaggaactggcccaaagggagataggggagaaaccggaagcaagggcgaacagggccttccgggagaacgcgggctgcgcggagagccgggatcagtgcccaatgtggacagactgctggaaaccgccgggattaaggcctctgccctccgcgaaatcgtggaaacttgggatgagtccagcggttcgtttctgccagttccagaacgtcggagaggccctaagggtgattctggcgagcaggggccaccgggtaaagagggaccgattgggttcccgggagaaaggggcctcaagggagatcggggcgatcctggaccccagggaccgccgggactggcgctcggcgagcgcggccctcccggaccgagcgggcttgcaggggaaccgggaaagccaggaatcccgggacttcctggcagagccggcggtgtgggagaagctggacggcctggcgaacgcggcgagagaggtgaaaagggggagagaggagagcagggccgcgatggaccaccagggctgccggggacccctgggccgccgggaccgccagggccaaaggtgtcggtcgacgagccggggccaggactgtcgggggagcaaggaccccccggactgaagggagcaaagggagagccgggtagcaacggtgatcaaggaccaaagggggaccgcggggtgccgggaatcaagggagataggggcgaaccgggaccgagaggccaggatggcaatccgggacttccaggagaacgcggcatggcaggccctgaaggaaaacctggactgcagggccccaggggaccaccggggcccgtgggcggacacggcgatccaggcccaccgggagccccaggactggcgggaccggcgggcccacagggcccgagcggactgaagggggagccgggcgagactggcccgccggggcggggcctgacgggaccaactggagccgtgggactgccaggccctccgggtccgagcggactggtgggaccacaggggtccccgggactcccaggacaggtcggtgagactggcaagccaggagcgcccggacgcgatggcgcatcgggcaaggacggcgatcggggatcgcccggcgttcccggttccccaggactcccggggcccgtgggcccgaaaggggagccaggtccgactggagcgcccggacaggcggttgtgggcctgccaggcgccaaaggagaaaaaggggcacctggcggactcgccggtgacctcgtgggcgaacccggagcaaagggggaccggggactgcccggtccacggggagagaagggagaggcagggagggcgggagaaccaggagatcccggcgaggacggacagaaaggcgcgccaggccccaagggattcaagggggacccgggggttggagtcccgggatcaccggggccgccgggcccgccgggggtgaaaggagatctgggtttgccggggctcccgggtgcccccggagtggtgggattcccaggacagaccggaccacgcggagaaatgggacaaccaggtccttcaggggagagaggactggcaggtccgccaggaagagaaggcattcctggtccgttgggccccccaggacctcccggttcggtgggaccaccaggagcctcgggcctcaagggggataaaggagatccgggagtgggactgccgggacctcggggagagagaggcgagccgggcatccggggcgaagatggccgccctggccaagaaggaccacgcggactgacgggaccgcctggttcacgcggagaacggggagaaaaaggagatgtggggtccgctggactgaagggggacaagggggactccgccgtgatcctcggaccgcctggcccgcggggtgctaaaggagatatgggggagcgcggaccacggggactcgacggagataaaggcccaagaggcgacaacggggaccccggagataagggctcgaaaggggaacctggtgataaaggatccgccggcctgcccggactgcgcggactgctgggaccgcagggacagcctggggcagccggcatccctggagatccaggaagcccaggcaaggacggtgtccctggaatccgcggagaaaaaggtgatgtgggcttcatgggcccgagggggctgaaaggggaacggggcgtgaagggcgcctgcgggctggatggtgaaaaaggagacaagggagaagctggaccgccaggacgaccgggattggcgggacacaaaggcgagatgggcgaaccgggagtgccgggccagtccggagctccgggaaaggaaggactgatcggaccgaagggggaccgcggcttcgatggacaaccgggcccgaaaggagatcaaggagaaaaaggcgaacgcggcaccccgggcatcggaggatttccgggcccctcgggtaatgacggatcggccgggccgccaggaccgccgggatcggtgggtccacggggcccagagggattgcagggacaaaaaggagagcggggccctccgggtgaacgcgtggttggtgccccgggagtgccaggagcgccgggagaacgcggagagcagggccggccgggtccagccggcccgcggggggaaaagggagaggcggccctgactgaggacgacatccggggttttgtccggcaggagatgtcacaacattgcgcatgccaaggacagttcatcgcgtcgggatcgcgcccgcttccgtcttacgccgcggacactgctggaagccaactccacgccgtgccggtgctgcgcgtgtcgcacgcggaggaagaagagcgggtgcctccagaggatgacgagtacagcgaatactctgagtactcggtggaggagtatcaagatccggaagcaccgtgggattcggacgatccgtgcagcctcccactggacgaggggtcatgcactgcatacactcttcgctggtaccatcgggctgtcactgggtcaactgaggcctgccatccgtttgtgtatggaggctgtggaggaaacgcgaaccgcttcggaacgagagaggcctgtgagcggcgctgtcccccgcgcgtggtgcaatcgcaaggaaccgggacggcgcaagat

SEQ ID NO: 1483 - DNA, 8832 bp, Artificial Sequence
  derived and/or modified sequence
atgacattgcgcctattagtcgctgcgctgtgtgctggaatcctggccgaagccccgagagtaagagcccagcatcgggagcgtgtgacctgcacgagactgtatgcggctgatattgtctttttattagatggaagttcatcaattggcagatctaatttccgggaagtgcgttcctttttagaagggttagttttgccgttttccggggcagcatctgcgcagggggttagatttgccacggttcagtattcagatgatccgcgcacggagtttggtcttgatgccctaggcagcggcggcgacgtgatcagagcaatcagggagctctcgtataaaggcggaaacacacgcacaggtgcagccatacttcatgtcgcggatcacgtttttttacctcaactagcacgtcctggagtccctaaagtatgcattctcattacagatgggaaaagccaggatttagttgatactgctgcacagcgattgaaaggacagggagtcaaactgttcgccgtgggtattaaaaatgcggatcctgaagaattaaaaagagtcgcctctcagccgacatccgactttttcttttttgtcaacgacttttcgattcttcggactctattgccactggtttccagacgtgtatgtaccacggcaggaggcgttcccgtgacacggccgccggatgattccacatccgcaccaagagacttggtgttaagtgagccttcatctcaatcactccgcgtgcagtggacggctgcgtcgggaccggttacgggttacaaagttcagtacactccattaacaggtctcgggcaacctctcccgtcagagcgccaggaggtaaatgtgcccgctggagaaacatcggtgcgtctgcgtggcttgagaccgttgacagaatatcaggtaacggtcatcgccctttatgctaattccattggcgaagcagtgtcaggaacagctcggacaacggcgctggaaggaccggaacttactatccagaatacaacggctcattcccttttagttgcctggcgcagtgtacctggtgctacgggatatcgcgttacgtggcgcgtgctctcgggggggccaacacagcaacaggaattaggtccggggcaaggcagcgttttgttacgcgatttggaaccgggcacagattacgaagtgacggtttcaacactttttggtagaagtgtaggcccggcaacctctctgatggcgcgtacagatgcgtctgtggaacaaaccttacgtcctgtaattctaggcccgacttcgattttgctttcttggaatttggtcccagaagcccgtggctatagattggaatggagacgcgaaacaggcctcgaacctccgcaaaaagtggtacttccgagtgatgtgacacggtaccaacttgacggactgcaacctggtactgagtatcgcctgacgttgtacacgttgttggaaggacacgaggttgctacgcccgccaccgtagtgccgacgggcccggaattacctgttagccctgtgaccgatcttcaagctacagaattgccgggtcaaagggtgcgtgtatcttggagccctgtgccgggcgctacacaatatcgcatcatcgtaagaagtacacagggggttgagcggacgttagttcttccgggatcacagacggcctttgatcttgacgatgtccaagcggggttgagctatacagtgagagtttccgcccgagtgggtccgcgtgaaggcagcgcgtcggttttaacagtccgtagggagcccgaaacaccgttagctgtccccggtttgagagtcgttgtttcggatgcaacacgggtgagagtcgcgtggggcccggtgcctggtgctagcggtttcagaatttcttggtctaccggctctggccctgaatcttctcaaacgctgccgcctgattccactgcgacagatataaccggtctgcaaccggggactacatatcaagtagccgtgtctgtccttcgaggacgggaagaaggtccagctgcagtgattgtcgccagaactgaccccttaggacccgttcgtactgtacacgtaacacaggcatcgtcaagctcagtaacaattacgtggactcgggtgcctggcgcaacgggttatcgagtttcgtggcactcagcacatggcccggagaagtcgcagttggtatcgggtgaagcaacagtggcagaattggatggcctcgaaccggacactgagtacaccgtgcatgttcgagcacatgttgcgggcgtggacggtccgccagcctcagtcgtggttcggacggcaccggaacctgtgggacgagtatcacgactgcaaattttaaatgcatcctccgatgttttgcgcattacttgggtgggagttactggtgcgaccgcctatagacttgcgtgggggagatccgaaggggggcctatgcgccaccagattttaccggggaatacagattcggccgaaattcgtggcttagagggaggggtctcctatagcgtaagagtgaccgccttggtgggtgatcgagaaggcactcctgtctcaatcgttgtaacaaccccccctgaggcgccgcctgctttgggaacacttcatgtagtgcaacggggcgaacattcattacggttgcggtgggaacctgtcccgcgtgcacaaggttttctactgcactggcagccagaaggaggccaggaacagtctagggtcctagggcctgaattatcatcataccatttggatggactagaaccggctacacagtaccgggtgagacttagcgtgcttggaccagccggtgagggccccagtgccgaagtcaccgctcgcacggagagccctcgtgttccatcgattgagctacgggttgtggatacgagcattgactctgtaacgcttgcgtggacaccggttagcagagctagcagttatatcttaagttggagaccgttgcgcggacctggccaggaagtgccgggctcaccacagacgcttccaggcatctccagttctcagagagttacaggactggaaccaggagtgagctatattttctcgttaacccctgtgctggatggcgttcgcggccctgaggcgagcgtaacacaaacgccggtatgcccaagaggtcttgcggatgtggtgtttctgccgcatgcgacccaagataacgcacatcgcgcggaagccacacggcgagtccttgaacggttagtcctggcacttggccctctgggaccgcaggctgttcaagtcggccttctttcatatagccatcgcccgtctccgctgtttccattaaatggatcacacgatttaggcatcattttgcaaagaatccgggatatgccgtatatggatccatccggcaataacctggggactgcggttgtgactgcgcatcgctatatgctagctccggacgcgcctggacgccgccagcatgtgccgggtgttatggtcctccttgtggatgaacctctacggggggatatcttctccccgattcgtgaggcgcaggcttctggcctgaacgtcgtaatgttaggaatggccggagcggacccagaacaactgagacgtcttgcgcctggaatggattcagtgcaaacgttcttcgcagtggatgacggcccgtctttggaccaagctgtaagcggacttgcgacagcattatgccaagcgagcttcacaacgcaacctagacccgaaccgtgccctgtctattgtcctaaaggacagaaaggagaacctggagagatgggactccgcggccaagtcggtccgccgggagatccagggttacccgggcgcacaggagcacctggcccgcagggcccgccgggctcagctactgctaaaggtgaacggggcttccctggagctgatggccgacccggctcccccgggagagccgggaaccccggaactccgggggcccctggactgaaaggttctccgggtttaccggggccccgaggagaccctggagagagaggcccgagaggtccgaaaggcgagccaggagcaccgggacaagtcattggtggagaggggcccggtcttcctggccgaaagggggatccgggcccatcaggaccaccgggtccacgcgggcctctgggtgacccgggaccacgtgggcccccaggacttcctggaaccgctatgaaaggtgataaaggtgatcgcggtgaacgtggtccgccgggtccgggtgaaggcggcatcgctccgggagaaccgggactccctgggctgccgggatcccctggacctcaaggccctgttggcccaccgggtaaaaaaggtgaaaaaggtgattcagaggacggagccccaggtctcccgggacaaccgggctctccgggcgaacaaggaccgcggggacctccaggcgccatcggccctaaaggggaccgtggatttccgggcccccttggagaggctggcgagaagggagaaagaggccctccgggtcccgcgggcagtcgtggtctcccgggcgttgccggtcgcccaggcgccaagggccccgaaggcccgcctgggccgacgggtcgtcaaggtgaaaagggagaaccggggcgtcctggggaccctgcggtggtcggccctgccgtggccggaccgaagggagaaaaaggagatgtagggccagctggaccccgtggcgcgaccggggtccaaggcgagcgtggccctccgggactcgtgctacctggcgatccgggacccaaaggagacccaggggatagaggacctattggtttaacgggcagagcgggaccacctggcgattcgggaccgcctggggaaaaaggcgatccgggcagacctgggccaccgggaccagttggtccgagaggtagggatggagaagtaggagagaaaggggatgaaggtcctccgggagatcctggtttgccgggcaaagcaggggaacgcgggcttcgcggagctccaggcgtgcggggcccggtcggagaaaaaggagaccaaggggatccaggagaggatggccggaacggcagtccaggatcctcagggcctaaaggtgatcgcggcgaacctggcccgcccgggcctccaggccggttagtagatacaggacccggcgctcgggaaaaaggagaaccgggtgatcgggggcaagaagggcctcgggggcctaaaggtgatccggggctgcctggtgctccgggagaacgtggcatagaaggatttcgcggacctccgggtccgcaaggggatccgggagtccgtgggccggcaggagaaaaaggcgatagaggccccccaggactggatggcagatcaggccttgatggaaaaccgggcgccgctggacctagcggaccgaacggagcggctggtaaagcgggagacccgggcagggatgggcttccgggcctccggggcgagcaaggcttgcctggcccatctggcccgcctgggttgccgggcaaacctggcgaggacggcaaaccagggctgaacgggaaaaatggggaaccgggagatccgggtgaggatggacgcaagggagagaagggagactctggcgcaagcggccgtgaaggtcgagatggcccgaagggtgagaggggtgctcctggcatcttaggtccgcagggaccaccgggacttccgggtccggttggaccgccgggccaaggatttccgggcgtgccgggcggaacaggccccaaaggcgatagaggcgagacaggcagcaagggagagcaaggactgcctggggaaagaggtctgcgcggtgaaccgggttctgtgccaaatgtggaccgccttttggaaaccgcgggcattaaagcgtcagcattgagagaaatagttgaaacttgggatgaatcatcagggtcttttttacctgttcctgaaagacgacgcggccctaaaggagattctggagaacaaggaccgccaggaaaagaaggccccattggctttcctggggaacgcggccttaagggcgatagaggagatccggggccgcagggcccgccgggactggcgttaggagaacgaggtccaccaggaccgagcggattggcgggtgagcctggcaaaccgggaattcctggacttcccggaagggctggtggtgtgggggaagctggtagaccaggagagcggggagagaggggagagaaaggggaacggggggaacaaggtcgggacggtccgccgggccttcctggaaccccgggacctcctggtccgccgggccctaaagtgtctgttgacgaaccaggaccaggcctgtctggagaacagggtccgccgggactgaaaggcgcgaaaggagagccgggtagcaatggcgatcagggtccgaaaggggatcgcggcgttcctggtattaagggggatagaggtgagccgggaccgcgtggacaggatgggaatccgggattgccgggtgaacgggggatggcaggaccagaaggaaagcctgggctacaagggccgcgaggtccaccaggaccagttggcggacatggcgaccctgggccgccgggtgccccgggattggctggacctgctggccctcagggtccttcgggactgaaaggagaacctggcgaaacaggtccgcctggcagaggtttaacgggccctacgggagcagtcggacttcctgggcctcctggtccgtcgggactagtcggaccacaagggagcccgggattaccgggacaggtcggggagacaggtaaacctggagcccccggacgggatggtgcgtcaggaaaagatggcgatagaggctcaccaggagttcctggttctccagggctacccggacctgttggaccgaaaggagaaccggggcctacgggtgccccggggcaagcagtagtcggcctaccaggagcgaaaggagaaaaaggagcccctgggggtctggccggagacctagtcggagaacctggcgcaaagggagatcgcggcttaccgggaccgcgcggagaaaaaggggaggctggtcgtgcgggtgaaccgggtgatccgggagaggatgggcaaaaaggggctccaggcccgaaagggtttaaaggcgatccgggcgtcggcgtgcctggatcaccggggccacctgggccgcctggagtcaaaggtgatttggggttaccggggctgccgggagcccctggagtggtaggctttccgggccaaacgggcccgcgcggagaaatgggacagccgggccctagcggtgaaaggggactggctggtccgcctggcagggaaggcatcccgggaccgttggggcccccgggccctccggggtccgtaggaccccctggggcatctgggttaaagggcgacaaaggggaccctggcgttggactgcctggtccacgcggagaaagaggtgaaccgggaatccgtggggaagatggaagaccaggtcaggaaggtccgcgaggcctcactggcccgccaggaagccgtggggaacggggggaaaaaggtgacgtaggctccgctgggcttaagggagataaaggggactcagctgttattttgggcccccctgggcctcgaggggcaaaaggagatatgggcgagcgtggaccgcgagggttggatggagacaaaggacctagaggtgataacggggatcccggcgataaaggatctaagggcgaacctggagataaaggtagcgctggtctgccggggttgcggggtttattaggcccacaagggcaacctggggctgccggaataccgggggatccggggtctccgggcaaggacggtgtccctggcattagaggagagaagggggacgtcggttttatgggacctcgtggccttaaaggggaacggggagtgaagggcgcatgtggtctagatggagaaaaaggcgacaagggcgaagccggcccgccggggaggcccggcttggcagggcataaaggagagatgggagaacccggcgtacctgggcaatcaggcgcgcccggaaaggaagggttgattggtcctaaaggagatagaggctttgatggacagcctggcccgaaaggggaccagggggaaaaaggggaaagaggtaccccagggattgggggctttcctggcccttctggaaatgatggcagcgcaggaccgccgggaccgccagggtcagttggacctaggggaccggaaggcttacaaggccagaagggagaacgggggccgcctggcgaaagagtcgttggagcgccgggagttcctggtgcgcccggagagcgtggggaacaggggcgcccaggaccggcgggaccgcgtggagaaaaaggtgaggcagctcttaccgaggatgatattcgtggcttcgtccgccaagaaatgagccagcattgcgcttgccaagggcagtttattgcatccggctctagacctttaccgtcttatgcagccgatactgcgggaagccagctccatgcggttccagttttgcgtgtcagccatgccgaagaagaagaacgagtgcctccagaggacgacgaatattccgagtattcggagtactcagtcgaagagtatcaggatcccgaggctccgtgggattctgatgatccctgttctctccctcttgatgaaggatcatgtacggcgtataccttaagatggtaccatagagcagttacaggttccacagaggcttgccatccgtttgtttatggaggatgcggaggcaatgctaaccgttttggaacacgcgaagcgtgcgagcggagatgtccgccacgtgtggtgcaatcacaaggaacaggcactgcgcaggac

SEQ ID NO: 1484 - DNA, 8832 bp, Artificial Sequence
  derived and/or modified sequence
atgacattgaggctcctcgtggctgctctttgcgctggaatcctcgctgaggcacctcgcgtgagagcacagcatagggagagggtgacctgtactcggctctatgctgccgatatcgttttcctcttagatgggtcatcatccattggaagatctaattttcgtgaagtccgttctttcctcgaggggctcgttctgccgttctcgggtgctgcttctgctcagggtgttcggttcgctacggttcaatactctgatgacccccggacagaatttggacttgacgctcttggatcaggtggagacgttatacgtgctattcgtgaactatcatataaagggggaaacaccaggacaggagcagcaattctgcatgttgccgaccatgtttttttacctcaattggccaggcccggtgtccctaaggtctgtatcttaatcaccgatggaaaatcgcaagatctggttgacacagcagcgcagcgtcttaaaggtcagggagtcaaattgtttgcagttggaattaagaacgcagatcctgaagagttgaaaagggttgcaagccaacccactagcgattttttttttttcgttaatgatttcagcattcttcgaactctcctccccctggtttcaaggcgtgtgtgcactacagctgggggagttcctgtgacaaggccaccagatgattcaacctccgcaccacgagaccttgttttgtcagagccatcatctcagtctctaagggtgcagtggaccgccgcgtctgggccggttacaggttataaagtccaatacactccactgacgggattgggtcagccacttccctccgaacggcaggaggttaacgtgcccgctggagaaacgtccgtgaggttgcgaggactaagaccactaaccgagtatcaggtgaccgtgattgctctttacgctaattcaataggggaagctgtttcggggacggctaggactactgctttggagggtccagagctgaccatacagaacactactgcgcactcgcttctagtagcttggcgctctgtaccaggggcaacagggtatcgtgttacttggagagttttgagcggtggaccaacacaacaacaggaacttggaccaggtcaaggttccgttcttttgcgtgatcttgagccaggtaccgattacgaagtgaccgtaagcacattattcggtagaagcgttggccctgctacctctttgatggcacgaacagatgctagcgtcgagcagactcttcggcctgtgatcctcggaccgaccagcattcttctgagctggaaccttgttccagaagcgagaggttatcggcttgaatggcggcgtgagaccggacttgagcctcctcaaaaggtggttctcccatctgacgtaactcgttatcaactcgatggactacaacctgggacggaatatcggttgaccttgtatacattattggaggggcatgaagttgctacgcctgctactgttgtccctaccggtcctgaattaccagttagtccagtcaccgatctccaggcaacagaattgcctggtcaaagggttcgtgtttcatggtcacctgtgcctggcgctactcagtatagaattatcgttcgtagcacacagggcgttgaaaggaccttggtgctcccaggatcccagacagcttttgaccttgatgatgtccaagctggtctgtcgtacacagtacgtgtctcagctagggtgggtcctagggaaggttccgcctcagtgttaacagtgcgtagggagccagagactccactagccgtgcctggacttcgagtggtcgtttctgatgcaacgcgagttagggtggcttggggacctgtgcccggcgcatcaggatttcgaatctcttggtcaactggatctggacctgaaagttcgcagacactcccccccgactcaacagcaactgacatcacggggcttcagccaggtacgacctaccaagtagcggtgtccgtgcttagaggccgcgaagaagggcccgcagctgtcatagtggctcgcactgatccactggggcctgtccgcactgtgcatgttacacaagcctcaagctcctccgttacgataacttggacgagggtgcctggggctaccggttatagggtgtcttggcattcggctcacggacccgaaaagtctcagctagtcagcggcgaggctaccgtggctgaactcgatggactggagcccgatactgagtacaccgtgcatgtgcgtgctcatgtcgctggtgtggatggtccaccggcctcagttgtggttcgcacggctcccgagccagttggtcgagtatctaggcttcaaatcctgaatgcgagcagtgatgttttaaggattacctgggtcggtgtgaccggagctactgcttaccgcttggcatggggacgatcagagggtggccctatgagacaccaaattcttcctggcaatactgattctgcagagataagaggtttagaaggaggggtttcctatagcgttagagtgacggcattagtgggtgaccgagagggaacccccgtgtcaattgtcgtgactactccaccggaagctccacctgctttgggcaccctgcatgtcgttcagaggggagagcatagtcttaggcttaggtgggaaccagttccaagggcgcagggatttctgttacactggcagcccgagggagggcaggagcaatcgagggttcttggtccagaactttcttcctaccatcttgacggattagaacctgcgacgcagtatcgtgtaagactctccgtcctggggcctgccggtgaaggaccatcagcagaagtaaccgcgaggaccgagagcccgagggttccttctatcgaattaagagtcgtggacacaagtattgactcagtgactctagcctggactcctgtttctagagctagttcatatatactcagttggaggcccttgaggggacctggacaggaagtgccaggaagtccacaaacactaccaggcatctcatcttcgcagcgtgttactggactggagccaggtgtctcttatatattctcacttactcctgtgctagatggagtgaggggtcctgaagcatcagtgacccagactcctgtttgccctaggggactcgcagatgttgtgttcttaccgcatgcaacccaagataatgcccatagagccgaggctacaagaagagttttagaaagactcgttctggcacttggaccactcggacctcaagctgtgcaagtggggcttctgtcttacagccataggccttcaccattgtttccattaaatggaagccatgacttgggaattattcttcagcgtatccgggatatgccatatatggatccgtcaggtaacaacttgggtaccgctgtggtgacggctcatcgttacatgcttgcaccagatgctccaggaaggagacagcacgttcctggagtcatggtacttctcgtcgatgagcctctgaggggagacatcttttctcccattcgggaagctcaagccagtggtttgaacgttgtcatgttgggtatggcgggcgcagacccagagcaacttaggcggcttgcgccagggatggactccgttcaaacgttttttgccgtcgacgacggtccttcacttgatcaagcagtatctggtttagcaactgctttgtgtcaggcttccttcaccactcaacccaggcccgagccatgcccggtgtactgtcccaagggccaaaaaggagaacctggagagatgggtctcaggggtcaagttggcccaccgggagatccgggactaccaggtcggaccggtgcacctggtccccaaggacctccaggatctgcaaccgcaaagggcgaaaggggcttccctggtgcagacggtcgccctgggtcgccaggacgggctggtaatcctggaactcctggggcacctgggctcaagggttcaccaggcttgcctggacctcgcggagaccctggagaaagaggccctcgggggcctaaaggtgagccaggcgccccgggacaagtaattggtggtgaaggaccagggctgcctggtcgtaagggagatccaggtccttctggaccccccggtcctcggggacctttgggagatccggggcccaggggaccaccaggtttgcctgggactgcgatgaaaggcgataagggggatagaggggaaaggggcccgcctggtccaggggaaggtgggattgcccctggagagcccggactccctgggttaccaggatcaccagggccgcaaggaccagtaggaccccctggtaagaagggagagaaaggtgattcagaggacggggctccgggtctacccggacaaccaggctctccgggggaacagggacccagaggtccacctggtgctattggtcccaaaggggacaggggattcccaggcccccttggtgaggcaggtgagaaaggggagaggggcccacctggtccagctggaagcaggggtcttccaggcgtcgctggacgacccggcgctaagggacctgagggcccaccgggccctactggtagacagggcgagaagggtgaaccaggaagacccggtgatcctgcagtggtgggaccagctgttgcggggcccaaaggagagaaaggcgatgtgggccccgctgggcctaggggggctacaggagtacagggggaacgtggacccccgggccttgttctgccaggtgatcccggtccaaagggtgacccaggggaccgtggtccaatcggtctcacaggtcgtgcgggtcctccgggagactccggtccgccaggcgagaagggtgatccggggcgccccggtcctcccggaccagtcggcccgcgtggacgtgatggtgaggttggtgaaaaaggtgatgagggccccccaggagatcccggtcttcctggaaaggccggtgaaagggggttgaggggcgcacctggcgtgagaggaccagtgggtgagaagggcgatcaaggagatccaggagaggatggtaggaacgggtcccctggtagctccgggccgaagggtgacagaggtgaacctggtccacctggcccgcctggtcgtcttgttgacacaggtcctggcgcacgtgagaaaggcgagccaggagatcggggtcaagagggtcctcgcggacctaaaggtgacccagggcttcctggcgcgccgggagagaggggcatcgaaggtttcagagggccacctggtcctcaaggagaccctggagtgcggggtccagcgggggagaagggagatcggggacctccaggcctcgatggccgatcaggtttggatggtaaacccggtgcagctggtccctcgggcccaaacggagctgccggtaaagctggtgatcctggccgagacggcctgcctggcctcaggggagaacagggattgccaggaccctccggccctccgggtctgccagggaagccaggtgaggatggaaaaccggggttaaacgggaagaacggcgagcctggagacccgggggaagacggaagaaagggagaaaaaggtgactccggagcaagcggccgtgaaggtagggatggccctaagggagaacgtggtgcgcccgggatcttaggaccacaaggcccaccaggccttccagggccagtcggcccgccgggtcaaggattccctggtgttccaggggggactgggccaaaaggtgatcgtggggaaaccgggtccaagggcgagcagggtttaccgggagagcggggtcttaggggtgaacctggctcagttcccaatgttgatcgtcttttggagactgccggcattaaagcatctgcactccgtgagatcgtagaaacttgggatgagtcgtcaggttcctttttgccagtgccagaaaggaggagaggaccaaagggtgattctggggaacaaggtccaccaggcaaggaaggacccattgggttccctggcgaacggggattaaaaggtgatcgaggtgatccaggtccacagggtcctcctggtctggctcttggggagcgtggccctccagggccttcggggctcgcgggcgagcccggtaagcccggaattcctgggcttcctggtcgtgctgggggggttggtgaggctgggcgtcctggcgagcggggagagagaggcgaaaagggcgagagaggtgaacaaggacgtgatgggccaccagggctccccggaactcccggcccacctggtccgcctggccctaaggtctctgtcgatgaacctggtcccggtttgtctggggaacaggggcctcctggtcttaagggtgctaaaggcgaacctggtagcaacggggatcagggacccaaaggggaccgtggtgttcctggaattaaaggtgacagaggtgaaccgggcccaagaggccaggatggcaatcccggtctcccaggtgagcgtggaatggcaggtccggaggggaagcctggcctccagggtcctagggggccgccaggccctgttggtggacatggtgatcctggacctccaggcgctcctgggttggctggaccagccggaccccagggaccaagcggattgaaaggggaacctggcgagactgggccccctggtcggggcttgaccgggcctacaggcgccgttggacttccaggtcctcctggacctagtgggttggttggacctcagggatctccggggctcccgggacaagtaggagagactggtaaaccgggagctccagggcgagatggtgctagcggaaaggatggagatcgagggagtcctggagtccctggaagccctggacttcccggaccggtgggtcctaagggagaaccaggccctactggagcgcctggacaggctgtagtggggctacctggtgcgaagggtgaaaagggcgctcctgggggattggcaggagatctggtcggggagccaggggcgaaaggtgatagagggcttcctgggccgcgaggtgagaaaggggaagccggacgagcgggcgaaccaggagaccccggggaggatggacagaagggagcacctggaccgaagggattcaagggtgatcctggggttggtgttccaggctcacctggtcctccagggccacctggtgtaaagggagacttggggcttcctgggctcccaggcgctcctggggttgtcggtttcccaggccaaacaggtccgagaggtgaaatgggtcagccagggccctcaggtgagagaggtctcgctggaccgcctggccgtgaaggtattcctggacccttgggtcctccaggaccacctggttctgtgggtccaccaggtgcatccgggttaaaaggggataaaggagacccaggagtcggccttccgggtccaagaggagagagaggtgaaccgggcatcaggggtgaggatggtcgaccagggcaagaaggaccccgtggtttgacgggtcctcctgggagtaggggggagaggggtgagaagggtgacgttggaagcgcagggcttaaaggtgataagggtgattctgctgtgatcctgggtccacctgggccccgtggggctaaaggagatatgggcgaacgtgggcctcgtgggcttgatggagataagggacctcgaggggataacggagatcccggggataagggttcaaaaggtgaaccaggtgataaaggttccgcaggactgccaggacttcgcggtctattggggcctcaaggtcaacctggagcagctggaattcctggtgatcctggaagccccggtaaggacggagttccaggaattcgaggagaaaaaggtgatgttggtttcatggggcctcggggtttgaaaggtgaaaggggtgtgaaaggtgcatgtggtttggatggagagaaaggagacaagggcgaagctggtccgccggggcgaccaggacttgcaggtcacaagggcgagatgggcgaaccaggcgtcccagggcagagtggtgcccctggtaaggaaggccttataggaccaaaaggggatcgcggcttcgacggccaacctggccctaagggagatcagggggaaaaaggagagcgagggacaccgggaattggtggttttccaggcccttcgggtaacgacgggtctgcgggaccacctggtcctccaggaagtgtgggacctagggggcccgaaggattgcagggccaaaaaggagagcgaggtccgcctggggaacgggttgttggcgctcccggtgttcctggtgctccaggggagagaggcgagcaaggccgtccaggtcccgccggacccagaggagagaagggtgaagcagcccttacagaagatgatataagaggattcgtgagacaagaaatgtcccagcactgtgcatgtcaaggacaatttattgcttctggttctaggcccctgcctagttacgcggcggacactgctgggtcacaactacatgctgtgccagttctccgtgtttcacatgccgaggaggaagagcgcgttccgccagaggatgatgaatactccgagtattcagagtacagcgtggaggaataccaggaccccgaagcaccatgggattcagacgatccttgttccctgccattggatgaaggatcgtgtaccgcctatactctgaggtggtatcaccgcgctgttacagggtctacagaagcttgtcatccttttgtgtacggaggttgtgggggtaatgccaaccgcttcggtactagagaggcttgtgagagaagatgcccccctcgcgttgttcaaagccagggaaccggcacggctcaggat

SEQ ID NO: 1485 - DNA, 8832 bp, Artificial Sequence
  derived and/or modified sequence
atgactctgagactgctggtcgcagccctatgcgctggaattttagccgaagccccccgagtgagggcacaacatagagaacgcgtaacttgcactcggctctatgccgccgatatagtcttcctcctcgatggaagtagttcaataggaaggtcgaactttcgggaagtgaggtcatttctggaggggctggttctaccattctcaggggcagcctctgcccagggggtccgcttcgccacagtgcagtattctgatgatccaaggactgaattcggactagacgccctcgggtctgggggggatgttatccgcgctatacgggaactgtcttataaaggagggaatactaggactggagccgccatactccacgtcgcagatcatgtttttctcccccagctcgcaaggcctggagttcctaaagtgtgtatccttataactgatggaaaatcacaagacctagtggacacagccgctcagcggctgaaagggcagggagtgaagctatttgcagtcgggataaaaaacgcagaccccgaagagctgaaacgcgtcgcgtctcagcctacatccgatttttttttctttgtgaacgatttttctatactacggacgctactgccactcgtctctaggcgcgtgtgtactacagctgggggagtgccagtgacgagacctccagacgattctacaagtgccccaagagatctggtgctctccgaaccttcatcacagtctttgcgggtgcagtggactgctgctagtgggcctgttacaggatacaaagtgcaatatacaccactcactggactcggacagccacttccttcggaaagacaggaagtgaacgttcccgctggggagacttccgttcggctcagggggctccgccctctaactgaataccaggtcactgtcattgccttgtacgcaaactcaataggagaagctgtttctggaacagctcggactactgccttagaaggacctgaacttactatacagaacacaacagctcatagtctccttgtggcatggagatctgtgcctggggcaacagggtatcgggtgacttggagagtgctaagtggggggcccacacagcagcaggaacttgggcctggacagggatctgtactccttcgggatttggaacctgggactgattacgaagttactgtaagtacattatttgggcgctctgtagggcctgctacatcactgatggcacgtacagatgcgtctgtagaacagacattaagacccgtgatattggggcctacttcaattctcctttcctggaatctcgtgcctgaggctcgcggatacagactagaatggcgacgggaaacaggactagagccccctcagaaagtggtcctcccttcggatgtaacacgataccagttagacggactgcagccagggacagaataccggctgacattatatacactactagaaggacatgaagtggccacgcccgctacagtggtgcctactgggcccgaactacctgtgtctccagtaactgacctgcaggctactgaactaccagggcagagggtgagagtgagttggtcccccgtacccggagctactcagtatcgaatcattgtgcggtccactcagggagtggaaaggacactggtacttcccggatcccaaacagcctttgatctagatgatgttcaggccggacttagttacactgtccgcgtctcagcccgcgtggggcccagagagggatccgcttccgtgttgacagtgaggagggaacccgagacacctttagctgtccctggactcagggtagtggtgtcagatgctacgcgagtaagagtcgcatggggacctgtacccggagcctccgggttcaggatctcctggagtacaggaagtgggcccgaatcttcacagacattaccccccgacagtactgctacagatattactgggctccagcccgggactacataccaggtggctgtgtctgtgctgaggggaagagaggaagggcctgcagctgttatagtggctcgaactgatcctctggggccagtgcgcacagtgcatgtgacacaggcaagttcgtcctctgtaacaataacatggacgagggtgcccggggccacaggatatcgggtctcatggcatagtgcgcacggacctgaaaaatctcagctcgtgagtggggaagctactgtggctgaattagatgggttggaacctgatactgaatacacagtacacgtaagggcgcacgttgccggggtagacgggccccccgcgtctgtagtcgtacgaactgctcctgaacctgttgggcgggtatctaggctgcagatcctcaacgctagttctgatgtactcaggattacatgggtgggggtcactggagctacagcataccgccttgcttggggaagatccgaaggagggccaatgaggcatcagatcctgcccgggaacactgattcagctgaaattcgcgggctggaagggggggtgtcgtacagtgtgcgggtgactgcgctggtcggagatagggaagggacacccgtgtctatcgtcgtgacaacaccccccgaagcgcctccagcgctggggacattacacgtagtgcagcggggagaacattctctcaggctcaggtgggagcctgtcccacgcgctcagggatttcttctgcactggcagccagaagggggacaggaacagtcacgagtgcttgggcctgaactctcatcttatcatttagatggactcgaacccgctactcagtatcgggtgagattatcagttctggggcccgcaggagaaggaccttccgcagaagtgacagctaggactgaatctccaagggtcccatcgatcgaattacgcgtggtagatacatcgatagactctgtgacactggcatggacacctgtctctcgggccagttcttatatcctttcttggaggcctttaagaggaccagggcaggaagtgcctggatccccacagactctaccaggaatctcttcctctcagagagtcacagggctggaacctggggtgtcctatatcttttctctgacacctgtccttgatggagtgagagggcctgaagcatctgtcacgcagactccagtttgtccacgggggctggccgatgtcgtgtttctgcctcacgccacacaggataatgcccatcgagcagaggccacacggagggttctggagcgcttggttctagcgctggggccactagggcctcaggctgtccaggttgggcttctctcttattcccacagaccatcacccctttttcctctgaatgggagtcatgatctagggataatactccagaggattagagatatgccatatatggatccatccgggaataacctggggactgcagtagtgactgctcataggtatatgcttgcccctgatgctcccggacggcggcagcatgtccccggagttatggtgctgttagtggatgaacctcttcgcggagatatcttttctcccatcagggaagctcaggcctcaggactcaacgtggtcatgctgggaatggctggggccgatccagagcagcttcggcgattagctcctggaatggattctgtgcagacgttcttcgccgtagacgatggaccctctctggatcaagctgtgtcagggcttgcaacagccctttgtcaagcctccttcacaacacagcctagacctgaaccttgtcccgtttattgtcccaaaggacagaagggggagccaggagagatggggcttaggggacaggtggggccaccaggggatcctggactcccaggacggactggagcccctgggccacaggggcctcccgggagtgctactgccaaaggggaacgcgggtttcctggggctgatggacggcccgggtcccccgggagggctgggaatcccgggacaccaggggctccggggctgaaaggatcccctggactgcccgggcccagaggggatccaggggaaagaggacctagagggcccaaaggggaacccggagctcctgggcaggttatagggggggagggacctgggctgcccggacgcaagggagatcctgggccatctgggccaccaggaccaaggggacccctcggagatccaggacctcgggggccacccggacttcccggaactgctatgaaaggagataaaggagatagaggagaacggggaccacccggaccaggggaaggggggattgcacccggagaaccagggcttccaggacttcctggatctcctggacctcaaggacctgtcgggcctcccgggaaaaaaggggaaaaaggggattcagaggatggagctcctggactgcctggacagccaggatcacccggggaacaagggccaagaggaccccctggagcaatagggcccaaaggggatagggggtttcccggacctctaggagaagcgggagagaaaggggaacgggggccccctgggccagccgggagtcgggggctgcctggagtcgctgggaggccaggagccaagggaccagaagggcctcccggacccactgggaggcagggagagaaaggggaacccggaaggcccggagatccagctgttgtgggacccgctgtagctgggccaaaaggggaaaaaggagatgtcggacctgccgggcctcgaggagccactggggttcagggagaacggggaccccctgggcttgtgctccccggagaccctggaccaaaaggggatccaggggataggggacccatcgggctgactggacgcgctggacctccaggagattccggacccccaggagaaaaaggagatcccgggaggcctggacccccagggccagtagggcccaggggacgggatggggaggtgggggaaaagggggatgaagggccacccggggatcccggattacccggaaaggcgggagaacgtgggctccggggggcccccggggttagagggcctgtgggagaaaagggagatcagggagatcccggggaagatgggcgcaatgggagtcccggatctagtggacccaagggagataggggagaaccaggaccacccgggccccctggaaggcttgttgatactgggcctggggctcgggaaaaaggagaaccaggggatagggggcaggaagggcctcgaggacccaaaggggatccaggattgcccggggccccaggagagcgcgggatcgaaggattcagggggcctcccggaccacagggggatccaggagtgagggggccagctggggaaaaaggggaccgaggaccacctgggcttgatggacgatctgggcttgatgggaaacccggggccgccgggccttctgggcccaacggagctgccgggaaagctggggatcccgggcgcgacggactccccggattacgaggagaacaggggctcccaggaccttcaggacccccaggactccccggaaagccgggagaagacggaaaacctgggctgaatggaaaaaatggagaacctggagatccaggggaggatgggcgaaaaggggagaaaggagatagtggggccagtgggagagagggacgggatggacccaaaggagaacggggggcccccggaatacttggaccccagggaccccccgggcttcccggaccagtggggccccccggacaggggtttcctggagtgccaggggggactgggccgaagggagataggggggaaacggggtccaaaggagagcaggggctgcctggggaaagggggctgcggggagagcccgggtccgtgcctaacgttgatagattgctggaaacagcaggaataaaggcctccgccctgagggaaattgtggaaacatgggatgaatcttccggatcgtttctgccagtacccgaacgacgccgggggcccaaaggagattccggggaacagggaccccccggaaaagaaggacctatcggattccccggggagcgcggactcaaaggggatcggggggacccggggccacaagggccaccagggctggcattaggagaacgcggaccacctgggccttctgggctggccggggagcctggaaaacccggaattcccgggctccccggacgggccggaggggtaggagaagcggggcggcccggggagaggggagaaaggggggaaaagggggaacgcggagaacaggggcgagatggaccccccggactgcccggaactccagggcccccgggaccaccaggacctaaagtaagtgtggatgaacccggacctggactgtctggggaacagggacctcctggactgaaaggggccaaaggagaacccggatccaacggggaccaggggcctaaaggagatcggggggtgcctgggataaaaggagatcggggggaacccggacctagggggcaagacgggaaccctgggttacccggggagagaggaatggctgggcctgagggaaaacctggactccaggggcccagagggcctcccggacctgtggggggacacggagatcccgggcctcctggggccccagggctcgcagggcccgccggaccccaaggaccaagtgggctcaagggagaacccggagaaactggaccccctggacggggattaactgggcctactggagccgtcgggcttcctggacctcccggaccttccggactcgtcggaccccagggatcacccgggcttccaggacaggtgggagagactgggaaacctggggctccagggagggatggagcatcagggaaagacggggatagaggatcgcctggggttcctggatccccagggctgcctggaccagttggaccaaaaggagaaccaggaccaactggggccccaggacaggccgtggtggggctccccggggccaaaggggaaaaaggggccccaggggggctggctggagatctcgtgggagaaccgggggccaagggagataggggactgcccgggccacggggagaaaaaggggaagcgggaagggccggagaacccggggatcctggagaagatggacaaaaaggggctcccggacctaaaggattcaaaggagatcccggagtgggagtccctggatctccagggcccccggggcctcccggagttaaaggggacctggggctgcccgggcttcccggggctcctggggtggtgggatttcctggacagacaggacctagaggggaaatgggacagcctgggccctcaggggagaggggattagcagggccccccgggagagagggaatccctgggcctctcggaccaccagggccccccggatcagttggacctccaggagcatccggattaaaaggagataaaggagatccaggggtcggactgccgggaccccgaggagaacgcggagaaccagggataaggggagaagatgggagacccgggcaagaggggcctcggggacttactgggccacccggatcacgtggagagagaggagaaaaaggggatgtagggtcagccggactgaaaggagataaaggggattccgctgttatcctcgggcctccaggaccacgaggggcaaaaggagatatgggagagagagggccaagaggattagatggggataaaggaccaagaggagataacggggatccaggagataaggggtcaaagggagaacccggggataaagggtccgccgggctgccagggctgaggggactcctcggaccacagggacagcccggagctgctgggataccaggagatcctgggagtcctggaaaagatggggtccctgggatccgcggagagaaaggagacgtcgggtttatggggcctcgggggctaaaaggagaaagaggggtgaaaggagcatgcgggcttgacggggaaaaaggagataaaggagaagctggaccacctgggcggcctgggttagccggacacaaaggggaaatgggagaacccggggtccctgggcagtctggagctcccggaaaagaggggctaatagggccaaagggagacagagggtttgatgggcagccaggacctaaaggagatcagggggaaaaaggagaacgggggacacccggaatcggggggtttcctgggcccagtgggaatgatgggtctgctgggccacctgggccccctggatcagtcgggcccagaggacccgaaggacttcaggggcagaaaggagagagggggccccctggagaaagagtggtaggagcgccaggagtccccggagccccaggggaaaggggggaacagggacgacccggaccagctggaccacggggggagaaaggagaagcagcgctcactgaagacgatatccgagggtttgttcgtcaggagatgtcacagcactgtgcgtgccaggggcagttcatcgcttctggatcgaggcctctcccttcctatgcagccgatactgctggatctcagttgcacgctgtccccgtgctgcgggtcagtcatgccgaagaagaagagcgagtgcctcccgaggatgacgaatattccgaatactctgagtactccgttgaagaatatcaggatcctgaagcaccttgggattcggatgatccctgctctctgcccctagacgagggatcttgtacagcctatacactccggtggtatcatcgagccgtgactgggagtacagaagcctgccaccccttcgtatatggggggtgtggagggaatgctaatagatttgggactagggaagcttgcgaacggcggtgccctcctcgagtggtacagagtcagggaactggaactgctcaggac

SEQ ID NO: 1486 - DNA, 8832 bp, Artificial Sequence
  derived and/or modified sequence
atgaccctccgccttctggtagctgctctgtgcgcagggatactggccgaggctcctagggtccgcgcacagcacagggagcgggtgacctgcacaaggttgtacgcggccgatatcgtcttcctgctggacggtagcagctccattgggaggagcaacttccgggaagtgcggtcttttctcgagggactggtgctgccgttctctggtgctgccagcgcccagggcgtgcgattcgccactgtacagtacagcgatgatccccggacggagtttggactcgacgctctcggttccggtggggatgtgattcgcgccattagggagctgagctacaaagggggaaatacccggactggtgcggcaatcctgcacgttgccgaccatgtgtttctgccgcagctcgctagaccaggcgtgcctaaagtgtgtatcctgatcactgatggcaaaagccaagatttggtagatactgctgctcagcgccttaaggggcagggcgtcaaactgtttgctgtcgggataaagaatgctgaccccgaggagttgaagagggtcgcctcacagccgacttcagacttttttttttttgtaaacgacttttcaatcctgaggaccctgcttccattggtgtctcgccgggtgtgcacaacggccgggggggtgccggtaaccagacctcctgacgattcaaccagtgccccgagagatcttgtgctgagtgagcccagcagccagtcactgcgcgtgcaatggaccgccgcaagcggacctgtgactggttacaaagtgcagtatacgcccctgaccggtcttggacagcccctcccaagcgagaggcaagaagtgaatgtgccggccggagaaacctccgtcagacttaggggcctccgacctctcaccgagtatcaggtcaccgttattgctctgtacgccaacagtattggggaggcagtgagcgggacagcaaggacaactgcccttgagggtcctgagttgacaatccagaacacaactgcccactcactgcttgtcgcctggcggagcgtacctggtgcaactggctacagagtgacatggagagtcttgagcggagggccaacgcaacagcaggaactcggccctggccaggggagcgtattgctgcgggatctggaaccgggcacggactatgaggttacagtgtcaacactgtttggtcgcagcgtgggcccggcgactagccttatggccagaactgacgctagcgtcgagcagacccttaggcctgtgatcctggggccaacctctattctgctctcttggaatcttgtgcccgaagctcgaggctatcggctggaatggaggcgggagaccggattggaacccccccaaaaggtggtgctgccatctgatgtgacaaggtatcagctggatggactgcagcccggaaccgagtatcgattgaccctctacacattgttggaggggcatgaggtcgccacaccagctacagtggttccaacagggccagagctccccgtgtcaccagtgactgatctccaggcgaccgaactgcccggtcagagagtccgagtcagctggtccccggtccccggggccacccagtaccgcatcattgtgcggtccacccagggagtggaacgcaccctggttctccccggaagccagaccgcgtttgatctcgacgatgtccaggccggtctgtcctacaccgtgagagtgagtgcccgggtgggaccacgagaagggtcagccagcgtgctgacggtcagacgggaacctgaaacgcctctggccgtgcctggtctgagggtcgtggtgtccgacgccactagagtgcgggtagcatgggggcccgtcccaggtgcgtccggtttcaggataagctggagcacgggcagcggcccagaatcctcccagacgctcccgcccgacagcaccgcaacagatattaccggcctgcaacctggaactacatatcaggtcgccgtgagcgtgttgagaggtagggaagaagggcctgctgcagtgatcgtggcaagaacagacccactggggcctgttcgcacagtgcacgttactcaggcatcaagttcctccgtcaccattacgtggacacgggtgccaggggcgacaggctacagggtctcatggcattccgctcacgggcctgagaaaagccagctggttagtggggaggcaacagtcgcagagctcgacggactggaaccagacactgagtacaccgtgcatgtgcgggcccacgtggctggcgtggacggcccccccgcttccgtcgtagtgagaaccgcaccagagcctgtgggtagagtgtctaggctgcagatcctcaatgccagttcagatgtactgcggatcacgtgggtcggggtaacaggcgctactgcgtataggttggcctggggcaggtctgagggtggaccaatgaggcatcagatcttgcctggtaacacggactccgcagagatcagaggcctggagggaggtgtcagctatagcgtacgagtgacagcactcgtgggcgatcgcgagggcactccggttagcattgtggtgaccaccccccctgaggccccccctgccctcggtacgctgcacgtggtccaacggggcgaacatagccttaggctgcgatgggagccagtcccacgagcccaaggattcttgctccactggcagcccgagggtggacaggagcagtcacgagttctggggcccgagctgagcagctaccatctcgatggcttggagccagccactcagtaccgagtgagactttccgtgctgggcccggcgggcgaagggccttctgctgaggtgacagctcggactgaatctccgcgcgtgcccagcatcgaattgcgggtggtggacaccagcatcgattccgtgacactggcgtggaccccagtctccagagcctctagttatatcctgtcttggaggccgctgagaggacctggacaggaagtccctggatcaccacagaccctgccaggaatctcttcttcccagagagtcacaggcctggagcccggagtgtcctacatcttcagcctgactccagtgctcgacggcgtcagagggcccgaagcctcagtcacgcagacaccagtatgccctaggggcctcgccgacgtggtgttcctgccccatgcaacccaggataatgctcacagggcggaagctactcgaagggtactggaacgcctcgtgctcgctctggggccacttggccctcaggctgtgcaggtggggctgctttcttattcacacaggcctagccctctcttccccttgaacgggagccacgacttgggcatcatactgcagagaattagagatatgccttatatggaccctagtggcaataaccttggcacagcggtagtcaccgcacatcggtacatgctggcccccgacgcaccaggccggcgccagcacgtcccgggagtcatggtgctgctggttgatgaacccctccgaggagatattttttctcccattcgcgaggcccaggcctccggcctcaacgtcgttatgctgggcatggccggtgctgatcccgagcagttgagaaggctggccccgggcatggatagcgttcagaccttctttgccgtggatgacggtccctcactggaccaggcggtgagcggcctcgccacagccctgtgtcaggcctcctttactacgcagcctaggcctgaaccctgtcccgtttattgtccaaagggccagaagggcgagcccggagaaatgggccttcgaggacaggtagggcctcctggcgaccctggacttcctggaagaacaggtgcgccaggaccacagggccctcccggaagcgcgactgctaagggcgaacggggatttcctggggcagatgggaggcccggaagccctggacgcgctggaaatccagggacccccggcgcgccaggcctgaagggcagccctggccttcctgggccccgcggggaccccggcgagcgggggccaaggggccctaagggagagcctggcgctcctggccaggttatcggtggcgaagggccaggcctgccaggaagaaaaggggaccccggtccttccggaccaccgggcccacggggccctctgggcgatcctggccctaggggtccgcccggattgcccgggaccgctatgaagggggacaaaggcgaccggggcgagagagggccccctggaccaggagagggcggtatcgcgcctggcgaaccgggactccctggactcccaggtagtccgggccctcagggtcccgttggacctccgggcaagaaaggcgagaagggcgatagtgaagacggagcccccgggctcccagggcagcccgggtctccaggggaacaggggccccggggcccgcccggtgccatcggaccaaagggagaccggggattcccaggccctttgggtgaagcgggcgaaaagggtgagcgggggccccccggtcccgccggctccagaggactgccaggagtggcggggagaccaggagccaagggtccagagggaccaccgggaccaaccggcagacaaggcgagaagggcgaacctgggcgcccgggtgacccagcagtcgttgggccagccgtcgccggcccaaagggggagaaaggcgacgtgggaccagcgggcccccggggagcaacaggcgttcagggcgagcggggaccacctggtctggtcctgcctggagatcccgggccaaagggtgacccaggcgacagagggcctattgggctgactgggcgggccggacctcctggcgattccggtccgccgggagagaaaggagatccagggaggcccggcccgcctggacctgtgggtcccagaggccgggacggcgaagtcggcgagaaaggggatgagggacctccaggagaccccggacttcctgggaaagcaggtgagcgcgggttgcgcggagctcctggcgtcaggggccctgtcggtgagaaaggggatcagggggatccaggggaggacggtaggaatggctctccagggagttccggaccgaaaggcgatagaggcgagcccggtcccccaggccctccaggccggctggtggataccggtccgggagcacgcgagaagggagagcccggtgatcgcggtcaggaggggcctagagggccaaaaggcgaccctggactgcctggcgcacccggagaaagaggtattgagggtttcagggggcctccaggaccccagggagaccccggtgtccgggggccagctggcgaaaagggcgaccggggaccgcccggcctggacggacggtccgggctcgatggtaagccaggggctgccggcccctctgggccgaatggcgccgcgggtaaggcaggagacccgggccgcgacggactgcccggtttgcggggggagcagggcctcccggggcctagtggcccccctggcctccctggcaaaccaggcgaagatggcaaacccgggctgaatggaaaaaatggcgaaccaggagatcccggggaagatggccgaaagggagagaaaggcgattctggagcctccggccgagaggggcgagatgggcccaaaggtgaacggggtgcccccggcattctgggaccccagggaccacctgggctgccaggaccagtgggaccgccaggccagggcttccccggcgtgccaggtggaaccgggcccaaaggagacagaggagagactggatctaagggggagcagggcctgcctggtgagaggggcctgaggggcgagcctggttccgtgccaaatgtggaccggctgctggaaactgctggcattaaggcgagtgcccttcgcgagatcgtggaaacctgggacgaatcctctgggtcattcctgcctgtgccggaacggcgcagaggaccaaagggcgactctggcgaacagggtcccccaggtaaggaaggccccatcggtttcccgggagagcgaggcctgaagggcgaccggggcgatccaggcccgcaggggccgcccggtctcgcactcggagaacgaggccctccaggaccaagcgggctggccggggagcctgggaagcctgggattccaggactgcctggaagagctggaggagtcggcgaagcggggcgacctggagagcgaggcgagcgcggtgaaaagggggaacgaggcgagcagggacgagacgggcccccaggcctgcccggaacacctggacctccgggcccccccggccccaaggtcagtgtcgacgagcccggcccgggattgagcggggagcaggggccaccagggctgaaaggggcaaagggagagccaggctcaaacggggatcaaggcccaaagggggacaggggtgtacctgggatcaagggggacaggggcgaacccgggcctagaggccaagacggcaatccagggctgcctggggagagagggatggctggtcctgagggtaagccagggctccagggacctcggggtcctcccgggcctgttggaggtcacggagatccaggacctccgggggccccagggttggccggccctgcagggccacagggaccgagtgggctgaagggggagccaggcgagacagggcccccaggcaggggtctgactgggcccacaggagccgttggtctgcctggcccccccggaccatcagggttggtaggaccgcaaggatcccctggcttgcccggacaggttggcgagactggcaagcctggggccccgggacgggatggcgcctccggcaaagacggggatcgcggcagcccaggggtgccgggaagtccaggtctgcctgggcccgtgggcccaaagggagaaccgggacccaccggagcccctggtcaggccgtggtagggcttcctggggcaaaaggcgaaaagggggccccaggtggcttggcaggcgatctggtgggggagcccggtgctaagggcgacaggggattgcccgggccccgaggggagaagggggaggccggccgagcaggagagcctggcgatccgggggaggatggacagaagggagctcccgggcctaaaggattcaaaggagacccaggagtgggtgtgccaggaagtcctggcccccccgggccccccggcgtaaagggggaccttggactgcccgggctccctggggccccaggcgtagtagggttccccggtcaaacaggtcccaggggggagatggggcagcctgggccctccggagaaagaggcctggccggcccacctggcagggaaggcatacccgggcccctggggccaccagggccgccagggtccgttggcccgccaggcgcaagtgggctgaagggcgataagggagacccgggcgtcggcctgccagggcctagaggggaaaggggggagccgggaatcaggggggaagatggccggccgggccaagaagggccgaggggtcttactgggcccccagggtctcgcggagagcgcggggagaagggggacgttgggagcgcaggcttgaaaggggacaaaggggactcagcggtgatcctgggtcccccaggtccccgaggagccaaaggagatatgggcgaacgggggcccagggggctggacggtgacaagggcccccggggggataatggcgacccaggagacaaaggttccaaaggcgaacccggggataagggttccgccgggctcccgggcttgaggggcctgctcggaccgcaaggccagccgggcgctgcaggcattcccggcgacccgggatcaccggggaaggacggagtcccggggataaggggtgagaaaggagatgtcgggtttatgggacctcggggattgaaaggtgaaagaggcgtgaagggagcttgtggtctggacggggaaaaaggcgataaaggcgaggccggaccacccggccggcccgggctggcaggacacaaaggcgaaatgggggagcccggtgttcctggccaatctggcgctcctggaaaggagggactgattgggcctaaaggtgatcgcgggtttgacggtcagcctggcccaaaaggggatcagggtgaaaaaggcgagagggggacccccggcatcggtgggttccctggccccagtgggaacgacgggagcgctggcccccccggcccgcccggaagcgtgggccctagaggtccagaggggctgcagggacagaagggtgagagaggtcctccgggggagagggtggtgggagccccaggggtgccaggagccccaggcgaaaggggggagcaaggcagaccaggtcccgctggacccagaggggagaagggtgaagcggccttgacagaggacgacatacgggggttcgtccggcaagaaatgtcacaacattgtgcctgccaaggacagttcattgcctcaggctctcggccactgccgagctacgccgctgatacagccggttctcagctgcacgcagttcctgtcctgcgcgtcagtcatgcggaggaagaggagcgggttccaccagaagacgacgaatactccgagtattctgagtactcagtagaagaataccaggacccggaagctccttgggatagcgatgatccttgttccctgcccttggacgaggggagctgcaccgcctatactttgagatggtatcaccgagcagttacaggctctacggaggcatgtcaccccttcgtgtacgggggatgcggcggtaatgccaacagatttgggaccagggaagcttgcgagcggcgatgccctccacgagtcgttcagtcccaggggacaggcaccgcacaagac

SEQ ID NO: 1487 - DNA, 8832 bp, Artificial Sequence
  derived and/or modified sequence
atgactttgcgcctccttgtcgcggcactttgtgcgggaatcttggccgaggcccctagagtcagggcccagcatagggagcgtgttacttgcacgcgcctttatgcagcggatattgtcttcttgttggatggtagttccagcatcggccgatcaaacttcagggaggttcgttccttccttgaaggccttgtcctacccttctcgggagcagcgtctgcacaaggtgtgcgcttcgctaccgtccaatattccgatgatcctagaaccgagttcggtcttgatgctctggggtccgggggcgacgtcatccgtgctatccgagagttgtcctacaagggaggcaatacaagaacaggcgcagcgattctacacgttgcagatcatgttttccttccccaactggcgcgtcctggagtcccgaaggtctgcatcctgatcacagacggaaagagtcaggacctcgtagatacggcggcccagcgcctgaaaggacaaggagttaaactattcgctgtgggtattaaaaacgctgatccggaggaattaaagagggttgcttcgcagccgacatcggatttcttcttttttgttaatgacttttcgatcctacgaacgttgttgcctttggtctcgcgccgtgtctgcactacagctgggggagtccccgtcacccggccgcctgatgattctacgagtgccccgagagatcttgttctttcggaaccgtcatcgcaatcccttagggtccaatggacagcagctagcggaccggtcactgggtacaaggtccaatacaccccacttacggggttaggtcagcccttaccatcggagaggcaggaggtgaatgtccccgctggcgaaaccagtgtgcgtttgcggggactacgaccgcttaccgaataccaggtcaccgttattgcgctgtacgcgaactcaattggcgaggcagttagcggcacagcaagaacaaccgctctagaaggacccgagttgactattcaaaacacgacagcacattccctactagtagcatggcggtctgtacctggtgccactgggtaccgggttacctggcgcgtgctctccggcggtcccactcagcagcaggagctgggcccgggtcagggcagcgtcctcttaagggatttggagccaggaacggactacgaagtcacggtatcgacattgtttggtcggtctgtaggcccagcaaccagcctcatggctcggactgacgcgagtgttgagcagactcttaggccggttattcttgggccgacatcaatcttgctgtcgtggaatctggtaccagaggccaggggctaccgcctagagtggcggcgagagactgggcttgaaccccctcagaaggtcgtcctcccttcggatgtgacgcgctatcaacttgacggtctacaaccggggacagagtacaggctcaccttgtataccctgctcgaaggccatgaggtggcaacgcccgccaccgtggtgcctaccggccccgaattgcctgtgagccctgtgaccgacttacaggccacggaattgccgggtcagcgcgtccgcgtcagctggagccccgttccaggggcaacgcagtatcgtataattgtgcgctccacccagggtgttgagcggaccctcgtcctgccaggctctcagacggcatttgatctcgatgatgtacaagcagggctgtcctatacggtgagggtctctgcgcgggttggtccacgcgaaggatccgctagtgtattgacagtccgccgggagccagaaacaccacttgccgtaccaggccttcgcgtcgttgtttctgacgctaccagagtccgtgtcgcttggggacctgttcccggtgcgtctggatttcgaatatcctggtccaccggctccggtcctgaatcttcgcagaccttgccacctgattctacggccacggatataacaggtttgcagccagggaccacttatcaggtcgccgtctcggtccttcgcggccgtgaagagggccctgcggcggttatcgtcgcgcgtactgatcccctaggtccagtccgaaccgttcacgttacccaagcgagctcatcctctgtgacaattacctggaccagggtcccaggcgcaacggggtatcgagtatcgtggcactctgcccatggcccagagaagagccagttggtttcaggagaggccaccgtcgccgagctggatggattggaaccagacacagaatacaccgtgcacgtccgcgctcatgtcgccggcgtagacgggccaccggcttccgtcgttgtgcgcacggcgccagagccagttggtcgtgtctctcgtctccaaatcctaaacgcttcaagtgacgttctccgcattacatgggtcggtgttaccggagcgaccgcctatcgtttggcgtgggggcgatctgagggtgggccaatgcgacaccaaattctaccaggaaacactgattctgcggagatccgaggtttggaagggggagtcagttatagcgttcgtgtgacggccttggtgggcgatcgcgagggaacaccagtgtcgatcgtggtcaccactccccccgaggctccaccggctttgggcacccttcatgtcgttcagcgtggtgagcactctcttaggcttcgatgggaaccagtacctcgagcccaagggttcctcttacattggcagccagaaggcggccaagagcaatcgcgcgtacttggccccgaactttcgtcataccaccttgatggtttggagcctgcaacccagtacagagtcaggctcagcgttctcggaccggcgggcgagggcccgagcgcggaagttactgctcgcaccgagtctcctcgcgttccatccatcgagttgcgtgttgtggacacttcgattgactcggttacgctggcctggacccctgtttctcgtgcgagtagttatattctctcatggcggccacttcggggcccagggcaggaagtgccaggttcaccgcaaacgcttcccggaattagttcatcacaacgagttacaggtttggaaccgggggtcagttatattttctcactcacaccagtccttgatggcgtgcgaggccctgaagcttcggtaacacagacacccgtctgcccaaggggcttagcggatgtcgtcttcctacctcacgcgacccaggataacgctcatcgtgctgaggcaactcggcgtgtgctggagagactggtgctggcgctcggaccgctaggcccgcaagctgtgcaggtcggtttactgtcctacagccataggccttccccactctttcctctgaacggatctcatgatctaggtatcattttgcaacgcattcgtgacatgccatacatggacccctccggtaacaatcttgggacagctgtagtaacggcacatcggtacatgttggctccagatgctccagggcgccgccaacatgttcccggggtgatggtgctgctcgtcgacgagccgctccgaggtgatatctttagtcctattcgcgaagcccaggcctctggcctcaacgttgtgatgctgggaatggccggcgcggacccagagcaactacgcaggcttgcacctggcatggattccgttcagaccttctttgctgttgatgatggtccatccctcgaccaagccgttagcgggctggccaccgctctctgccaagcgtcatttaccacacaacctagacccgagccttgtcctgtgtactgcccgaaaggtcaaaagggcgagccaggtgagatgggcctaagaggccaagttggcccacccggagaccccgggctgccaggaagaaccggagctcccggtcctcagggtccaccaggctccgctacagccaaaggtgagagagggttccctggtgcagacgggcgccctgggtccccaggtagggctggcaatcctggaacgcccggagcccctgggcttaaaggttcccctggtctcccgggtcctcgtggcgatcctggtgagcggggccctcgcggtccaaagggtgaacccggtgctcctggacaagtcatcggaggcgaaggtcccggcctaccaggtagaaagggagatcctgggccgtcaggtcctccgggccctaggggcccgctcggggacccgggacctcgtggacctcccgggcttccaggaaccgctatgaagggggacaagggggaccgtggggagcggggtcctccgggtccgggcgaggggggcatcgcgcccggtgagccaggacttccaggactgccgggttcccctggccctcagggacccgtcggcccccctggaaagaaaggagaaaaaggtgattctgaggacggtgcccccggattgcccggacaacccggatcgcccggtgagcaaggtccgcgcggaccgcctggggccatcggcccaaaaggagaccgaggttttcctggaccccttggagaagcaggcgagaagggcgagcgcggtcccccggggcctgcggggtcacgtgggctccctggggtggcagggaggcccggtgcgaagggtcctgaggggccacccggcccaactgggcgtcagggtgagaagggcgaaccgggccggccaggtgatccagccgttgttggccctgcagtcgcagggcctaagggcgagaagggtgacgtcggacctgcaggtccacgaggcgcaactggtgtccaaggtgaacgaggaccacctggattggttttgccgggtgatcctgggcctaaaggtgaccctggggataggggtcctatcggcctaactggtcgcgcggggcccccgggtgattctggtccaccaggtgaaaaaggcgacccgggccgtccgggccctccggggcctgtaggtccccgaggtcgcgatggggaggtaggtgagaaaggagatgagggaccacccggagacccaggactgcctggaaaagcaggcgaaagaggcttacgcggggctccaggcgtgcggggacctgtcggcgaaaaaggcgaccagggtgaccctggcgaagacgggagaaatggttcgccaggatccagtggcccgaaaggcgatcgcggcgagccaggtcctccgggcccacctggccgtctggtcgacactgggcccggtgcccgggaaaagggagaacctggggaccggggacaagaagggccaaggggacctaaaggtgacccggggcttcccggggcgccaggcgagagaggcattgagggtttcagagggccccctggtccacagggtgacccaggagtacgcggcccagctggtgaaaagggtgacagggggcctccggggctggacggccgatccggtcttgatggtaagccaggagcggccgggccgtcgggccccaacggtgctgccgggaaggctggcgaccctggacgggacgggctccctggactacgcggagagcagggtttgccggggccctccggccccccaggactccctggcaagccgggcgaggacggaaagccgggtctcaacggcaagaacggtgagcctggagatccgggtgaggacggccgaaagggcgagaaaggggactcgggagcatcagggcgggaagggagagacggccccaaaggtgagcggggagcgcctggcattttgggcccgcagggacctccgggccttcctggccctgtcggtcccccaggtcaaggtttcccaggtgttcccggaggtacaggcccaaagggcgatcgtggagagaccggatcaaaaggcgaacaaggattgcccggagaacgtggtcttcgaggtgagcctggatcggttcctaacgtggatcgcctcttggagacggccgggatcaaggctagtgccctgagagaaatcgttgagacgtgggatgagtcctctggttctttcttgcctgtgcccgagaggcgtcgcggtcctaagggagattcgggtgagcaaggacctccagggaaagagggtccaataggtttcccaggggagcgcggactgaagggagatcgtggagaccctggccctcagggtccacctggattggctttgggagagcgtggcccccctggcccttccggcttggctggcgagcctgggaagcccggtatcccgggacttccaggtagagcgggcggtgttggagaggctggtagacccggagagcgaggtgaacggggggaaaagggtgaacgaggagagcagggtcgagacgggccgcccggtctacctggcacgcctgggcctcctggcccccctgggcccaaggtctctgttgacgaacctggaccaggcctgtctggcgagcaggggccccccggcctcaagggtgcgaagggtgaaccaggcagcaacggagatcaaggacccaagggtgacaggggcgtgcccggcattaagggtgacaggggtgagcccggcccacgagggcaggatggcaacccaggcctccctggggagcgtggtatggccggtccagagggcaagcccgggttgcaaggaccgcgagggcctcccgggcccgtcggcggtcatggggaccctggcccaccaggcgcaccaggtcttgcaggcccagccggaccacaaggaccgtccgggttgaagggagagccaggtgagaccggtcctccggggaggggattgaccggtccaacaggcgccgtcggcttgccgggtcctcccggcccctcgggcctagtgggccctcaaggttcaccaggactgcctggtcaagtcggagaaaccggtaagcctggtgcgccgggccgggatggagccagcggaaaggacggggacagaggaagccccggcgtccccggaagcccgggcctgcctggtcctgtaggcccaaagggcgagccaggcccaacgggtgctccgggccaggcggtggtgggtcttcccggcgctaagggggaaaagggcgcgcccggtggcctagctggtgacctggtcggggaacccggggccaagggtgatcgtggtctccctggcccccgcggtgagaagggagaggcaggccgagcaggtgagccaggtgaccccggcgaggatggccaaaagggcgcgcccggtccgaaggggtttaaaggtgacccaggggttggtgtaccgggttcccctggccccccagggccccccggcgtgaagggcgatcttggcctaccaggcttgcccggagcccccggagtggtggggtttcccggccagaccgggcctaggggggagatgggccagcctggcccatcgggagagagaggattagctggcccgcccggtcgtgaggggatacccggaccattggggccacctggacccccaggctccgtcggtccccctggagccagtggtcttaagggagataagggtgaccctggagtaggtctcccaggcccccgtggggaacgtggcgaacccggaatacgaggtgaggacggccgcccaggacaggagggccctcgtgggcttacaggtccacctggatcccgaggcgagcggggcgaaaagggggatgttggtagtgcgggactgaagggcgacaagggtgattcagcggtcatcctaggaccgccaggaccgcgtggtgcaaagggcgacatgggagaacgaggtccgcgaggcctagatggggacaagggaccgcgcggagacaatggcgatccgggagacaagggtagtaaaggggaaccaggcgataaaggatctgctggactcccgggtctacgcggactcctggggccccaaggccaaccaggagccgccggaatccccggagacccgggtagccccgggaaggacggtgtcccgggtatcagaggggaaaagggtgatgtaggattcatgggcccccgcgggctaaaaggcgagcgaggagtaaagggtgcgtgtgggcttgatggcgaaaagggcgacaagggtgaggcagggccacccggccgtccgggccttgcagggcataagggtgaaatgggggaacccggtgtacccggccagagcggtgcacccgggaaggagggacttatcggaccaaaaggagatcggggcttcgatgggcagccaggtccgaagggtgaccaaggggagaagggagaacgtggtacaccaggtattggcggcttcccagggccttcagggaatgatggtagcgcgggacctcctgggccgcctggctccgttggcccccgagggcctgagggtctgcagggtcagaaaggcgaacgggggccccccggtgaaagggtggttggtgcccctggcgttcccggtgcacccggtgaacgaggcgagcaaggaagaccgggccctgcaggcccacggggtgagaagggagaagcagctcttaccgaggatgacattcgcggttttgtccgacaggagatgagtcaacattgtgcgtgtcaaggccagttcatcgcgagcggctctcggccccttccctcatatgccgcggatactgcaggatctcagctgcatgctgtgccagtgctccgcgtctcacatgcggaggaggaggagcgtgtccccccggaggacgatgaatatagcgagtactccgaatactcagttgaagagtatcaagaccccgaggcgccctgggattcggacgatccctgttctctaccgcttgacgaggggtcctgcacggcgtacacgctccgatggtaccatcgggccgttacaggtagtacagaggcttgccatcccttcgtttatggtgggtgcggagggaacgctaaccgctttgggacgagagaggcttgcgaaagacgctgtcctcctcgcgttgtgcaatcgcagggcactggaaccgcccaggac

SEQ ID NO: 1488 - DNA, 8832 bp, Artificial Sequence
  derived and/or modified sequence
atgaccctgcgcctcctggttgccgcactctgtgccggtatcctggctgaggcccccagagtgcgagctcagcaccgagaacgggtgacctgcacccgcctttatgctgccgatattgtctttctcctcgatggctcttcaagcattgggcgatctaattttcgggaggtgaggagtttcctggaagggctcgtgctgccgttttctggcgcggccagcgcccaaggggtgaggttcgccaccgtgcagtacagtgatgatccaagaaccgagttcgggctggatgccctgggtagtgggggcgatgttatccgagcaattagggaactgtcttataaaggtggtaacactcgcacaggggccgctatactgcacgtcgccgaccatgttttcctcccacagctagcgcggccaggagttcccaaagtctgcatcttgataacggatggcaaatctcaggacctggtggacaccgccgctcagaggctgaagggtcagggggtaaagttgtttgccgtgggaatcaagaatgccgaccccgaggagcttaagcgcgtggcgagtcagcccacatcagacttcttcttctttgttaacgacttctctattctgcggactctgctgccacttgtctctcgccgggtgtgtaccacagcgggcggagtccctgtcactcgaccgcccgatgactcaacctcggcccccagggatttagttctgtctgaacccagctctcagtccctgagggtgcaatggaccgccgcatctggtccagtcaccggctacaaggtgcaatacaccccgttgaccggcttgggacaaccgctacccagtgaacggcaagaggtgaacgtgcctgctggagagacatccgttaggttacgcgggctgagaccattgaccgagtatcaggtgaccgtgatcgctctgtacgccaactccatcggcgaagcagtgtctggcacggcaagaactaccgcgttggaagggccagagctcacgattcagaacacaacggctcactccctacttgtggcctggcgatcggttccaggcgccaccggctaccgagtaacatggagggtgctctccggaggacctactcagcaacaggagctcggcccaggccaggggtccgtcctactgagggacttggaaccgggcactgattatgaagtgactgtctctacgctgttcggtagatcggtgggccctgccacttccctcatggcccggacagacgcatccgtcgagcagactctaaggccagtaatcctcgggcctacatcaatactgctgtcatggaatctggtgcctgaagccagaggctataggctcgaatggagacgcgagaccgggctagaaccacctcaaaaggtggttttgccatccgatgtgactcgctatcaattggatggcttgcagccaggaacagaataccggctgaccctgtacaccctccttgagggccacgaggtagctacccccgccacggtggtccctacgggcccagagctgccggtctctcctgttactgacctgcaggcaacagagctcccaggtcaaagagtcagggtgagctggagccctgtacccggcgccacgcaatatcgaatcatcgtccggtccacacagggcgtggaacgcaccctcgtgctgccaggtagtcagaccgctttcgatctggatgatgtgcaggctggcctgtcctatacggtgagagtttcggcaagggtgggaccgcgggaggggtctgcaagtgtcctaactgtgcgtagagaaccggagactccactagcggtgcccggtcttcgcgtggtagtatccgacgccacccgagtgagggtggcgtggggtcccgtgccaggcgcgagtggatttcggatctcttggtccacaggaagtggccctgagtcttctcagactcttccccccgactctacagcaactgatataactgggctgcagccaggtacaacataccaggtggccgtcagtgtgctccgcggtagggaagagggacctgctgccgtcatcgtcgcccggactgaccccctgggtcctgtaaggaccgtgcacgtaacccaggccagctcttcatccgtcaccatcacgtggacgagggttcctggtgcaaccggctatcgggtgtcatggcatagtgcccatgggccggaaaagtcacagctggttagcggtgaggccacagtcgcagagcttgacggactggaacccgacacagagtacactgtgcacgtgagagcccacgtcgccggagtggatggaccccctgcctcggtggtagtgcgcacagcccccgagccggttgggcgcgtgagcagacttcagattctcaatgcctcatcagacgtgctgcggataacctgggtcggggtgacaggagcaacagcatataggctggcctggggcaggtctgaagggggtcccatgcgccatcagatcctgcctggaaataccgactccgctgagataaggggcctcgagggtggggtcagctactctgtgcgagtcaccgccttggtgggcgacagagagggcacaccggtttccattgtggtgacaacacctcctgaggcacctccagccctaggtactttgcacgtggtgcagaggggtgaacattccctgagacttagatgggaaccagtgccaagggcgcagggcttcctcttacactggcagcccgaaggcgggcaggagcaatcgagagttctagggcctgaactttctagctaccatctcgatgggttagagccggcaactcagtatcgcgttaggctttcagtgctgggtcctgccggggaaggcccctcagctgaggttaccgctcggaccgagtctccccgagtccctagcatcgagctccgggtagtcgatacgtccatcgattctgtcacgcttgcttggacaccggtttccagggcctcgagttatattctgtcatggcggcccctgcggggacctggccaggaagtgcctgggtccccccagaccttaccagggatcagctcttcgcagcgggtgaccggattggaacccggagtcagttacatctttagcttgacacccgtgctggacggtgtgcgaggtccagaagcctctgtcacacagacaccagtctgcccccgtgggctcgcggacgtagttttcctacctcatgctacccaggacaacgcccatagggcggaagccacccgcagagtcctggaaaggctcgtactcgcgcttggccccctcgggccgcaggctgttcaagtcggtctgctgtcgtacagccatcgaccttcccctctgttccctctgaacgggtcccatgacctaggaatcatcctgcagaggattcgggacatgccctacatggatccttctggtaataatctgggcacagctgtagttacagcacataggtacatgctggctcccgatgccccaggccgccggcagcacgtgccgggcgttatggtgttgctggtggatgagcccctgcgtggagacatctttagcccgatccgggaggcacaggccagtggccttaacgtggtgatgttaggtatggctggtgccgatccggagcaactgagacgccttgcaccaggaatggatagcgtgcaaacatttttcgctgtagatgatggccctagcttggaccaggcggtgtctggtctggcaacagccctttgtcaggcctcttttacaacgcaacctcgccctgagccctgccctgtgtattgcccgaaagggcagaagggcgagcctggagaaatgggcctgcgaggccaagtgggcccaccaggagaccctgggctgcccggcagaacaggagctcccggcccacaggggcctcccggtagtgcaactgcaaagggagagcgggggttcccgggcgccgatggtcgaccaggatctcccgggcgggcaggaaaccctggcacccccggcgcccccggccttaaaggatcccccggtctacctggtcctagaggggatccgggagagagagggcccaggggaccaaagggagagccaggcgctccgggccaggtcatcgggggcgagggcccaggactcccaggccggaaaggcgatccaggcccgtctgggcctcccgggccgcgtggccctctgggcgaccccggacctcgagggccccccggacttcctggaactgccatgaagggcgacaaaggcgacaggggagagcggggccctccagggccaggagagggaggaattgcacctggggagcctggcctgccaggactgcccgggtcacccggccctcagggtccagtaggaccaccaggcaagaagggagagaaaggagattctgaggatggggcccctggacttcctggacagcccggtagtccaggagaacaaggcccacgcggtccacctggcgcgatcggtccaaagggggatagaggttttcctggccccctcggagaagccggggaaaaaggcgagagagggcctcccgggcccgcgggctccagaggactgcctggcgtggctggacggcctggcgcgaaagggccagagggacccccaggccctaccgggcgacagggggaaaaaggggagcctggacgccctggtgaccccgccgtagtgggccctgcagtagccggtcctaaaggcgagaaaggcgacgtgggacctgccggcccaaggggagccaccggagtgcagggagaacgcggcccgccaggtttggtgctccctggagatcctgggccaaagggggatcccggcgataggggccccatcggactgacgggccgcgctggtcctccaggcgattcgggaccgcccggggaaaaaggtgaccctggtaggccaggcccacccggcccggtagggccgaggggccgcgatggagaggtaggggagaaaggagatgaaggaccacctggagacccaggactgccagggaaggccggggagcgaggccttaggggggctcccggggttcgggggcccgtcggggagaagggcgatcagggcgatccgggcgaggatggaaggaacgggagccccggttcttccgggccaaaaggtgacagaggcgagcctggccccccgggacctccaggtcggcttgtcgatacgggaccgggcgcccgtgagaagggtgaacctggcgatcggggtcaggaaggcccgagaggccccaagggggatcctgggctgccgggagctccgggagagcggggaatcgaaggtttccgcggcccgcctgggccacagggggaccccggggtgcggggccccgctggagagaaaggagacagaggcccacccggcctcgatggacggtcagggctggacggcaagcctggggctgcagggcctagcggtcccaacggggcagccggaaaggctggagatcccgggcgggatgggctgccaggcctgcggggggaacaggggctaccaggacccagcggccccccaggcctgccaggcaagccgggggaagatggaaaacccggcctaaacggcaaaaacggagagcccggcgatccgggagaggatggccgcaaaggtgagaagggcgattctggggcatcaggcagagaggggagagacggacctaaaggagagaggggggcccccgggatcctgggtcctcaaggtcccccagggctccctgggcctgtaggcccaccaggacagggcttccctggggtgccaggcgggactgggccgaagggtgataggggtgagaccgggtctaagggggaacaagggctgccaggagagagaggcttgagaggagagcctggctctgtgcccaacgtggacagactcctggagaccgcaggcataaaggcctcggcactccgggaaatcgtcgaaacctgggacgagagttcaggctcatttctgccagtgcccgagagacgccggggtccaaaaggtgatagtggcgaacaggggccacccggcaaggagggtcccattggcttcccaggggagcggggactgaaaggcgaccggggagatcctggcccacagggaccccctggtttggctttgggcgagagggggcctccaggcccgagcgggctggctggggaaccggggaagccgggtatccctgggctaccaggccgggctggaggagtgggggaggctggccggccaggagaacgcggagaacgcggcgagaagggtgagcggggggagcaaggaagggatggaccacctggcctgccaggaacacctggccccccaggacctcctgggcccaaggtgtctgtggacgagccaggacctgggctgtctggcgaacagggcccccctggcctgaagggagccaaaggcgagcctggatctaacggggatcagggccccaaaggcgacaggggcgtgccagggatcaagggggacagaggagagcccggtcctcggggtcaggacggaaatccagggttacccggcgaacgtgggatggccggacctgagggcaagcccggtcttcaggggccacgtggaccaccgggacctgttggcggccacggagaccccggtcccccaggtgctccaggcttggccggccccgctggtccccaagggccctccggactgaaaggcgagcctggcgagacgggaccaccaggccgcggcctgacaggcccgaccggcgcagtgggattgcctggtcctcctggcccctcgggcttggttggaccccagggcagtcccggtctcccaggccaggtgggcgagaccgggaagcccggtgcccctggtcgcgacggagcctcgggaaaggatggggacagagggtcaccgggcgtcccggggtcacctgggctcccaggcccagtaggccccaagggcgagccaggcccaaccggcgcccccggccaggcggtcgttggactgcctggggccaagggagaaaagggtgcccccggaggactggcgggcgacctggttggggaacccggagctaagggtgaccggggcctgccagggcccagaggagaaaaaggggaagcggggcgagccggagagcctggggatccgggggaagacggccagaaaggtgcaccagggccaaaggggtttaaaggcgatcctggagttggagtacccggcagccccggcccacccggaccacctggtgtcaaaggcgatctgggactgcccgggctgcccggtgcccctggcgtcgttggatttccggggcagactggcccgcgaggagagatgggtcagcctggcccttccggggaacgtggccttgccggacccccagggcgcgagggcataccagggcccctgggcccccctggacccccgggatcggtggggccacctggcgctagtggcttaaagggggacaaaggggaccctggagtgggtctgcctggtcccagaggggaacgaggcgagccaggaatccggggagaggacggccggcccgggcaggagggcccccgagggctcactggccctccaggatcaagaggagagcggggggagaaaggagatgtcggctcagccggacttaaaggtgataagggcgatagcgccgtgatcctgggacccccaggccccaggggcgctaaaggcgacatgggagagcgggggcctcgcgggttagatggggataagggcccacggggcgacaatggcgatcctggagataagggctcgaaaggagagccaggagataaaggtagcgcaggccttcctggcctcaggggcctgctggggccacagggccagccgggggctgcgggcatccctggcgacccagggtccccagggaaagacggagtacccggaatcaggggagagaaaggcgatgtcgggtttatggggccaagaggcctgaagggcgaaagaggagtgaagggtgcatgcggcctggacggagagaaaggtgataaaggcgaagctggaccacccggcagacccggcctggcagggcataaaggcgagatgggagaaccaggtgttcctgggcaaagtggggcacccggtaaggaggggttgatagggcccaagggggaccggggttttgacggccaaccgggaccgaagggcgatcaaggagagaagggagagagggggactccagggataggcggattcccaggaccttctggcaacgatgggtctgccgggccccccggaccaccggggtctgtcgggccaagaggaccagaggggctgcaggggcaaaagggcgagaggggtccccccggagagagggtggtaggcgccccaggcgtcccgggagctcccggggaaagaggagagcaggggagacccggtccagctggcccccggggtgagaagggtgaagccgccctgactgaagacgatattcgaggcttcgttcggcaagaaatgtcccagcactgtgcctgccagggacagtttattgcatctggctcccgcccgctgccaagctacgcagctgatacggctggatctcagctacatgctgtaccagtgttgcgggtgtcacatgcggaggaggaggagagagtgcctcccgaggacgacgaatattctgaatactctgaatattcggtggaagagtaccaggatcccgaggctccctgggactccgatgatccttgcagccttcccctggacgagggatcctgcactgcttatacattgcgatggtaccatcgggccgtgacgggctccaccgaagcctgccaccccttcgtttacggcggatgtggtggtaacgccaatcgatttggtacacgagaagcctgtgagcgtcggtgtcctccccgcgtggttcagtcacaaggcacggggactgctcaggat

SEQ ID NO: 1489 - DNA, 8832 bp, Artificial Sequence
  derived and/or modified sequence
atgacccttcggcttttggtcgcagctctctgtgcggggatcctggctgaggcaccacgtgttcgcgcacagcatcgagaaagagtcacgtgcacaagactttatgcagccgacatcgtcttcctgcttgatggctctagcagcatcggtagatcaaacttccgtgaggtcaggagctttctggaggggctcgtcctgccctttagtggtgccgcctctgcccaaggcgtcagattcgctacagtgcaatactccgacgatcctaggactgagtttggtcttgacgctctgggcagcggcggcgacgtgattcgggctattcgggagttgtcatataaaggggggaacaccaggactggtgctgccatcttgcacgttgctgaccacgtcttcctcccgcagttggcacggcccggcgtgcctaaagtgtgcatactgatcaccgacggaaaatcacaagatctcgttgacacagcagctcagcggcttaaaggccagggggtcaagttgtttgcggttggaatcaagaacgccgatcccgaagagctcaaaagggttgctagccagccgacatctgactttttctttttcgtaaacgacttctctatcctaaggactttgctgcccctggtctctcgccgggtgtgcacaaccgcaggaggagtccccgtgacccggccgcctgacgactctaccagcgccccacgggaccttgttctttcagagccttcgtcacagagcctgcgggtgcagtggacagcagcgagcggtcccgtgaccggctacaaggttcagtatacacctctcacagggctgggccaaccactgccctccgaaaggcaggaagtaaatgtccctgccggggaaactagtgtgcgtctgcgcgggctgcgaccccttaccgagtatcaggtcactgtgattgccttatacgcaaactcaataggcgaggcggtgtccgggaccgcccggactacggctcttgaaggaccagaattaacaattcagaacaccacggcccactccttgttggtagcatggcgaagcgtgccaggggctaccggctacagggtgacctggcgagtcctgagcggaggcccaacccagcagcaggagctgggaccagggcaaggcagcgttctgctgagggacctggagcccggcacggactacgaagtgactgtttcaactttgtttgggagaagtgtagggcccgctacttccctcatggcaagaaccgatgcgtcagtcgagcagacactcagaccagtgattctggggcctacttccatcctgctgtcctggaacttagtccccgaagctcggggttaccgtctggaatggaggagagagactgggctcgaacctcctcagaaggtggtattgcccagcgacgtcactaggtaccagttagacggactgcagccaggaaccgagtaccgcttgactctgtatacactgctggaaggccatgaggtggccactccagctaccgtcgtgcctacaggcccagagttgcccgtgtctcccgttactgacctgcaggccacggagttgcctggacaacgggtgcgggtttcctggagccccgtcccaggagccacacagtacagaattattgtgcgaagtacacagggggttgagcggacattggttctgcccggtagccagacggcgttcgacctggacgacgtgcaggctggcttaagctacaccgtaagagttagcgctcgtgtcggcccccgtgaagggagcgcatctgtgctcactgtccggagagagccggagaccccactcgcggtgcctggcctgagagttgtcgtctcagacgccacacgagtaagagtggcctgggggccagtgccaggtgcctccggcttcaggatcagctggtctacaggtagcggacctgagtccagtcagaccctcccccccgattcaacggctactgatatcaccggactgcagcctggtaccacgtatcaggtggccgtgagtgtccttcggggcagagaagagggaccagcggccgtcatcgtcgctcggaccgaccccctcggccctgttcgaacagtgcatgtgactcaggcctcctccagctcggtgactatcacgtggacccgagtacctggggctacgggctaccgagtgtcgtggcactccgcacacggccccgagaaaagccaactcgtcagtggggaagcaaccgtggcagagctggatgggctggagccggacactgagtacactgtgcacgtcagggcacatgtggctggcgtggatggtccccccgcctcagtggtcgtgcggactgcacctgagccggtggggcgggtgagccggttgcaaatactcaatgcatcctcagacgtgttgcgaatcacttgggtgggcgtgaccggcgctactgcttatcggttggcttgggggcgctcggaaggcgggccaatgcgccaccagattctgcctggcaacacagactctgccgagattcgtggcctggaaggcggtgtgtcctattcagtgagagtgacagcactggtgggagatcgggaaggcacccccgtttcgattgtagtgactacccctcccgaggcaccccccgctctaggcaccctccatgttgtgcagcgcggcgagcactctctccggctaaggtgggagcctgtcccaagagctcagggttttctactacactggcagcccgagggcggccaagagcagagccgagtgctaggaccagaactatcttcataccacttggatggcctggagccggccacgcagtaccgggtgcgcctgagcgttttgggacccgccggcgagggccccagcgccgaggtgacagctcggactgaatctcccagagttccaagtatagaactgcgcgtagttgacacttctatagattctgtgacactggcgtggactcctgtcagccgggctagcagctatattctgagttggcggcctttgaggggccctggacaggaagtccctgggtcaccacagactctgcccgggatctcttcatcccagagagtgaccggcctggaaccgggagtctcgtatattttctcactgacccccgtcctagatggagtacgtggcccggaggcttctgtcacccagacacccgtgtgtccgagaggattggccgatgtggtgttcctgcctcacgctacccaggacaacgcccaccgagcagaggcaacccgcagggtgctcgagcggctagtcctggccctaggccctctcggcccgcaggcagttcaagtgggtcttctgtcttatagccatcgaccttctcctctgttcccattaaatggttctcacgatctgggaatcatactacagcgcattcgtgatatgccgtacatggatcccagcggaaataatttaggcacagcggtggtgaccgcacatagatacatgctggcccctgacgctccgggtcgccgccagcacgtcccaggcgtcatggtgcttctcgttgatgaacccttgcggggtgatattttcagccctatccgggaagcccaagccagcgggttgaacgtggtaatgctgggcatggcgggtgcagatcccgaacagctcaggagactcgctccgggcatggattcagttcagacattcttcgccgtcgatgatggcccgagtttggatcaggccgtgtctggcctcgccacagcactgtgtcaggcctcatttactactcaaccccggcctgagccttgcccagtttattgccccaaagggcagaagggggagcctggtgaaatgggactgcgcggccaggtgggtcctccaggcgatccgggtctgccaggaagaaccggggcccctgggccccagggccctccaggaagcgccaccgcaaagggcgaacgcgggttccctggagccgacggacggccgggatcccccgggcgagcgggaaaccctggtacccccggagctcctggtctcaagggatcccctggactacccgggcccagaggagaccccggcgagagaggacctcgaggtcccaagggggagcctggcgccccaggacaggtcatagggggcgagggacctggtctgccaggccgaaaaggcgatcccggaccctcgggtccacccggtcccaggggaccgctgggcgaccctgggccgcgggggcctcccggcttgcccggcaccgctatgaagggtgacaagggagatagaggtgagagggggccaccgggcccaggtgagggcggcattgccccaggcgaaccgggcctgcctgggctgccagggagccccggaccccagggacctgtgggcccaccagggaaaaagggggaaaaaggagacagcgaagacggggcccctggcctgcccggccagcccggatcacctggcgagcaggggcctcgagggccaccaggcgcaatcgggcctaagggggacaggggattccccgggcccctgggagaagctggagaaaagggggagagggggccgcccggccctgccggctctaggggcctgccaggagtggccggacgacccggcgctaaaggtcctgagggaccccctggacccacgggtaggcagggggagaagggagagcccggtcggcctggggatcctgcagtcgtgggcccggccgttgccggaccgaaaggagagaaaggtgacgttggccctgccgggccacgcggagctacaggggtacaaggggaaaggggaccccccggtctcgtcctgcccggcgaccctggacccaaaggggatcctggtgatcgtgggcctatcgggttgactggacgagccggcccaccgggagactctggcccccccggcgagaagggagacccaggacgtccaggccccccaggccccgttgggcctaggggaagggatggagaagtgggggaaaagggcgacgaggggccccctggcgacccgggcctccctggtaaagcaggcgagcggggactgcgcggcgcccccggagtgagagggcccgtcggagaaaagggggatcagggagaccctggagaagatgggcggaacggctcaccaggttcctctgggcctaaaggcgatcgcggggagcctggcccccccggaccaccaggacggctggtagatactggccccggggcacgggaaaagggcgagcctggcgatcggggccaggagggcccccggggccccaagggcgatcctggtttgcctggcgccccaggtgagagagggatcgaggggtttagaggcccccctggacctcagggtgatcctggcgttaggggcccagctggagaaaaaggcgatcggggcccacccggattagatgggaggagtgggttagacgggaagcctggtgccgcaggaccctctggtcctaacggtgcggcgggcaaggcaggggatcctggccgcgatggactccccggtttacggggggaacagggcttaccggggcctagcggacctcctggtttgcctggcaaacctggcgaggatggaaagccggggctgaacggcaagaacggagaacctggcgacccaggtgaagacggaaggaaaggcgaaaaaggcgattccggagcctctggcagagaaggaagggacggccctaagggggagcgaggcgcgccagggatcctgggtccccaaggccctccgggtctcccaggcccagtcggtccccctggtcaagggttcccaggggtccccggcggtactggtcctaagggcgatcggggtgaaaccggatctaaaggagagcaggggcttcccggggaaagggggctgcgcggtgagcctggctctgtgcctaacgttgataggctgctcgagacagccggcatcaaagcctctgccctccgcgaaatcgtggaaacatgggacgagtcaagcggatcattcctgccagtgccagagaggaggcggggtcctaagggggattcaggagaacagggccctccaggcaaggaaggcccaataggattcccgggggaacgcggcctgaaaggcgataggggcgaccccgggccgcagggaccccccggcttagccctcggagagagaggccctcctgggccttctggcctggcgggggaacccggcaagcccgggattcccggtctccccggtagagccggtggggtgggggaggctgggcggccgggagagaggggagaacgaggcgaaaagggggagagaggcgagcaagggagagacggtcctccaggattgccaggcactcctgggccacccggaccgccaggaccaaaagtcagcgtcgatgagcccggaccaggcctgtcaggtgaacagggcccacccggactcaagggcgcaaagggtgaacctggctcaaacggagatcaggggccaaaaggcgacagaggagtgccaggtattaaaggtgaccggggggagcctggacctcgcggtcaggatggtaatccagggctgccaggagagcgtgggatggctggccccgaaggtaagccaggcctgcaaggtcctagaggacctcctggccccgtgggcggccacggcgatccaggaccgcctggtgctcccggactcgccggacctgcaggcccccaggggcccagtggtttgaagggtgaacccggtgaaactgggccaccaggtaggggcttgactggccccacgggcgctgttggattaccaggtcctcctgggcccagtgggctggtgggcccccaggggtctcctggtctcccaggacaagtaggcgagacggggaaacccggggcgccgggcagggacggcgcgtctggcaaggatggcgacaggggatctcccggtgtcccaggcagtccaggactgcccgggccagttggccctaagggtgagcctggcccgaccggtgcacctgggcaggccgtagtcggcctcccaggagcgaagggtgagaagggggccccgggcggtctggccggagatctagtcggtgagcccggagctaaaggcgaccgtggtctccctggccctcgcggtgaaaaaggagaggccggaagggccggggagcccggcgacccaggggaagacggacaaaagggagctcccgggcccaagggtttcaagggcgatccaggagtgggggtcccaggcagtccagggccgcccggccccccgggggtgaaaggcgatcttggtctcccgggcttgcctggggctccaggtgtggtcggttttcccggccagaccgggccacgcggcgaaatgggtcagccagggccttcaggagagcgcggtcttgcaggtcccccagggagagagggtatccccggtccactgggaccaccaggcccacctggaagcgttggaccgcccggtgctagcggacttaaaggagacaaaggtgaccccggtgtcgggctccccgggccgcgtggagaaaggggtgagcctgggattcggggggaagatgggcgtcccggacaggagggcccccgtggcttgacagggccaccagggtctaggggagaacggggtgagaagggtgacgtgggatcagccggcctgaagggagataaaggcgattcggctgtgatattaggaccaccaggcccgaggggagccaaaggggatatgggagaacgtgggcctcgtggcctggacggagataaaggccctcgcggagacaacggcgaccccggcgataaaggctcaaaaggagagcccggtgacaaaggtagcgccggattgcccggcctgcgagggctgctgggaccccagggtcagcccggggcggccggcatccccggtgacccaggtagcccgggcaaagatggagtcccaggcattcgaggggagaaaggggatgtcggcttcatgggcccccggggcctgaagggagagcggggagttaagggggcctgtggactggatggagaaaagggcgataagggcgaagcgggaccgccgggccgccctgggttagctggacataagggtgagatgggggaacctggggtacccggacagtctggcgcacccggcaaggaaggactgatcggcccaaagggagacaggggattcgatggccagccaggccctaagggagatcagggcgagaagggcgaaagggggacccccggcatcggcggctttcctggcccgtcgggcaatgacggctccgcaggaccccctggcccccccggcagtgtgggccccaggggccccgagggccttcagggccagaagggggagcggggaccacccggtgaacgggtggtgggggccccaggagtcccgggcgcccccggagaacggggagagcagggcagacccggacctgccggaccccgcggcgagaaaggagaggctgcactgacagaagatgacatccggggattcgtacggcaggaaatgagccaacactgcgcatgtcagggccagttcatcgccagcggttctcggccattgccctcttatgctgctgataccgccggaagtcagctccacgcagttcccgtgttgcgagtctcgcacgctgaagaagaagagcgggtgcctccagaagacgacgagtatagcgaatattccgagtactctgtggaggagtatcaagatccagaggccccttgggactcagacgatccttgtagcttgccgttagatgagggctcctgcactgcctataccctgcgttggtatcaccgcgctgtcaccggtagtacagaagcttgtcatccattcgtttacggggggtgtggtgggaacgccaataggttcggcacacgagaggcatgcgagcgccgctgcccacctcgggtggtacagtcccaaggtactggcaccgcccaggat

SEQ ID NO: 1490 - DNA, 8832 bp, Artificial Sequence
  derived and/or modified sequence
atgaccttgcgtctgctggtggcggccctctgtgcaggcatcctcgcagaagcaccgagggtgcgcgcgcagcatcgggaacgcgtgacctgtactcgactttacgcagcagacattgtgtttcttctcgacggatcatcgtcgataggtcggagcaactttagagaggtgaggagctttcttgagggtctggtgcttcccttttcaggtgcagcaagcgcacaaggcgtgaggttcgcaaccgttcagtactcagacgacccacgtaccgagtttggactggatgccttgggaagcgggggagatgtgataagagcaatacgtgaactttcgtacaaaggtgggaacactcgcactggagccgcaatcctgcatgttgctgaccacgtgtttctccctcagcttgcacgccctggcgtgccaaaagtttgcattctgattactgatggtaagtcacaagatctggtcgatacggcagcgcaaaggttgaagggccagggtgtcaaactttttgctgtcggaattaagaatgcagatcctgaagaactgaaacgagttgcatcccaacctacctcagacttctttttcttcgtgaatgatttctcgattctccgcactttgctgccgctcgtctcgaggcgagtgtgcactactgcaggtggtgtcccggtgactagacctcctgacgattcgacttcggctcccagagatctcgtgctctcagagccgtcatcgcaatcccttcgggtccaatggacggcagccagcggacctgtcactggttacaaagtccagtatactccacttaccggtcttggacaaccgctgccttcagaacgccaggaagtgaacgtgccagctggggagacttccgtccgactgcgcggactcaggccgctgaccgaataccaagtcactgtcattgcactgtacgccaacagcatcggggaagcagtctcaggtaccgcacgtaccacggcacttgaaggtccagaacttactattcagaacactacggcacactccctgttggtcgcctggagatccgtccccggtgcaactggataccgtgtgacctggcgcgtcctcagcggaggccctactcaacagcaagaacttggtcctggccaaggatcggtgctgctgcgcgaccttgagccagggaccgactacgaagtgacggtgtccaccctttttggtcgctccgtgggcccagcaactagcctgatggcacggaccgacgcaagcgtggagcagacccttcggccggtgattctgggaccgacctcaatcctcctttcttggaatctggttcccgaagcgaggggttacagattggagtggcggagggaaaccgggctggagcctccacaaaaggtggtgctcccaagcgatgtgactagataccaacttgatggacttcagcccggcaccgaataccgcctgactctgtataccctcctggaaggccatgaagtggctactccggcaaccgtggtgcccaccggtccagagctgcctgtctcacccgtgaccgatctccaagcaaccgagctgcccggccaaagagtccgcgtcagctggtcgccggtcccaggagctacccaataccggattattgtgagaagcacccagggtgtggaaaggaccctggtgcttcccggcagccagactgccttcgatctggacgacgtgcaagcgggactgtcctacacggtgcgcgtctccgcaagggtggggccgcgggaaggtagcgcatctgtgctgaccgtgagaagagagcccgagactcctcttgcagtgccgggactgagagtggtggtgtcagatgctacccgagtgcgggtggcctggggaccagtcccaggagcgtcgggattccgtatctcctggagcaccggatccggtccagaaagcagccagacccttccacccgatagcacggcaacggatattaccggactccagccaggaacgacctaccaagtggccgtctccgtcctgcggggtagggaagagggacctgcagccgtgatcgtcgcgagaacggatcctcttggacctgtgagaactgtgcatgtcacccaagcgtcgtcctcatcagtgacgattacgtggactagagttccaggagcaacgggttacagagtgagctggcattcggcacatgggcctgaaaagtcccagttggtgtcgggggaagcgactgtcgccgagttggatggacttgaaccggatactgaatatactgtgcatgtgcgcgcacatgtggcaggggtggatggacccccagcgtccgtcgtggtgagaactgcgcctgaaccggtggggcgcgtgtcaagactccagatactcaacgcatcctccgacgtgctccgcatcacctgggtgggtgtgacgggagccaccgcctacagactcgcgtggggacgctcggaggggggacccatgaggcatcaaattcttccgggtaatacggactccgcagaaattcgggggctcgaagggggagtgtcgtattcggtgcgagtcactgcgcttgtgggggatcgggagggtactcccgtctcgattgtggtgacgactccacctgaggcacctccagcactgggaacccttcacgtcgtgcagcgtggtgaacactcactccggttgcgctgggaacctgtcccacgggctcaggggtttcttctgcactggcaacctgaggggggacaagaacaaagccgggtgctgggacctgagctttcgtcttaccatcttgatggtctggaaccagcaacccaataccgggtgagactgtcggtcctgggaccggcaggtgagggaccatccgcggaagtgaccgctcgtaccgaatcgccaagagtcccctctatagaacttagggtcgtggatacttccattgattcggtgactctggcgtggactcctgtgtcccgggcctcgtcatatatcctgtcctggcgacctttgcgggggccgggtcaggaggtccctgggtcgccccagactttgcctggtatttcctctagccaaagagtgactggacttgaacccggagtctcgtatatcttctcgctcactcctgtgctggatggcgtgcgcggtcccgaggcctcggtgacccaaacccccgtgtgccctagaggcctcgcggatgtggtgtttcttccacacgcaacccaggacaacgcacatagggcagaagcaacccggcgggtgctcgaacgcctcgtgctggctctgggaccgctggggccccaggccgtgcaagtcggccttctttcctactcgcatcgccccagccctctctttccgctcaatggaagccacgatctggggatcatcctccaacggatccgcgacatgccatatatggatccgtccggtaacaacctcggaactgcagtcgtgaccgcacatcgatacatgctggcccccgatgccccggggcgaaggcaacacgtgcccggggtgatggtgctcctcgtggatgaacctcttcgaggagacatattcagtcctatccgagaagcacaggcgagcgggttgaacgtcgtcatgctgggcatggccggagcagatcctgaacagctgcggcgactggcacccgggatggactcagtgcaaaccttttttgccgtggatgatggaccctccctggatcaggcagtgagcggccttgcaactgcactgtgccaggcatcgttcactactcaaccaagaccagaaccatgtccagtctactgcccaaaaggacagaagggagagccgggagagatgggtcttagaggacaagtgggtccaccaggggaccccgggctgcctggtaggaccggtgcacctggtccccagggaccgcctggatcggccaccgcaaagggagagcgaggatttcccggtgctgacggacgtcctggttcgcccggacgggcaggtaatccgggtacgccgggtgcccctggcctcaagggttccccaggtttgcctggaccaaggggtgatccaggcgagcgcggacctaggggacccaagggggaacctggggctccaggtcaagttataggaggcgaaggacccgggctgccaggccgcaagggcgatcctggcccatccggtccccctggacctcgcggaccactgggagatcctggtccgcgcggaccaccaggactgccaggcactgcaatgaagggtgataaaggagatcggggtgagcgcggccctcctggtccaggagaaggcgggattgccccaggtgaaccgggccttcctgggctcccaggctcacctggtccacaaggtcctgtcggaccacccggcaagaaaggtgaaaagggagattccgaagatggggcccccggacttcccgggcaaccaggatccccaggagaacagggtcctagaggacctcctggagcgattggccccaagggcgatcgggggtttccaggacctctgggcgaggccggtgagaagggtgaacgtggcccacccggacctgcaggatcgagaggtctgccaggtgtggcagggcgtccaggtgcaaagggccccgaaggacctcccgggccaactggtcggcaaggtgagaagggtgagcccggtcggcccggagatcccgcagtggtgggccccgcagtggcaggtcctaaaggggagaaaggggatgtggggcctgctggacccaggggcgctactggagtgcaaggcgagcggggccctcctggcctcgtgctgccaggagatccagggccaaagggtgatcccggggatcgcggacctattggactgaccggtagagcgggaccgcctggagactcgggacctccaggggagaaaggggaccctggccgccctgggcctccgggccctgtggggccacgcggaagggatggggaagtcggagagaaaggtgatgaaggcccaccaggagatccaggcctccctggcaaagcgggagaaaggggactccgaggagctcctggtgtcagggggcctgttggcgagaaaggggaccagggtgaccctggcgaagatggaaggaacggatctccgggttcgagcggtcccaagggggatcgcggagagcctgggcctcctggtcctcctggacggctcgttgatactggcccgggtgcacgggaaaagggagaacctggggacaggggacaggagggtccgcgcggcccgaagggcgatcctggtctgccgggagcgccgggagagagaggtattgaagggtttagaggccctccaggacctcagggagatcccggcgtccgagggccagcaggcgaaaagggcgacagggggccacccggcctggacggtcgctccggacttgacggtaaacctggcgcggcaggcccttccggaccgaacggagcagccgggaaggcaggagatccgggacgcgatggcctgcctgggttgcggggcgaacaaggcctccctgggccatctggacccccaggcctgcctggtaagccaggcgaagatggaaagcctggactgaacgggaagaatggtgaaccgggagatcctggtgaggacggcagaaagggggaaaagggtgactccggtgcaagcggaagagaaggacgcgatggcccgaagggcgagagaggggcccctggcatccttggacctcaaggacctcctggacttcccgggccagtcggaccgcctggacaaggatttccaggcgtgccgggtggtaccggtcctaagggtgatcgaggagaaactgggtcgaagggcgaacaagggctgccgggagagagaggccttcgtggagagccgggatccgtgcctaacgtggatcggctgctggaaactgcgggcatcaaggccagtgcccttcgggaaattgtggaaacttgggatgaatccagcggttccttccttcccgtgcctgagcgcagacgtggaccaaagggcgattccggagagcaaggacccccaggcaaagaggggcctatcgggttcccaggtgaaaggggactgaaaggggaccggggagatcctggaccccagggaccacctgggttggcgctgggcgagagagggccgccaggaccaagcggacttgcaggcgaaccgggaaaaccaggaattcctggactgccaggtcgggctggaggtgtcggagaagcgggcagacctggggaaagaggtgaacgaggcgaaaaaggggagagaggggaacaaggtagagatggtccacctggcctgcccggaactcctggcccaccagggccacctggacccaaagtgtcggtggacgaaccaggccctggcctttcaggtgaacaggggccacctggcctgaagggagcaaaaggagaaccgggttcaaacggggaccaaggtcccaagggcgaccgaggagtcccggggattaaaggagataggggagaaccaggaccgagagggcaggatggcaatccaggactgcctggagaacgaggaatggcaggaccggagggtaagccaggattgcagggtccacggggccctccaggtccagtggggggacatggagatccggggcctccaggagcacccggccttgcgggaccggccggaccgcagggaccgagcggactcaaaggcgaacccggagaaaccggtccaccaggcagaggtcttactggcccaaccggcgcagtgggccttcctggtcccccgggaccctcgggccttgtggggccgcagggatcgccaggactgcctggccaagtcggggagactggaaagcctggagcccctggccgcgatggagcctcaggaaaagatggtgaccgcggatcacctggagtgccaggatcgccgggtctgcccgggcctgtgggaccaaagggagagccagggcccactggtgccccaggccaggcagtggttggacttccaggtgccaaaggagaaaagggagccccaggcggcttggcaggagacttggtgggcgaacccggcgcaaagggggaccgtggcctgcctgggcctcgcggtgaaaagggagaagcaggccgagcaggtgaacccggggatccgggcgaagatggacaaaagggagcacccggaccaaaaggttttaagggtgatcctggagtaggagtcccgggttcacctggaccccccggtcccccgggtgtcaaaggcgaccttggacttcctggacttcccggagcaccaggcgtggttgggtttcctggccaaaccggaccgcgcggggaaatgggtcaaccaggaccatccggagaacgcggtcttgctggtccacccgggcgggaaggtattccaggccctctgggcccacctggacctccaggatcggttggtcctcctggtgcctcaggtcttaaaggtgataagggagatccaggcgtgggacttcctgggccaagaggggagcgcggagagccagggatacgtggagaagatgggcggccgggtcaagagggcccgcgggggttgactgggcctccaggctcgaggggtgaacgaggagaaaagggtgatgtcggtagcgcggggcttaagggtgacaagggagactccgcggtgattctcgggcctccaggaccaagaggcgcgaaaggtgatatgggagaaaggggaccaagaggacttgatggagataagggtccacgcggagataacggtgatccaggtgataagggatccaagggtgagcccggagacaagggatccgccggcctgcctggtctgcggggacttctggggcctcagggacagcctggagcagcagggattcccggcgatcctggctcacctgggaaagatggcgtgcccggaattagaggagagaaaggtgatgtgggttttatggggccacggggactgaagggcgaacgaggagtgaagggtgcatgcggccttgatggcgagaagggtgataagggagaggctggtccccctggtaggccaggactggcaggtcacaagggtgaaatgggggagccaggtgtgccaggccaatcgggggcaccaggaaaggaggggcttatcggccctaagggcgaccgaggtttcgatggacaacctgggcctaaaggcgatcaaggcgagaagggcgaaagaggcacgccgggaattggagggtttccgggcccttcaggaaatgacggatccgcaggcccgccgggacctccagggtcggtgggacctcgtggcccagaaggactgcaaggtcaaaagggagagagaggtcctcctggagaacgtgtggtgggagcccctggagtgccaggcgctcctggtgagaggggagagcaaggtcggcctggaccggcaggtcctagaggggaaaagggggaagccgccctgaccgaagatgatattagaggattcgtgcgccaagaaatgtcccaacattgtgcatgtcaaggtcagttcatcgcttccgggtctaggccacttccttcatacgcagcagacactgcagggtcacaacttcacgctgtgccggtgctgagggtttcccatgcggaagaagaggaacgggtgccaccagaggacgacgaatacagtgagtactcagagtactccgtcgaggaataccaggaccccgaagcaccatgggacagcgatgacccctgtagcctgccactcgatgagggctcatgcaccgcgtacaccctccgatggtaccatcgggccgtgactggatccaccgaggcgtgccacccctttgtctacggcggatgtggaggcaacgcaaacagatttggaaccagggaagcatgtgaaagacggtgtcctcccagagtggtgcaatcccagggaactggtaccgcccaggac

SEQ ID NO: 1491 - DNA, 8832 bp, Artificial Sequence
  derived and/or modified sequence
atgacattacggctcttggtggccgccctctgcgccgggatccttgctgaggctccaagagtgcgagcccagcaccgcgagagggtaacatgcactagattgtatgccgcagatatcgtgtttctcctggatggatcttcctccatcgggaggtcaaattttcgcgaagtccgttcattcctggaggggctggtactgcccttctcaggagcagcatctgcgcagggagttcggttcgcaactgtccagtacagtgatgatcctagaactgaattcggattggatgcactcgggtctgggggagatgtcatccgcgccataagagaactttcctataaagggggaaacactcggacaggagcagccatactacatgtggctgatcacgtgttccttccccaactcgcccgccccggggtgcccaaagtctgtatccttattacagatggaaagagtcaggacctcgtcgatactgctgcacagaggctcaaaggacagggagtgaaactttttgctgtgggaatcaaaaatgctgatcccgaagagttgaaaagagtagcttcccagcccacttcagacttttttttttttgtgaacgatttctccatattgagaacactattgcctctggtttctcggcgagtttgtacgactgcgggaggagtaccggtcactagacctccagatgattctacatcagctccccgggatctcgtcctttcagagccttctagtcagtctctccgggtccagtggacagcagcctctggacccgttactggatacaaagttcagtatactccactaactgggctgggacagccactccctagtgaacggcaggaagtaaatgtgcctgccggggagacatctgtcagactgcggggactccgacccctcactgagtaccaggtgacggtcatagcgctttatgcaaacagtatcggagaggctgtgtcgggaactgctcggactacagctctcgaaggacctgagttgactatacagaacactacagcccacagtctacttgttgcctggagatcggtacctggggctactgggtatagggttacttggagggttttgtctggggggccaactcaacagcaggaactggggccaggacagggatctgtcttacttcgagatttagaacccgggacagattatgaagtgactgtgtccactctattcgggaggtcagtaggacccgctacatccctcatggcacgaacagatgcctcagtcgagcagactttacgacctgtgatactggggcccactagtatcctgctaagttggaaccttgttccagaggcccgagggtatagactcgaatggaggcgagagacgggactcgaaccccctcagaaagtcgtactgccaagtgatgtcactcgataccagcttgatgggctgcagcccggaactgaataccggctaactctttatacactcctagaaggacacgaagtcgccacaccagcaactgtggtgccaacaggacccgaactccccgtgagtcctgtgactgatctccaggccacggaactcccagggcagcgggttcgggtctcgtggtcacccgtgcccggggccacacagtataggatcatcgtccgttcaacacagggagttgaacgaactctggttcttcctggatctcagacagcatttgatttagatgacgtgcaggccggactctcctacacagtccgagtttccgctcgggtgggacccagggaggggtcagcctcagtattaacagtaaggcgggagcctgaaacaccgcttgccgtcccagggctccgggttgtagtgtctgatgccacaagggtcagagtcgcatggggacccgttccaggagcgtccgggtttaggatttcctggtccacaggatctgggcccgaatcatcccagacactacctcctgatagtacagctacagatataacaggactacaacctgggacaacataccaagtcgccgtgtcagttcttcgcggacgggaggaggggcccgccgctgtgattgtagcgaggacggatcccctcgggcccgtgaggactgttcacgtaactcaggcatcatcttcctctgtgacaatcacatggacacgagtgcccggagccactgggtatcgagtatcttggcactcggctcatggaccagaaaaatcacagctggtttctggagaagcaacagtggcagagttggacggattagaaccagatacagaatatactgtccatgtgagggcacacgttgcgggagtcgatgggcctcccgcttcagtggtggtaaggactgcccccgaacctgtcggaagagtgagtagacttcaaatcctcaacgccagttcggatgttctcagaatcacatgggtcggagttactggagcgacagcataccgcttggcatggggaaggtctgaagggggaccaatgaggcaccagatattgccaggaaacactgattcagcagaaatccgggggctagaggggggggtaagttactccgtaagagtaacagctctggtgggagatcgagaaggaacacctgtctccatagtggtaacaacaccccccgaggctcctccagctcttggaactctgcatgtagtgcagcgtggggaacattcccttcgcctacgctgggagccagtgccgagggcacagggattcctacttcattggcagccagaagggggacaggagcaatcccgtgtcctggggcccgaactatcgtcttatcacttggatgggctcgaacccgccactcagtatcgcgtgcgcctgtcagttctggggccagccggagaaggaccttccgctgaagtaactgcccggactgaatcacctcgcgtgccttctatagaactcagagtagtagatacttccatcgattcagtaacacttgcgtggactccagtctcccgagccagttcttatatattgtcttggcggcctttgagagggcccggacaggaagtgccaggatccccacagacactacctggaatctcctcttctcagagagtaactgggctggaaccgggagtttcatacatctttagtctgactccagtgttagatggagtgcgggggccagaggcctccgtgactcagacaccagtttgtcccaggggacttgctgacgtggtgtttctccctcatgcaacacaggacaacgcccacagagccgaagccacacgtcgggtgcttgaaaggttagtgcttgcactgggacccctcgggccacaggcagtccaggtcgggttgctatcttattcgcacaggccttcacctctattccccctcaatggaagtcatgatctcgggatcatcttacagagaatccgtgatatgccatacatggatccttcagggaacaatctcggaacagccgtagtgactgctcataggtatatgctcgcaccagatgcccccgggaggaggcagcacgtgcctggggtgatggtgttgttggttgatgaacctcttcgaggggatatcttctcccccataagagaagctcaggcatcaggattaaatgtcgtgatgctcggaatggcaggggcagatcctgaacagcttcggcggctagcccctgggatggactccgtgcagacattcttcgctgtcgatgatgggccgtcccttgatcaggctgtgtcagggcttgcaactgccctctgtcaggcttcctttacaacacaacccaggcctgagccctgtcccgtgtattgcccaaaaggacagaaaggggagcccggggaaatgggattgagggggcaggtgggaccccctggggatccagggctccccgggaggacaggagccccagggccacagggacccccaggatcagcgactgcaaaaggagaaaggggattccctggggctgatggaaggccagggtctcctgggagggcggggaaccccgggacgccaggggcaccaggactaaagggaagtcctggacttcctggaccacggggagatccaggggaacgagggccaaggggacctaaaggagaaccaggggccccaggacaggtgatagggggagaaggaccaggactaccagggagaaagggagatcctggaccttcagggccccctgggccaagaggacccctcggggacccagggccacgggggccccctggactccccggaactgccatgaaaggggataaaggggatagaggggagcgggggcccccagggccaggggaggggggaatcgccccaggggaacccggattacccgggctccccggatcacctgggccacagggacccgtcggacccccaggaaaaaaaggagagaaaggggattctgaagacggggcgcccgggctacccggacagcccggatctccaggggaacagggacccagagggcccccaggggcaatagggcctaaaggagatcgagggtttcccggacccctcggggaagccggagaaaaaggggagagggggccacctgggccagcaggatcgaggggattaccaggggtcgctggaagaccaggggccaaagggcccgaggggcctcctgggccaactggacgacaaggggaaaagggagagcctgggaggcctggagatcccgccgttgtaggacctgccgtggcaggacctaaaggagaaaagggagatgttgggcctgccgggccccgaggggccacaggggtacagggagaacgggggcctcccggactggtcctgcctggggatccaggaccaaaaggagatcccggggatcgggggccaatcgggcttactggaagagctgggccacccggagattctgggccccccggagaaaaaggggatccaggaaggccagggccccccggacccgtagggccaagagggagggatggagaagtaggggaaaagggagatgaggggcctcctggggatccaggattgcctgggaaagccggagaaagagggcttaggggagcaccaggggtccgcgggcctgtaggggaaaaaggagatcagggagatccaggagaagatggaaggaacggatctcctggaagttcaggacccaaaggggatcggggggaaccagggccacctgggcccccagggcggctcgtagacacagggccaggagcaagggaaaagggggaacccggagatagagggcaggaaggaccccggggaccaaaaggggatcccggattaccaggagcaccaggagaacgagggatagaggggttcaggggaccccctgggccacagggggatcccggggtcaggggacctgctggggaaaaaggggacaggggaccacccggactagacgggcgatccggactggatggaaaacccggggcggcagggccttccggacccaatggagcagccgggaaagccggggaccccggaagagatggacttcccggattacggggagaacagggactaccagggccttcagggcctcccggactccctggaaagccgggggaagatggaaaacctggacttaatggaaaaaatggggaacctggggatccaggggaagatggaaggaaaggagaaaagggagattctggggcctctgggcgggaagggcgagacggacctaaaggagaacgcggggcacctgggatactcggaccccaagggcctcctggactgcctggacctgtgggaccaccagggcaggggttcccaggagtccccggaggaacaggacccaagggggataggggagagactgggtcgaaaggagagcagggattaccaggagaacggggactaaggggagagcctgggtctgtgcccaatgtagatagacttctggagactgcggggatcaaagcttccgccctgagagaaatagttgaaacatgggatgaatcttcggggtctttcctgcccgtcccagaaaggcggcgaggacctaaaggggattcgggagaacaaggaccacctggaaaagaagggccaatcgggtttcccggagaacgtgggctgaaaggagataggggagatcccggacctcaggggccaccagggctggccctcggggagagagggccccctggaccatccggactcgccggggaacctgggaaacccgggattccagggctcccagggagagcagggggggttggggaagcgggaaggccaggagaacgcggagaaagaggggaaaaaggagaaagaggagaacaggggagggatgggcctccagggttgcctggaacacccggacctcctggaccaccaggacctaaagtgtccgtggatgaaccagggcctggattgagtggagagcaggggccaccaggactaaaaggagccaaaggagaaccaggatctaacggagatcaggggcctaaaggagaccggggggtgcctggaattaaaggggatcgcggggagcctggaccccgagggcaggatgggaaccccgggctacccggggaacgcgggatggcaggacctgaaggaaaaccagggctccaggggccccgggggccccccgggccagtgggggggcatggggatcctgggccacccggagctcctgggctcgcagggcccgccgggccacagggaccctcggggttaaagggggagccaggagagactggaccccccgggagggggcttactggaccaacaggggccgtggggttgcccgggccccccggaccatccgggctggtaggacctcagggatccccaggacttcccggacaggtcggggaaacagggaagcccggggccccaggacgggacggggctagtggaaaagatggggacaggggatcgccaggagtacctgggagtcccgggttgcctgggcccgtagggcccaaaggagagccaggacccactggagcaccggggcaggctgtcgtagggctcccaggagccaagggagagaaaggagctcccggaggacttgccggggatctagtgggagaaccaggagcaaaaggggatcgggggcttcccgggcccagaggagagaaaggggaggctggacgggcaggggaacctggagatccaggggaagatgggcagaaaggagcacctgggcccaaagggttcaaaggagatcctggggtcggagtgcctggatcacccggaccccctgggcctcccggagtgaaaggggatctcgggctgcccgggctccccggggctcctggggtagttgggttcccaggacagacagggccccgcggagaaatggggcagcccgggccctctggggaaaggggactcgctggaccccctggaagggaaggaattccagggcctttagggccccccggacccccaggatccgtcgggcctcccggggcctctgggcttaaaggggataaaggagatcctggggttgggcttcccggaccccggggagaaaggggagaacccgggatacgaggggaagatgggcggcctgggcaggaaggacccagagggcttacagggcctcctgggtctcgcggggaacgcggagaaaaaggagatgttgggtctgcagggctcaaaggagataaaggagactcagccgtgattctggggccccctgggccacggggggccaaaggagatatgggggaacgggggccgcgaggactggatggagataaggggccacggggggataatggagatcccggagataaaggatccaaaggagaacccggggataaagggtcagccggactacctggattgcgggggttgctgggaccccaggggcagccaggagccgctggaattcctggagatcccggatcacctgggaaggatggagtacccgggatcagaggagaaaaaggggatgttgggtttatggggccaagaggattaaagggagaacgcggagtcaagggggcctgtgggttggatggggagaaaggggacaaaggggaagcagggcctcctgggcggcccgggttagctggacacaaaggagaaatgggggaacccggagtccctggacagtccggggctccagggaaagaagggctgatcggaccaaaaggagatcgcggattcgatggacagccaggacctaaaggagatcagggagagaaaggagaaagaggaactcctggaattgggggattcccaggaccttcaggaaatgatggatctgcaggacctcctggaccccccgggagtgttggaccacgcgggccagaaggactgcaggggcagaagggggaaagggggccacccggggaacgagttgttggagcccctggagtgccaggagctccaggagaacgcggggagcaaggaagacccgggcccgcaggacctcggggggaaaagggagaggcagctctcacggaagatgatattaggggatttgtgcggcaggaaatgtctcagcattgcgcttgtcagggacagttcatcgcttccgggtcccggcccctcccttcctatgccgctgacacggcggggtcccagctgcacgccgtacccgtcttaagggtgtcccacgccgaagaggaagaacgggtacccccagaagatgatgaatattccgaatattctgagtattctgtggaagaatatcaggatcccgaagccccatgggattccgacgatccctgttccctccccctcgatgaagggtcctgcacagcttacactctaaggtggtatcatagagccgtcacaggatctacagaagcgtgtcatccttttgtgtacggggggtgtggaggaaatgccaacaggtttgggacacgggaggcctgtgagagacgttgcccccccagggtggtgcagtctcaggggacagggacagctcaggat

SEQ ID NO: 1492 - DNA, 8832 bp, Artificial Sequence
  derived and/or modified sequence
atgactctgcggctcctcgtggcagcgctctgtgctggcattctcgctgaggctccacgagtcagagctcagcatcgagagagagtgacttgcacacgattgtacgctgctgatatcgtgtttctgctcgatggaagtagctctatcgggagaagcaacttcagagaggtccgttccttcctggaggggctggtcttgccgttcagcggggccgctagtgctcagggggtgaggtttgctacagtgcaatacagcgatgaccctcggacggaatttggcctggatgccctgggcagtggcggtgacgtaatccgcgccatcagagaactatcttataagggtgggaacacgcggaccggagctgctattcttcacgtagcagaccacgtattcttgccacagctcgcacgtccaggcgtccccaaagtgtgtatcttgataacagatgggaagtcacaggatctggtggacacagctgctcagagactcaagggtcagggggtcaagctcttcgccgtgggaatcaagaacgctgatccggaggaactcaagcgcgtggcatcccagcctactagcgatttcttcttctttgtgaatgactttagtatactcagaactttactgccgctggttagccggagggtgtgcaccaccgccggaggcgtgcccgtcacccgtcctccagatgacagtacaagcgcccctagagacctcgtgttatcagaaccatccagccagagcctaagagttcagtggactgctgcctcaggaccagtgaccggctataaagtccagtacacacccctcactggtctaggacaaccattgccaagtgaacgacaggaagtcaacgtgcctgcaggcgaaacctccgtccgactaagggggcttagaccactgacagaatatcaggtcaccgtcatagcgctgtatgctaattcaatcggagaggcagtctcaggcaccgctcggaccactgctttggaaggaccggagctcacaatccagaatacaaccgcacattcactactggttgcttggcgttcggtccctggagcgacaggatatcgggtaacctggagagtgctgtcgggcggccctacccagcaacaagagttggggcccggacagggaagcgtgctcctgcgggacctcgaaccaggcacggactatgaggtgactgtttcgaccctctttgggagatctgtgggccccgccacctccctgatggccaggaccgacgcatccgtggagcagaccctgcgccccgtcatcctggggcccacttctattcttctctcttggaatcttgtgccagaggccagaggatacagacttgaatggagaagggaaacaggattggagccaccacaaaaagtggtattaccttcagatgtcacacgatatcagctggacggactgcaacctggtacagaatacaggctgactctctacaccttgttagaaggccatgaggtggcaacacctgccaccgtggtgccaacaggccctgagctcccagtctcacctgttacagatctgcaagccactgagctgcccggtcagagggtgcgagtgagctggtctcccgtgccaggcgcaacccagtatcggattattgtgcgcagtactcaaggagtagaacggacacttgtgctgccaggttcacagactgctttcgacctggacgacgtgcaggcaggtctgtcttacacggtccgggtgtcggcccgggtaggaccacgagaggggtcagccagtgtgctgaccgttcggcgcgagcccgaaacacctttggcggtccccggcctgagggttgtcgtgtcggatgccacccgtgtccgcgtagcctggggacccgtgccaggagcaagcggcttccgtatctcatggagtaccggtagtggtcccgagtcctcacagaccctgccacctgacagcaccgcaacagacatcaccggactacagccggggacaacctaccaggtggcggtgtcagttctgcgcggcagggaggaggggccagccgccgtgatcgttgccaggaccgatcctttgggccctgtcagaactgttcacgtcacacaggcatcttcctctagcgtcaccatcacctggacaagagtgccaggagccaccggttatagggtttcgtggcacagtgcccacggcccggagaaatcccagctcgtcagcggggaggccacagtcgcggaattggacggtttggagcccgacaccgagtatacagtgcatgtccgcgcacacgttgctggtgttgacggccccccggcgtctgttgtagtgagaacagcacccgagccggtgggccgcgtgtccaggctacagattctgaatgcaagttcggatgtgttacgcatcacctgggtgggcgtgacaggcgctaccgcctatcgtctcgcttggggacggtcggaaggcggccctatgcggcaccagattttgccagggaatacagattccgcggagatacggggcttagaggggggcgtatcctactctgttcgggtgaccgccctggttggcgatcgggaaggaactcccgtgtcaattgtggtgaccacccctcctgaggccccacccgctctggggaccctacacgtcgtccaacgcggtgaacactccctgaggctgcgttgggagcctgtgccccgggcccagggttttctactgcattggcagcccgagggagggcaggagcagagtcgcgtcctgggtccggagctgtccagctaccatcttgatggactggaaccggctacccagtatcgggtccgactgtcagtgctggggcccgctggggaaggaccttccgcagaggtcacagctcggactgaaagcccccgggttccttctatagaactgcgggtggtggatacgtcaatcgattcagtgactcttgcgtggacacctgtctctagagcctcatcctatatactatcttggagaccgctacgcggacccggccaggaagtacctggtagccctcagaccctgcctggaatttcgtccagccagcgggtaaccggtctcgagcctggagtaagctatatcttctcattaactccagttctcgacggggtgagaggccctgaggcgtccgtcacccagacaccagtctgcccgaggggcctggctgatgtggtgttcctgccccatgcgacccaagacaacgctcacagagctgaagcaacacggcgggtcctcgagcgcctcgtactcgccctagggccgcttggcccacaggctgttcaggtgggtctgctgtcttacagccatcggccctccccattgtttccactcaacggaagccacgacctgggtatcatcttacaaagaatccgcgatatgccatatatggatcccagcggaaacaacctagggaccgccgtcgtcacagcacacaggtacatgctcgccccggatgctcctggcaggcggcagcacgtccctggcgtgatggtcctgctggtcgacgaaccgctgaggggggacatattctcacccatcagggaagcgcaggccagcggcttaaatgtggtgatgctgggaatggctggtgctgaccccgaacagctccggcgcctggcgccaggtatggacagcgttcaaaccttcttcgctgtggacgacgggccaagcctggatcaggctgttagtgggcttgccactgccctgtgtcaggcctcgtttacaacgcagccaagaccagagccgtgcccagtctactgcccaaagggtcaaaaaggggaaccaggggaaatgggcctgcggggacaagtcgggccccctggggacccgggcctaccaggccgaacgggggccccaggcccccagggaccgcccggcagcgctaccgccaaaggcgaacgcggtttccccggggcagatggacggcctggcagccctggcagggcgggaaacccgggcacacctggggcacctggcctcaagggatccccgggcctacccggacctcggggagatcccggagagcgtggacctagaggccccaaaggggagcccggggcccccgggcaagttataggtggggagggccctgggttgcctggccgaaagggtgaccctggtcctagcggcccaccagggcctcgcgggccacttggcgatccagggccccgggggccaccgggacttcccgggacggcaatgaagggagataagggcgaccgtggggaacggggacccccaggcccgggtgaagggggaatcgcacctggcgaacctggactgccaggcctgcctggctctcccgggcctcaggggcctgtgggccccccaggaaaaaagggtgaaaagggagacagcgaagacggagcgcctgggcttccaggtcagccaggatcacctggtgaacagggtccgcgaggccccccaggcgctattgggcctaaaggtgacagagggttccctggacctctaggtgaggccggagagaagggagagcgcggccccccgggccctgctgggtctaggggactacctggcgtggccggccgacctggggccaaaggccctgaaggaccccctggtcctactgggcgccaaggagagaagggcgaacccggaaggccgggggaccccgcagtcgtaggtccggctgtcgccggtcccaagggtgaaaagggagacgtggggcctgctggtcctcggggagccaccggggtccagggcgaacgggggccgcctggacttgtactcccaggcgacccaggcccgaagggggaccccggtgatcggggtccaatcggcctcacaggccgcgctggaccccccggagatagtggacccccaggtgagaaaggggaccccggccggcccggaccccctggaccggttgggccaaggggtcgggacggggaagttggagagaaaggggacgagggcccacccggtgatccagggctccctgggaaggcgggggagcgcggacttcgtggtgccccaggagtcagaggacccgtcggcgagaagggggaccagggagaccctggagaggatggaaggaatggaagccccggatccagcgggcctaagggggaccgcggagagcccgggccgcctggacctcctggaagactcgttgacactggccctggagcacgggaaaaaggggagcctggtgaccggggacaggaaggtcctaggggcccaaagggcgatcctgggctgcccggagcacctggggaaaggggcatcgagggttttcgcggtcctccaggcccgcagggtgaccctggagttcgaggccccgcgggcgaaaagggcgaccgagggccaccggggctagatggtagaagcggcctcgacggcaaacccggcgcagcaggaccaagcggccctaacggggccgccggaaaggcaggagatccggggcgagatgggttgccaggcctcagaggagaacaggggctgcccggtccctcaggccctcctggcctgccaggaaagcccggcgaggatggaaagcccggactgaatgggaaaaacggagaaccaggggaccctggtgaagacggccggaagggggaaaaaggcgacagtggggccagtggaagagaggggcgggacgggccaaagggggagcgtggcgccccaggcatcctcggccctcagggacctcctggactgcctggcccggttggccccccgggacagggatttcctggggtccctggaggtacagggcctaaaggcgatagaggggagactggatcaaaaggagaacagggattgcccggggagcggggcctgagaggtgaacctggctcagtccccaatgtggacagattgctggagactgccggaattaaagcctcagctctccgtgagattgttgaaacctgggatgagagttctggttcatttctgccagtgcccgagcgccggcgaggacccaagggtgacagcggggaacagggcccgccagggaaggaaggacccattggctttccaggggagcggggcctgaaaggcgaccggggtgatccaggcccgcagggtccccccggactcgctctaggcgagcgcggaccacccggaccctcaggactagccggagagccaggaaagcctgggatccccggtcttccaggacgcgcaggcggcgtgggcgaggccggaagacccggggaacgcggggaacgtggtgagaagggcgaacgcggcgaacagggaagggatggcccgccagggctacctggtacacccgggccccctgggccgcctgggcctaaggtgtctgtcgatgaacctggtccagggctctccggggaacaaggaccccccggcctcaaaggagccaaaggtgaacccggaagcaacggggaccaaggcccaaaaggggatcggggagtgccgggcattaagggcgatcgcggggaaccagggccaagagggcaggacggtaacccaggattaccaggagagcgcggcatggccggcccagaaggcaagcctggactgcaggggcctcgtgggcctccaggacctgtgggtgggcacggagacccgggccccccaggagcacctggactcgctggccccgcagggccacagggccccagcggactgaagggcgagcccggagagactggaccgcccggccgcggcctaactggtccaaccggtgcggttgggttgcctggtccaccaggccctagcgggctcgtgggacctcagggctctccaggcttacccgggcaggtgggggaaacaggcaaacctggcgcccccgggcgtgacggggcaagcgggaaggatggcgatcgcggctcacccggagtgcccgggagcccagggttaccaggtcccgtcggacctaaaggggagccagggcccacgggggcaccgggtcaggccgtagtgggcctgccaggagcaaagggcgagaaaggcgcacccggggggcttgccggcgatctggtgggagaacccggggcaaagggagacaggggactgcccggtccccggggcgaaaagggagaagcaggccgtgcgggggagcccggggatcctggggaagacggccagaagggagctccaggacctaagggattcaagggtgacccaggcgttggagtgccagggagcccgggacctccagggccaccgggggtgaagggcgatttaggcctccccggcctccccggagctccaggcgttgtgggtttcccagggcagaccggccctcgcggtgagatgggacagcctgggccaagtggagaacggggcctggctggtcctcccggtagagaaggaatacccgggcccctcggcccacctggtcctcccggttccgttgggcctcctggtgcgtccggattgaagggggacaagggggacccaggcgtggggttaccagggccgcggggagaacgcggcgaacccggaatccgaggagaagatggccgcccagggcaggagggcccgagagggttaacgggacctcccggctcccgaggcgagcgcggcgaaaagggtgatgtaggatccgccggtctcaagggcgacaaaggagatagcgcggtcattctgggtcctccaggtccccgcggggccaaaggggatatgggagagcggggccctcggggattagatggcgataaaggcccacgaggcgacaatggagatcccggggacaaaggatccaagggcgagccgggggataaaggaagcgctggtctgcccgggctcaggggactgctcggaccacagggccagcccggagccgcgggcattcctggagatcctgggagccccggtaaggatggcgttcccggcatccggggggagaagggcgacgtgggattcatggggccgcgggggctgaagggcgagcgcggcgtcaaaggagcgtgcggcttggatggagaaaaaggagataagggtgaggccggacccccaggaaggcccggcctggccggtcacaaaggagagatgggcgaacctggagtgcctggtcagagtggggcccccggaaaggagggcctaattggacccaaaggagatcgagggtttgacgggcagcctggacccaaaggtgaccagggagaaaagggagagaggggaaccccaggtatcggagggttcccaggtccttcaggtaacgacgggagtgctggcccccctggcccgccgggtagtgtcggccctagggggcccgaaggactccaggggcagaaaggagagcgcggcccccctggtgagcgggttgtgggcgccccgggagtacccggcgcaccaggcgagcgtggtgaacagggcagacctggacctgctggaccccgcggagaaaagggtgaggcggccctcactgaggacgacattcgcgggtttgtcagacaggaaatgtcacaacattgcgcttgccaaggacagttcattgcttccggttcaagaccacttccttcatacgccgccgacaccgcgggctctcagctgcacgctgttcccgtgctacgcgtctcacacgctgaggaagaggaaagagtcccgccggaggatgacgaatacagtgagtactctgagtactctgtcgaggagtaccaggacccggaagccccttgggattctgatgacccctgtagtcttccccttgatgagggatcctgtacagcatatacccttagatggtaccatcgcgctgtcactggaagcactgaagcgtgccatccattcgtctacggagggtgtggcggcaatgcaaatcgctttggaacacgtgaagcctgtgagcgtcggtgccctccccgtgtggtgcagtcacaaggaacgggaacggcccaagac

SEQ ID NO: 1493 - DNA, 8832 bp, Artificial Sequence
  derived and/or modified sequence
atgacgttgcggttgctggtggcagccctgtgcgctggaatcttggctgaggcccctcgagtgcgggcgcaacacagggaacgggtcacatgcacccgcctgtacgcggcagacatagtctttctgctggacggttccagtagtatcgggcgctccaatttccgcgaggtaagatcattccttgagggcctcgtcctccccttttcaggggccgcttccgcgcagggtgtccgattcgcaacagtacagtacagcgatgacccacggactgaattcgggctcgatgcactggggagcgggggtgacgtaataagggccatcagggaactctcttacaagggcggaaatacccggacaggcgcggccatcctccacgtggcagatcatgtcttcctgcctcagttggcacgcccaggcgtgccgaaagtctgtatcctcattacggacggtaagtcacaagatctggttgacaccgccgcccaacgcctgaaggggcaaggggtgaagctctttgccgtcggtattaagaatgccgacccggaggaattgaagcgcgtcgccagccagcctacgtccgactttttcttctttgtaaatgactttagcattctgcggacactcctgcctctggtgtccaggagagtgtgcacaacagccggtggcgtaccagtaactaggcctccagacgactccacatctgcacctcgcgatctggtgttgtccgagccaagttcacaaagcctgcgggtgcagtggactgctgcttctgggcctgtgacgggttataaggtccagtatacgccgttgactggactgggccagcctctgcccagcgagaggcaggaggtgaacgtccctgctggcgaaacatccgtaaggcttaggggcctcaggccactgaccgaatatcaagtcaccgtaatagcactgtatgcaaattccatcggtgaagctgttagcggtaccgctaggaccacagctctcgagggtcccgagctgaccatccagaacacaacagcccactccctgctggtagcgtggcgctcagttccaggcgccaccggatatagagtgacctggagggtgctgtcaggaggaccaacgcagcagcaggagctgggtcccggtcaaggatccgtgctgctcagggatctggaaccagggacggattatgaggttaccgtgagtactctgttcggtcggtctgtggggccagccacgtccttgatggcccggacggacgcaagcgtcgagcagaccctgcggccagtgatactggggcccaccagcatcttgctctcttggaatctcgtgcctgaggctagaggttacaggttggagtggcgcagagagacaggcctggaaccacctcagaaggtcgtgctgccaagcgatgtgacccgatatcagctggatggcctccagcccgggacagagtataggttgactctgtacaccctcctcgagggacacgaagtcgcgacccccgcaacagtggtgcccaccggtcccgaactgcctgtgagtcctgtgaccgatcttcaggccacggaactgccgggccagagggtgagagtcagctggtctcccgtacccggggcaacccagtacagaattatcgtcagatcaactcagggggtcgagcgcaccctcgtacttccaggcagccagacggcattcgaccttgacgacgtgcaggccggactctcatacacggtcagggtgagcgctagggtcggtcctagagaagggagtgcttcagtattgaccgttaggcgggaacctgagacccccctggccgtacccggtctgagagtggtcgtgtctgacgccacgcgggtgagggtggcatggggccccgtccctggtgccagtggcttccggatatcctggtctacagggtccggtccagaatcctcccagacattgccgcctgattccactgcaaccgatatcacgggtttgcagccaggtacgacctaccaggtcgccgtgtccgtgctgcggggacgcgaagagggaccagctgctgtaatagtggctcggacggatcccctgggtcccgtacggacggtgcatgtgacacaagccagcagcagcagtgtcacaatcacatggactagggtcccaggagcaaccgggtatagggtcagctggcacagcgctcacggcccagaaaaatctcagctggtcagtggcgaggccaccgtcgccgagctcgatggactggagcccgacacggagtacactgtccatgtgagagcccatgtcgccggagtggatggaccccccgcgtctgttgttgtgcgcacagcacctgagccggtgggccgggtcagccgcctgcagatcttgaacgcttcaagcgatgtgttgaggatcacatgggttggagttacgggagcaactgcttataggctggcctggggaagaagcgagggagggcccatgcggcatcagattctgcccggtaacacagactctgcagaaattcgcggactggaggggggcgtctcatactcagtgcgagtgactgctcttgtcggggaccgcgagggaacacccgtgagtattgtagtcacgacgcccccagaggctccacccgcgctgggcaccctccacgtcgttcagaggggcgagcattctctccgacttcgatgggagcccgtacctagggctcagggcttcctgttgcattggcaacctgaggggggccaggagcagtcaagagtgctgggacccgagctgagctcatatcatcttgatgggttggagcctgccacccagtacagggtcagactcagcgtgctgggccctgccggcgaagggccctcagccgaggttacagcgcgaaccgagagcccaagagtgccatctatcgagctccgagttgtcgatactagcattgactctgttaccctcgcatggaccccggtgtctagggcttccagctatattctgagttggaggccgctcagggggcctggtcaggaagtcccagggtccccccagactctcccagggattagttccagtcaacgggtcactggtctcgaaccgggggtgtcttacatcttctccctgacccctgtgctggacggcgtgcgaggcccggaggccagcgtcacacagacccccgtctgcccccggggactcgccgacgtggtgtttctgccgcatgccacccaagataacgcgcatagagcagaagcaactaggcgagtcctcgagaggctggtgcttgccctcggcccattgggacctcaggccgtgcaagtcgggttgctttcctactcacacagaccgtcaccactgtttcctctgaatggaagtcatgaccttgggatcatcctgcagcgcatacgagatatgccttacatggacccaagcggaaataatcttggcactgccgtagtcacagcccaccggtatatgcttgcccccgatgcacctggaagacgccagcatgtaccgggggtgatggtgcttctggtggacgaaccactgaggggtgacatattctctcctatcagagaggcccaggcatctgggctgaacgtggtcatgctggggatggctggcgcagatcctgaacagctgagaaggcttgcacccggcatggattccgttcaaacatttttcgccgtggatgatggacctagcctggaccaggcggtgtctgggttggccaccgcactgtgccaggccagtttcaccactcagccgaggccagaaccatgtcctgtgtactgcccaaaaggacagaagggggagccgggggaaatggggctgcggggtcaggtgggtcctcccggagaccccgggctgcccgggcgcaccggagccccgggaccccaagggcctcccggctcagcaacagccaagggggagagagggtttccaggtgccgacgggcgccccgggtcccccggtagagccggtaacccaggcacccctggcgccccaggactgaagggaagtcccggcttgccaggtcctcgcggagaccccggtgaaaggggacctcggggtcctaaaggcgaaccaggcgcccccggccaggtgatcgggggcgagggcccagggctgcccgggagaaaaggcgatccaggaccgtccgggcctcccggacccagaggccctctgggggatccagggccacggggccctccaggtctccctggtacagctatgaagggagataagggggataggggggaaagaggacctcccggacctggtgagggggggattgcgcctggtgaacccgggctgcccggcctgccaggttctcctggcccccaggggcccgttggaccacctgggaaaaaaggtgaaaaaggagattctgaagacggcgccccaggcctccccggacagccaggtagtcccggtgagcagggccctcggggaccacccggtgcaatagggccgaaaggggaccggggctttcccgggcccctcggcgaggcaggagaaaagggagaaagaggcccgccagggccagccggtagccgggggttgcctggtgtggctggaagacctggcgccaaaggacccgaggggcctcccggcccaaccggaaggcagggtgagaaaggagagcccggccggccgggggatccggccgtggtgggcccagcagtggccggcccaaagggcgagaaaggcgatgtcggacctgccggaccgaggggggccacgggtgtacagggcgaaaggggacctccaggtctcgtgctgccaggcgacccaggaccgaaaggcgacccaggagacagggggccaataggactgactggcagagccggaccccccggagattctggtcctcctggggaaaagggggaccctggcagacctggcccacctggcccagtgggtccccgaggtagggacggcgaggttggcgagaagggcgacgaaggcccgccaggagatcctgggctgcctggaaaggcaggcgagcgcgggctcaggggcgctcccggggtacgcgggcctgttggcgaaaagggggatcaaggtgatcctggcgaagacggaagaaatggtagccccgggagctctgggccgaaaggggaccggggtgagcccggccctccaggtcctccaggtcgattggtagacactggccccggtgctcgagaaaaaggagaacctggcgatcgagggcaagagggacctaggggacccaagggagaccctgggcttccaggagctcccggggaaagggggatcgaaggcttccggggcccccctgggccccagggggacccaggagtgcgcggccctgctggtgagaagggcgaccgcggccctcctggcctggatggcaggtctggacttgacggaaagccgggcgccgccggcccctcaggcccgaacggtgccgctggcaaggccggagacccaggccgggatggactcccaggactgaggggtgagcagggcctgcctggcccctctggcccgccaggccttccggggaagcccggggaggacggcaagccgggcctgaacgggaaaaacggtgaacccggggacccaggtgaggatgggaggaagggcgaaaagggagatagcggagcctcaggtagagagggccgggacgggcccaaaggagagaggggagctccaggaatcctggggcctcagggccctccaggccttcccgggccggtagggccaccaggccaggggttccccggggttccggggggaaccggacctaagggcgacagaggcgaaactggttcaaaaggtgaacaaggtcttcccggcgagcggggattgagaggtgaaccgggatccgtgccgaatgtggacagactgctggagaccgccggcatcaaggcaagcgcgcttagagagatcgtggagacctgggacgagtccagcggtagctttctgcctgtgcctgagagaaggagaggtccaaagggggacagtggcgagcaggggccgccagggaaagaaggcccgattggattcccaggggagcgaggcctgaaaggcgaccggggtgacccaggccctcagggcccacccggacttgctcttggggagcgcggacctccagggccttccgggttggccggggaaccaggaaaaccagggatcccaggcctgcccggaagagcaggcggcgttggggaggctggcagacctggtgagcggggtgagaggggtgagaaaggagagcggggagagcaaggcagggatggccctcctgggctgcccggtacccccgggcctcctggtccgcctggacccaaagtgtcagtcgatgaacctggccctggtctgagtggagagcaggggcctccaggcctgaagggggcaaagggtgaacccggttctaacggagaccagggaccaaaaggcgatcgaggcgtccccggtattaaaggagaccggggagagcctggccctcgcggccaggacggaaaccccggtttgcccggagagaggggcatggccgggccagaggggaagccgggattgcaaggacctcggggtccccccgggcccgtcggtggacacggggatcctggccctcctggagccccagggcttgcaggtccggccggaccgcagggcccgtcaggactgaaaggagagccaggagagacaggaccaccaggccgaggtctcacagggcctaccggagctgtagggctccccggcccccctggccccagcggcctggtggggccccaggggtcccctggtctgccgggtcaggtaggagaaacagggaagcctggagcaccagggcgcgatggagcttcaggtaaggacggcgatagggggagccccggagtgcccgggtcccccgggctcccaggacctgtagggcccaaaggagagccgggccccacaggagcccccggtcaagccgtggtaggccttccaggagctaagggcgagaagggtgccccaggggggcttgcaggagacctggttggcgagccaggagccaaaggcgatagaggactgcctgggcccaggggcgaaaaaggtgaggccggacgcgcaggcgagcccggtgatccaggcgaggacgggcagaagggggctcctggaccaaagggttttaagggcgatcccggtgtcggtgtccctgggtccccaggaccaccaggcccacctggcgtgaaaggggacttgggcttgcctggtctgcccggcgctcccggcgttgtcggatttcctggtcaaacgggcccacggggcgaaatgggccagcctgggccgagtggggaacgcggcctcgccgggccacccggaagagagggaatccccggaccactgggtccacctggaccacccggctccgtgggaccacccggggcaagcggcctgaagggtgacaagggagacccaggagtgggcctcccagggccacggggcgaacgcggggagcctggaatcaggggagaggacggtcggccgggacaggagggccctagaggcctcacgggccctcccggatcacggggcgaaagaggggaaaaaggggacgtggggagcgctggcttgaagggagacaagggagactcagccgtcattctgggtcctccaggccctagaggtgctaagggcgacatgggtgagcgggggccaaggggactggatggtgataaggggccgaggggcgacaacggtgatccaggcgacaagggaagtaagggcgaacctggagataaagggagtgccggccttccgggtctgcggggtcttctgggtccccagggacagccaggcgccgccggaattcccggagaccctggatcccccgggaaggatggagttcctggcatccggggagaaaagggcgacgtgggattcatgggacccagaggcctcaaaggagagcgcggagtaaagggtgcctgcgggctcgatggcgagaaaggggataaaggagaagcagggcctccaggccgaccggggcttgcaggacacaagggagagatgggagagcccggcgtgcccgggcagtccggggcacccggaaaggaaggccttatcggtccgaagggagaccgagggttcgacgggcagccaggtcccaaaggagaccagggcgaaaaaggtgaaagagggacccctggcattgggggtttcccaggtccaagtggaaacgacgggtctgccgggcccccaggaccccccggctctgtggggcctagagggcccgaaggcctgcaaggacagaagggcgaacgggggcctcccggagaacgggttgtgggcgctccaggtgttccaggtgcaccaggggaacggggcgagcaaggaaggccggggcctgctggaccgaggggagaaaagggtgaggctgcgctgacagaagatgacatacgaggatttgttcgccaggaaatgtcacagcattgtgcctgccagggacagtttattgcctcagggtctagacccctgccaagctacgcggctgacacagctggcagtcagctgcatgccgtgcctgttctccgcgtgtctcacgctgaagaggaggaacgagtccccccggaagacgatgaatactctgagtacagcgagtatagcgtcgaagagtaccaagaccccgaagcaccctgggactccgacgatccctgtagcctgcctctggacgaagggagttgtacagcttatacactgcggtggtatcaccgcgcagtgaccggtagtaccgaagcgtgtcaccctttcgtgtatggcggctgcggggggaacgcaaacaggtttgggacccgggaggcctgcgaacgaagatgcccgcctcgcgtggtccagtcacaaggcacggggactgcacaagac

SEQ ID NO: 1494 - DNA, 8832 bp, Artificial Sequence
  derived and/or modified sequence
atgaccctccggctccttgtggctgctctgtgcgctggaattttggcggaagcgccacgcgtccgcgcccagcaccgcgagcgcgtgacttgcacccggctgtacgccgctgacattgttttcctgctggacgggagcagctcaatcggacgttccaattttcgagaagttagatcattcctcgagggactggtcttgcctttcagcggagccgcgtctgcacagggagtccgcttcgcaaccgtgcaatactcggatgacccacggactgagttcggcctcgatgccctgggatcgggcggagacgtgatccgggctatccgcgaactcagctacaagggaggaaacacccggactggagcggctatcctgcatgtggcggaccatgtgttcctcccgcagctggcgcggcccggagtcccgaaggtctgcatcctgatcaccgacggcaaatcccaggacctggtggatactgctgcacagcgtctgaagggtcaaggtgtcaagttgtttgctgtgggcatcaagaacgctgacccggaagaactcaagcgggtggcctcacagcctacttcagatttctttttcttcgtgaatgatttctccattttgcgcacgctgctgccactcgtctcgaggcgcgtgtgtactaccgcaggaggggttccagtgaccagaccgccagacgatagcacttccgcccctcgggatctcgtgctgtctgagccgtcatcccaatcgctccgcgtgcaatggaccgcagcgtcgggacctgtcaccggctacaaagtccagtacaccccactcactggactcggacaacctctcccatccgaaaggcaggaagtgaacgtcccagccggagaaacctcggtgaggctgcgggggctcagaccccttaccgagtatcaagtgaccgtgatcgccctctacgctaactcaatcggagaggccgtgtcaggaacggctcgcaccaccgcactggagggcccagaattgactattcaaaataccacggctcatagcctcctggtcgcctggcggtccgtcccaggagctactggctaccgagtgacctggcgggtgctgtccggaggcccgacgcagcagcaggaactgggtccgggtcagggctccgtcctgctgcgggacctcgaacctggaactgactacgaagtgactgtgtcaactctgtttggacgctcggtgggaccggcaacgtcactgatggccaggactgacgcgagcgtggagcagactctcagaccagtgatcctgggtccaacgtcaatcctcttgtcgtggaatctggttccggaagctaggggatacagactggagtggaggcgcgagactggcctggaaccgcctcagaaggtggtgctgccgtctgacgtcactcggtaccagctggatggactccagccaggaaccgaataccgtctgacgctgtatactctcctcgaaggccacgaagtcgctaccccggcaaccgtggtgccgaccggcccggaactgcctgtgtccccagtcactgatctgcaagccaccgagctgccgggtcagcgggtcagagtgtcgtggtcgccagtgcctggagccacccagtacagaatcatcgtgcgatccactcagggcgtggagcggaccctggtgctccctggcagccagacggcgtttgacctcgacgatgtgcaagcaggcttgtcgtacacggtgcgcgtctccgccagggtcgggccacgggaaggatcggccagcgtgctgaccgtgagacgggaaccggaaaccccactggccgtgccgggtctgcgggtggtcgtgtcggacgccactcgtgtgcgcgtggcctggggtccggtgccaggcgcgtcgggattccggatatcgtggtcaacgggctcgggacctgagtcaagccagaccctccccccggactccactgcaaccgacatcaccggtctgcaacccggaaccacctaccaggtcgccgtgtccgtccttcgcggtcgggaggaaggcccggctgccgtcatcgttgcccgcaccgatccgctgggcccggtgagaacggtccatgtgactcaggcctccagctcctctgtgaccattacgtggacccgggtgcccggcgccactggataccgcgtctcatggcactcggcgcacggacccgaaaaatcccaactggtgagcggggaagccaccgtggcggaactggacggactggagccggatactgaatacactgtgcacgtgcgcgcacacgtcgcaggggtggatggaccaccggcgtccgttgtggtgaggaccgccccggagcctgttggaagagtgtccagactgcaaatcctcaacgcctcctccgacgtgctcaggatcacctgggtcggggtcaccggggctactgcgtatcggttggcatggggcagatctgaaggagggccaatgaggcaccaaatcctgcctggtaataccgacagcgcagagatcagaggacttgaaggaggagtgagctactccgtgcgcgtgaccgctctggtgggcgatcgggagggtactcctgtgtcaattgtcgtcaccaccccgccggaggctccgcccgcgctcggcactctccatgtggtccagcgaggagagcatagcctccggctgaggtgggaaccggtcccccgggcccaagggttccttctgcattggcaaccggagggaggacaggaacaatcacgcgtgctcgggcccgaactgagcagctaccacctggacggactggagcctgcgactcagtaccgcgttagactgtcggttctcggccccgccggagagggaccgtcggccgaggtgactgcgcggacggaatcccctcgcgtgccgtcgatcgaactccgggtcgtggacacctccatcgattcggtgactctggcatggactccagtgtcccgggcatcatcgtacatcctcagctggcgcccgctgcgcgggccgggtcaagaagtgccaggtagcccgcagaccttgcctggaatctcatcgagccagcgagtcactgggcttgaaccaggtgtgtcctacatcttttcactgactcccgtccttgacggagtgcggggaccagaggcgagcgtcactcagactccggtgtgtcctcggggcctggcagacgtcgtgttcctcccacacgccacccaagataacgcacatagggccgaggcgaccagaagggtcctggaacgattggtgctggccctgggaccgctgggcccgcaagcggtgcaggtgggactgctctcgtacagccatcggccatcaccgctgttcccgctgaacggatctcacgatctgggaatcatcctccagagaatccgagacatgccttacatggacccttctggcaacaacttgggaactgcggtcgtcaccgcccaccgctacatgttggccccggacgccccgggacgccgccaacacgtgccgggggtcatggtgctcctggtcgacgaacctcttagaggagacatcttcagcccaatcagagaagcccaggcctccggactcaacgtggtgatgctcggcatggcgggagccgacccggaacagttgcgccggctcgcccccggaatggattccgtccagaccttcttcgccgtggacgacggtcctagcctggaccaggcagtgtccggacttgcgactgcactgtgtcaggcgtcattcactactcaaccgcggccagagccctgccccgtgtactgccctaaaggacagaagggagaacctggtgagatgggacttcggggccaagttggcccgccgggcgaccccggactgcctgggcggaccggggcgcccggccctcaaggacctccggggtctgcgaccgctaaaggagagcgcggatttcccggcgccgatggtcgcccgggatcgcctggacgggccggaaacccggggactccaggagcgccagggttgaagggatccccgggcctcccgggaccacgcggtgaccccggagaacgaggcccaagaggcccgaagggcgaaccgggagcccctggtcaggttataggaggagaaggacctggactgccgggtagaaagggggatccagggccgagcggtccaccaggccctcgcggcccattgggcgacccgggaccgaggggtccgccgggcttgccgggaactgccatgaaaggggacaagggtgacaggggcgaacggggacctccggggcccggcgaagggggaattgcgccgggagagcccggcttgccgggccttccgggatcgcctggtccccaaggaccggtgggcccgccaggcaagaagggtgaaaagggagacagcgaggacggcgcaccaggtctgccgggacagcccgggtcgccgggtgagcaggggccaagaggaccgcccggtgccatcggacctaagggagatcgcggattcccgggaccgctgggggaggcgggagagaagggagagcgcggaccaccaggaccggcgggatcacgcggactcccgggagtggccggacggcctggggctaagggccccgagggaccccccgggccaactgggcggcagggtgagaagggcgagccggggcgaccgggcgacccggccgtggtgggaccagccgtggccggaccgaagggggaaaagggcgatgtcggaccagccggaccaagaggagcaactggcgtccagggcgagcggggtccgccgggcctggtcctgccgggcgatccgggcccaaaaggcgatcctggcgacagaggcccgatcggcctcacgggaagggcaggaccgccgggggactccgggccgcctggcgagaaaggggatccaggacgccccggccctcctggcccggtgggacctcgcggtcgagacggggaggtgggagaaaaaggcgatgagggaccaccgggtgaccccggactccccggaaaagcaggagaacggggcctccgcggcgcaccgggtgtgagaggtccagtgggtgagaaaggtgaccagggcgatccgggcgaagatggacggaatggcagcccaggttcctcgggaccaaagggagacaggggggagccaggaccaccaggaccaccgggtagactcgtggacacgggacctggcgcacgcgaaaagggagaaccgggggaccgcgggcaggaaggccccagaggacctaagggcgatccagggctgccgggagccccgggagagcgcggcattgaaggcttcaggggccctcccggaccacagggtgaccccggggtgaggggccccgcgggcgaaaagggggaccgcggcccaccgggactggatggacgctcgggacttgacggtaagccgggcgccgccggaccatctggaccgaacggagcggcaggaaaggctggggaccccggccgcgacggacttccggggttgcggggtgaacaaggactcccgggcccttccggacctcctggactcccggggaagccaggggaggacggaaaaccaggtctgaacgggaagaacggagaaccgggagatcccggggaggatggaaggaagggagagaaaggagatagcggtgcctcaggccgggagggccgcgacggtccgaagggagagagaggagctccggggattctgggaccgcaaggcccgccggggcttccgggacctgtcggaccgccaggacaggggttcccgggggtgccagggggcactggacctaaaggagatcggggggagactgggtccaaaggagagcaggggttgccaggcgaacggggactgagaggtgagcccggctcagtgccgaacgtcgaccgacttctggaaaccgctggcattaaggcctcggccctccgggagattgtggaaacctgggacgagagctccggctcgtttctgcccgtcccggaaaggaggaggggaccgaagggcgactcgggagaacaaggacctccggggaaggaaggcccgatcggtttccccggagagagaggcctcaagggcgaccgcggagatcccggaccccagggacccccgggacttgctctgggcgagcgcggccctccgggtccatcgggactggccggagagccaggcaagccgggcatcccgggacttcccggcagggccggaggagtcggtgaggcgggacgtccaggagaaaggggagagcgcggagagaagggcgaaaggggcgaacagggacgggacgggccgccgggtctgccgggcaccccgggacctcccggcccgccaggaccaaaagtgtctgtggacgaaccaggaccgggactgtcgggagagcaggggccaccaggactgaaaggagctaagggcgagccgggatcaaacggcgatcagggaccaaagggagatcgcggggtgccgggcatcaagggagacagaggagagcctggtccgcgaggacaagacggaaatcccggacttccgggagagcggggcatggccggtccagaaggcaaaccagggttgcagggcccacgtggaccgcctggtccagtgggaggccacggcgaccccggcccaccgggagctccaggactggccgggccggctggcccacaaggcccatcgggcctcaagggggaacccggagagactggaccaccgggacgcggactgaccggaccaaccggagcggtgggcctgccggggccccctggcccctccggccttgttggaccccaaggatcccccggtttgccgggacaggtcggggaaactgggaaaccgggggccccgggcagggacggagcatccggtaaggatggcgatcgcggatcgcctggagtgccgggatcgcctggactccctgggcctgttggcccgaagggagaacccgggccgaccggggcgccgggacaagcggtcgtcggactgccgggagcgaagggcgaaaagggtgcaccagggggattggctggtgacctggtgggtgaaccgggagcgaagggtgacagagggctgccggggccgcgcggtgagaagggcgaggcaggcagagcaggagaaccgggtgacccaggagaagatggacaaaagggggcaccggggcctaagggcttcaaaggtgatcccggcgtgggagtgccgggctcccccggtccgccggggccgccgggagtgaagggtgatctgggactccctggtctgccaggggcgcctggagtggtcggctttccgggacaaactggtccgcgaggagagatgggccagccgggaccctcgggcgagagagggcttgccggaccgccaggccgggagggtatcccgggaccgctcggaccgccaggaccgcccggaagcgtcgggccaccaggggcctctggattgaagggtgacaaaggggacccaggcgtgggccttcctggacctcggggagagagaggcgaaccgggtatccgcggagaagatggtcgcccaggtcaggaaggaccgaggggactgacgggccctcctggatcccggggcgagagaggcgaaaagggggatgttggctcagcagggttgaagggtgataagggagacagcgccgtcatactcggccctcccggtccacggggagccaagggcgacatgggagaacgggggccgagaggactggatggagacaagggaccccgcggagataatggtgaccccggggacaaagggtcgaaaggcgaaccgggagacaagggcagcgctgggctgcctggattgagaggactgttgggcccacaaggtcagccgggcgcggctgggatcccaggagatccaggaagcccaggtaaggatggagtcccgggaatccggggagagaaaggagacgtgggattcatggggcctcggggtctgaagggcgagcgtggcgtgaagggagcctgcggcctggatggggaaaaaggagataaaggtgaagcaggcccgccaggacggcctgggttggctggacacaagggcgagatgggagaacctggcgttcctggccagtcgggggccccaggcaaggaaggactgatcgggccgaagggagatagaggttttgacggacagccaggaccaaagggagatcagggcgagaaaggcgagcgcggcacccctggtattgggggattcccgggaccctcgggcaatgatggttcggccggaccgccgggtcctcctggctcagtcggaccgcgcggcccggagggactgcagggacagaagggagaaaggggtccacccggagagcgcgtggtgggtgcgcctggagtgcctggagcccccggcgagcgaggagaacaaggacggcctggaccggctggaccgaggggagaaaaaggagaagcggccctgaccgaagatgacatccgcgggtttgtgagacaggaaatgagccagcactgcgcatgccagggacaattcatagccagcggatcccgccctctgccgtcgtacgcggcggacaccgccggatctcaattgcatgcagttcccgttctgagagtctcgcacgccgaagaagaagaaagggtcccgccggaggacgatgagtactcagagtattcagaatactcagttgaagaataccaggaccccgaagcgccttgggactccgatgacccgtgttcgctgccactcgatgaaggctcttgtaccgcatacactctgcggtggtaccacagagcagtcaccggaagcactgaagcatgccatcccttcgtctacggcggatgcggaggaaatgccaacaggttcggaacgagggaggcatgcgagcgccgttgccctccaagagttgtgcagagccaaggaaccggcacggcgcaggac

SEQ ID NO: 1495 - DNA, 8832 bp, Artificial Sequence
  derived and/or modified sequence
atgactctgcggctgctcgtggcagccctttgtgcagggattcttgcagaagcaccccgagttcgagcacaacatagagagcgggtgacctgtactcgactgtacgcggcagatatcgtctttctgttggatggctcctcatccatcggtagatccaactttcgtgaagtcagatcatttctggagggattggtgcttccatttagcggagcggcgtcagcacaaggggtgagatttgcaacggtgcaatacagcgatgaccctcgtaccgagtttggacttgatgcactgggttccggaggggacgtcatcagagcaataagagagttgagctacaaggggggcaatacccgcactggagcggcaattcttcacgtggcagaccatgtgtttctgcctcaacttgctcgcccaggtgtgcctaaggtgtgtattctgatcactgacggaaaaagccaggacctggtggataccgcagcacaaaggcttaaggggcagggagtcaaactcttcgctgtcggaatcaaaaacgcagatcccgaagaacttaagcgggtggcatcgcaacctacttctgatttctttttctttgtgaacgacttttcaattctgcgcacccttctcccacttgtgtcgcggagagtgtgcaccacggccggaggtgtgccagtgactaggcccccggatgattcaacctccgctccgcgtgatcttgtgctctcggaaccctcttcgcagtccctgcgggtccagtggactgcagcatcaggcccagtcactggttacaaggtccaatacactcctcttactggactgggccaaccactcccttccgagagacaagaggtgaacgtgcctgcgggagaaaccagcgtgcggctgcggggacttaggccactgaccgaataccaggtgaccgtgatcgcactttacgccaactcgatcggcgaagctgtgtcggggaccgcacgcaccactgcacttgaagggcctgagcttaccatccaaaacaccacggcacattccctcctggtggcctggcgctccgttcctggagcaaccggttacagagtgacttggcgcgtgctgagcgggggaccaacgcaacagcaagaactcggaccagggcaaggatcggtgcttctgcgagacttggagcctggaactgattacgaagtgaccgtctcaaccctgttcggtcgtagcgttggtcccgcgacctccctgatggctagaaccgatgccagtgtggaacagaccttgaggccggtcatccttggaccgacttctatccttctttcttggaacctggtcccagaagcacgtggataccgattggaatggcgccgcgaaaccggacttgaaccaccacagaaggtggtcctgccctcagacgtgacgagataccagctggacgggctccagcctggaaccgaataccgtctgactctgtacactcttttggaaggccacgaagtggcaaccccagcaacggtggtcccaactggtccagaactgcctgtgtccccagtcaccgacctgcaagcaactgaacttccaggtcaacgtgtcagagtgtcgtggagccccgtcccgggtgcaactcagtacaggattatagtgcgttccactcaaggcgtggagagaaccttggtgttgcccggatcacaaaccgcattcgacctcgatgatgtacaggcagggctttcgtacaccgtgcgtgtgtcggcgagagtcggaccacgtgaagggtccgcgtccgtgctgactgtgcgcagagaacctgaaacgccccttgccgtgcctggtcttagagttgtcgtgtcggatgccacccgagtgagagtcgcatggggccctgtgccaggagcgtccggattccgtataagctggtcgactgggtctgggcccgagtcctcccagactctgcctccagattcgaccgcgaccgacataaccgggctgcagccgggaaccacttaccaggtcgcagtgagcgtgctgcggggaagggaagaaggcccagctgcggtgatcgtggccaggaccgatcctctgggacccgtgcgcaccgtgcatgtgacccaggcctcaagctcctcagttacgattacttggaccagagtccctggcgccacgggatacagggtgtcgtggcatagcgcacacgggcctgaaaagtcgcagctcgttagcggcgaagcaaccgtggccgagcttgatggcctggaacctgatactgaatatacggtccatgtgagagcacatgtcgcaggagtggatggacctccagcttctgtcgttgtaagaaccgctccagagccggtgggtagggtcagcaggctgcagattcttaacgctagctccgacgtcctccggattacctgggtcggggtgactggtgcaaccgcctacagactcgcatggggtcgctcagaaggagggcctatgcgtcatcaaattctccctggtaacactgattcagcagagattcgcggacttgaaggtggggtttcgtactcggtgcgggtgaccgcactggtcggcgatcgcgagggtactcctgtgagcattgtcgtcaccaccccaccagaagcgcctcctgcacttgggactcttcacgtggtgcagcgaggggaacactcactcagacttcgatgggagccagtccccagagcacaggggttcttgcttcattggcagccagagggtggacaagaacagtcgcgagtgcttggccccgaattgtctagctaccacctcgatggactcgagccagccactcaataccgtgtgagactgtcggtcctggggccagcaggagagggaccgtccgcggaagtgaccgcaaggaccgagtcccctcgggtgccatctattgaactgcgggtggtggacacttccattgattcggtgactctggcatggactccggtgtccagggccagcagctacattctttcgtggcggcccctgcggggacctggacaagaggtgccgggtagccctcaaactcttccgggaatctcgtcgtcccaaagagtcaccggcctggagccaggagtgtcatacatctttagccttactcctgttcttgacggcgtccgagggcccgaggcgtccgtcactcagacccccgtctgtcctcggggtcttgcagatgtggtgtttctgccacatgccacccaggataatgcccaccgcgccgaagccactcgcagggtcctggagcggctggtgcttgcactgggtccactcgggccacaggccgtgcaagtgggactgctgtcatattcgcatcgcccttcccctctcttcccacttaacggttcacacgatttggggatcatccttcagcgaattagggatatgccatacatggatccgtcaggtaacaatctgggtacggcagtggtgacggcccataggtacatgctcgcacctgatgccccagggagacgacagcacgtgcccggtgtgatggtcctgctcgtggacgaaccgctccggggagatatctttagtccaattagggaagcccaagcatccggtcttaacgtggtaatgcttggcatggcaggtgcagatcctgagcaactgcggcggctcgcacccggtatggattcggtgcagaccttcttcgcggtcgacgacggtccatcgctcgatcaagcagtgtccgggctcgcgaccgcactttgccaagcatcgtttaccacccaaccaaggcctgaaccttgtccggtttactgccctaagggacaaaagggtgaaccgggagaaatggggcttcggggtcaagtgggcccgccaggtgatcccgggctgccaggtcggaccggtgcaccaggtccccagggaccccccgggtcagcgacggcaaaaggagagagggggtttcctggcgccgacggtaggccaggtagcccggggcgtgcaggtaacccaggaactcccggagcccctggccttaaggggtcgccaggccttccaggtcctcgcggtgatcctggggagcgcggtccgcgcggtcctaagggggagccaggagcaccaggacaggtgattggcggtgaaggccccggacttcccggtcgaaagggcgatccaggccccagcggccctccagggcctagaggtccgctgggtgacccaggccctcgcggccccccgggacttcccggcaccgccatgaagggagataaaggagatcgtggggaacgtggaccaccaggaccgggagagggaggtattgcaccaggggaacctggactgccaggactccctggatcgccagggccccaagggccagtgggtccccctgggaagaagggggaaaagggtgactcagaggatggtgcaccgggactgcctggacaacctggttcgcccggagaacaaggaccgagagggccgcctggcgcgattggccctaagggtgaccgagggtttccaggacctctgggtgaagctggcgagaagggcgaacgaggtcctcctgggcctgcgggcagccgcggtctgcccggtgtcgctggacgccccggtgctaaaggaccagaaggccctccagggccgactgggcggcagggagaaaagggagaacctgggcggccaggggatcctgcagtggtgggaccagcagtcgctggtccaaaaggcgagaaaggcgatgtgggtcctgcaggtcctcggggagcaactggcgtccagggtgaacgcggtcccccgggacttgtgctcccaggtgaccctggacctaagggagatcccggagacagaggccctataggactcactggcagggccggccccccaggagatagtgggccacctggagaaaaaggcgaccctggacggccagggccgccgggccctgtcggacctcgcggacgggatggagaagtcggcgaaaaaggagatgaaggacctcctggcgatccgggcctgccaggtaaggcaggggaacgtgggcttcgcggagcccctggtgtcaggggtcctgtaggcgagaagggggatcaaggggacccgggcgaggacggacggaatggatccccaggttcgtcaggtcccaagggggacaggggggagccgggtccgcctggtccgccaggaagattggtggataccggacctggggcgcgtgagaagggcgagccaggcgacagaggtcaggagggacctcgcggacctaaaggcgacccaggactgcctggagcacccggagaaagaggcatagaaggtttccgaggaccaccgggccctcagggtgatccaggggttcgcggacctgcaggagaaaaaggcgatagaggccctccggggctggacggtcgctccggtctggatggaaagccgggagcagccggcccctccggacccaatggagccgccggcaaggccggagatcctggccgagatggcctcccaggactgcgcggagaacaaggactcccaggaccttccggaccacctgggctccctggcaagcctggagaggacggaaaacctggactgaatgggaagaatggtgagccaggggatccaggagaagatggaagaaagggcgaaaaaggggactctggagcatccggaagggaaggccgcgatggccccaaaggtgaacggggtgcaccaggaattcttggacctcagggtccccccggactgccgggtcctgtaggccctccaggtcagggatttccgggtgtccctggagggaccgggccaaagggcgataggggagaaactggttcaaagggagagcaaggactccctggtgaacgaggattgcgtggcgagccgggatccgtgccaaacgtcgatagactcctggaaacggccggaattaaggcatcggcgcttagggagatcgtggaaacgtgggatgagtcgtccggcagcttcctgccagtgcctgaacgccgacgtggtccaaagggtgactctggggaacaaggtcctcctggaaaagaaggtccaatcggttttcctggagaacggggactgaagggtgatcgcggagatcccggtccccagggacctccaggactggcgctcggagagagaggaccaccaggaccctcgggactggctggggagcccggaaaacctggaattcccggccttccgggacgcgccggaggcgtgggggaagcaggacgaccgggtgaacgcggcgaacggggagaaaagggtgaaaggggggagcaaggaagggatggaccgcctggccttccaggaactccgggccctcctggtcctcctgggcccaaggtgtcagtggatgaacctggccctggtctgagcggagagcagggaccgcccggactgaagggggccaagggtgaaccagggtccaacggcgatcaaggaccgaaaggggatagaggtgtgcccggtattaagggcgatagaggtgagccaggtcccagaggacaagacgggaaccccggtttgcctggagaacgaggaatggcagggcctgagggaaagccaggtttgcaaggtccaagaggtccgcctggtccagtgggcggtcatggcgacccaggtccacctggagcccctggactcgcagggccagccggccctcaagggccctcgggcctgaagggagagccaggcgaaaccggacctccggggagaggtctgactggtcctaccggagccgtcggacttcctgggccccctgggccatcgggattggtcggcccgcaagggagtccagggttgccgggacaagttggggaaaccggcaaaccaggcgcacccggcagagacggtgcctcggggaaggacggagatcgcggtagtccgggcgtgcccggtagtcctgggcttcccggcccagtcggaccaaaaggcgaacccgggcctactggtgcccctgggcaagcagtcgttggacttcccggagccaagggagagaagggagcgcccggcgggctcgctggtgatctggtgggagaacccggcgcgaaaggcgatagaggactgcccggtccacggggtgaaaaaggtgaggcaggacgggcgggagaaccaggtgacccaggtgaagatggacagaagggcgctcctggtcccaaaggctttaagggtgatcccggtgtgggagtcccaggatccccaggcccccctgggcccccaggtgtgaaaggtgatctcggcctccccggacttcctggcgcgcccggtgtggttggatttcctggacagactggaccgcggggcgagatgggacagcccgggccttcaggggagcggggtctggccggtcctccgggacgagagggtattcctggaccccttggtccacctggaccccctggatccgtaggacccccaggggcttcgggtctgaaaggggataagggtgatccgggagttggactcccggggcctaggggcgagcgcggtgagcctggaatcagaggtgaagatgggaggccaggtcaagaaggtccgagaggcttgactggcccgcctggttcacggggcgaacgtggtgagaagggcgacgtcggcagcgctggcttgaagggtgataagggcgactcagcagtgattcttggcccgcctggccctagaggagccaagggagatatgggagagagaggtccacgcggcctcgatggtgacaagggaccaagaggagacaatggggaccctggagacaaaggcagcaagggcgaacccggagataaagggtccgcaggcttgccaggcctgagaggactcctgggccctcagggacagcccggtgcagcaggaataccaggcgatcctggcagccccggtaaagatggggtgcccggaatcagaggggaaaaaggtgatgtgggattcatgggaccacgcggacttaaaggggaaagaggtgtgaagggagcatgtggcctcgacggggagaagggagacaagggcgaggcaggacctccgggtcgccctggactcgcgggtcacaagggtgaaatgggggaaccaggagtccctggacagtccggagccccagggaaggaagggctcattggtcctaagggtgaccggggatttgacggacaacctggacctaagggtgaccagggtgagaagggtgagcggggtactcctgggataggtggatttcctgggccaagcgggaacgacgggtcagcggggccaccaggaccaccggggtcggtgggacccagaggccctgaaggtttgcaaggacaaaagggggaacggggacctcctggcgagcgggtcgtgggggcccccggtgtgcccggtgcgcctggcgaaaggggtgaacaaggacgtcctggaccggccggcccgagaggcgaaaagggggaagccgcactcaccgaagatgacatcagaggatttgtcaggcaagagatgtcccaacattgtgcatgtcaagggcagttcatcgctagcggtagccgccctcttccgtcatatgcagcagacaccgcagggagccagcttcatgcggtgcctgtccttagagtctcgcacgcagaagaagaggaacgtgtgccaccagaggacgacgagtactcggaatactcagagtacagcgtggaagaataccaagatcctgaggctccttgggattcagatgacccctgctcccttcccctggatgaaggatcgtgcactgcatatactctcagatggtaccatagagctgtgaccggatcaactgaagcatgccatccgtttgtgtacggcggatgtggcggaaatgcaaatcgattcggaacgagggaggcttgtgaaaggcgctgtccaccgagagttgtgcaatcgcaaggaaccggtacggcacaggac

SEQ ID NO: 1496 - DNA, 8832 bp, Artificial Sequence
  derived and/or modified sequence
atgacactgcgtttgttggtcgccgcactctgtgccggcatcctagcggaggccccacgtgtgcgggcccagcatcgggagcgcgtaacatgtacacggctttacgctgccgacattgtgttccttttggatgggtcgagttctatcggtcggagtaacttccgtgaagtgagatcttttctggaggggctggtgctgcctttttcaggagccgcctctgctcagggagttagatttgccaccgtgcagtactcggatgaccccaggaccgaatttggattggatgctctgggtagcggaggcgacgtgataagggctatacgcgagctgtcctataagggcggcaacactcgtacaggcgcagcgatacttcatgtggcagaccacgtgtttctgccgcaactcgcccgtcccggagtgcccaaagtatgcatcctgataaccgacgggaagtctcaggatctcgtggataccgctgctcagcgtcttaaaggacagggggtcaaacttttcgctgtgggcataaaaaacgccgaccccgaggaactcaaaagagtcgcatcccagcccacctcagacttctttttttttgttaacgatttcagtatcctgaggaccctcttgccactcgtgtctagacgggtgtgcacaacagcaggcggtgtgccagttacccgccctcccgatgactccacctctgccccccgagatctggtactgagcgagccctcttcacaatctctgagagtacagtggactgccgccagtgggcccgtgactgggtataaggtgcagtacactcccctgactggcctcggtcagccactgccttcagagaggcaggaagtcaacgttcctgctggcgagacatcagtgcggctacgtggtctgagaccactgactgaataccaagtcacagtgatagctctgtatgccaacagtatcggggaagccgtttctgggactgcccgaacaacagcactcgaaggacccgagcttacgattcagaacactaccgcgcattctttgttggttgcctggagatctgtgcctggggccacaggctaccgggtaacatggagggtcctctccgggggtccgactcaacagcaggaacttggccccggccaggggtccgttctactccgggacctcgaaccaggtaccgactacgaggttacagtcagcaccctctttgggaggagcgtcggtccggctaccagtctcatggctcgaacagacgcttcagtcgagcagacactgagacccgttatcctaggaccaacttcaatactcctgtcctggaatttggtcccggaggcccggggctaccggctcgagtggcgtagggagacaggactggaacctccccagaaagtcgtgcttccatctgacgtaacccgctatcagctggatggtcttcagcccggcaccgagtatagacttaccttatacactcttctcgagggacatgaggtggcaactcccgccacagttgtgcctactgggcctgagttgcctgtgagtcctgttacggacctccaagccactgagctccctgggcagcgggttcgcgttagttggagccccgtgccgggggctacccagtaccgcatcatcgttaggtcgacccagggggtggaacgcaccttggttttgccaggaagccaaaccgcttttgacctggacgacgttcaagcgggactttcttatactgtgagggtgagcgcgagggttggaccacgggagggctcggcatccgtgcttaccgtccgcagggagcctgaaacccccctggccgttcctggtctccgggtcgtggtgagtgatgcaacacgggttagggtcgcatggggtccagtgcctggcgctagcgggtttcgaatctcttggagcaccggctcaggacctgagagcagccagacattgccacccgacagtactgccacggacatcacagggctgcaaccaggaacaacataccaagtcgctgtgagtgtgcttagggggagggaagaaggacctgccgcagtcatcgttgcccggacagatcctcttggccctgttcgcaccgtccacgtgactcaagcatccagttcttctgtaaccatcacttggacacgtgtgcctggggctacgggttaccgtgtttcctggcactctgcgcatggccccgagaagtcgcaactggtctcaggggaggctacagttgccgaactggatggcctggagccagataccgagtataccgtacatgtgcgtgcacacgtggctggggttgatgggcctcctgcttctgttgtcgtgcgcaccgctcccgaacctgtgggccgggttagccggctccagattctcaatgccagcagtgatgtacttcgaattacttgggtgggcgtcacaggggcaaccgcatacagattagcatggggacggtccgaggggggacccatgaggcaccagatcttgccaggcaacacagacagtgcagaaatccgggggcttgaggggggagtgtcttacagtgtacgagttaccgcactcgtcggagatagggagggcacccctgtttctatcgtggttactacgccgccagaggctcctcctgcacttggaactttgcacgttgtacagcgcggagagcactctttgagactccgttgggagccagttccgcgcgcacagggctttctgctccactggcagcctgagggcggacaggaacaaagccgggtgttgggccccgagctgagttcctaccacttggatgggctggaacctgctacccagtatcgcgtccggctgtcagtattagggcctgcgggcgaaggcccaagcgccgaggtcacagcccgcaccgagtctccccgagtccccagcattgaactgagggtggtcgacacttcgatcgattccgtgactttggcttggactcccgtgagtcgagccagcagttatatattgtcatggcgacccctccggggtcccggccaggaggtgcccgggtctcctcagacactgccaggcatctccagcagccagagagtgacgggcttggagcccggggtgagctacatcttctctctgacccccgtgcttgatggtgtgcgtggaccagaggcctcagtcacccagaccccagtctgccctcgagggctcgcagatgtcgtttttctcccgcacgcgactcaggacaatgctcatcgcgctgaagctaccagacgcgtgttggagaggctggtgctggccctcggcccattggggccccaggcagtccaggtgggactgctgagttattcacaccgcccatctcctttatttccattgaatgggtcccatgatctaggcataatattgcagcggatcagggacatgccctacatggatccatctgggaataacttgggaacagcggtggtgaccgcccatcggtatatgctggcccccgacgccccaggccgacgccagcacgtgcccggggttatggttctcctcgttgacgaaccattacgcggtgatattttctcacccataagagaggcacaagcttccggactcaatgtggtcatgcttggcatggcgggggctgaccccgagcagctgcgacgcctcgcccccggcatggattccgtccagaccttcttcgcggtcgatgacggtcccagcctcgatcaagccgtttcgggcctagcaacagccctttgtcaggcaagcttcactactcagccgcggcctgaaccgtgtccagtctactgtcctaaaggtcagaaaggggaacctggtgagatgggccttagagggcaagttgggccacccggcgatcctgggctgcctggtagaactggtgcccccggcccacagggcccacccggatcagcaaccgctaagggcgaaaggggcttcccgggcgctgacggccgccccggctctcccgggcgagccggcaacccgggcaccccaggtgctccaggcttgaagggcagcccaggcctccctggcccgcggggggatccgggggaaaggggtcctcgggggccaaagggtgaacccggagcgcccggccaggtgattggcggtgaaggtcccgggctccctggccggaagggagatcctgggccaagtggtcccccaggtccacgcggtcctctgggtgaccccggcccacggggacctcccggtctgcctgggaccgccatgaaaggtgacaaaggagaccggggcgagaggggcccgccagggcctggggaaggaggtattgccccaggtgagcctggtctccccggcttgcccggttctcctggccctcagggaccagtgggccctccaggcaagaaaggcgagaaaggcgatagtgaggacggcgcccccggcctccccggacagcctggctctccaggagagcaaggaccacgcggccccccaggtgcaattggacctaaaggggatcggggattcccaggtccattgggagaggccggggagaaaggcgaaagaggtcccccaggccccgccgggtcgagggggctccctggggtcgccgggcggccaggggctaaggggccagaaggaccccctggccccactggccgtcagggtgagaagggggaacctggccgcccaggagaccctgcggtggtgggaccagcagtggccgggcccaaaggcgagaagggagacgtggggcccgcgggccccagaggggcgaccggtgttcagggggagaggggacctcctggcctggtgcttcccggcgaccccgggccgaaaggggatcctggcgatcgtggtcccataggactcacaggacgtgctggaccccccggcgattcagggccccccggggagaagggggatcccggccggcccggcccccctgggccagtgggtccaaggggacgggatggggaggtgggagaaaagggtgacgaaggaccgccgggcgaccctgggcttcctggaaaagcaggtgaacgcgggctgaggggagccccgggtgtgcgcggacctgtaggtgagaagggcgaccagggtgaccctggcgaggatggtaggaacggaagccccggctcttcagggcccaaaggtgaccgaggagaacctgggccccctggaccgccgggtcgtctggtagatacaggacccggtgcacgtgagaagggggaacccggcgacagggggcaggaaggaccgcgcggcccaaagggggacccaggcctgcctggagctcccggggagcggggcatcgagggcttccgtggtccacctggcccacagggtgaccccggcgtccgggggccggcaggtgagaaaggtgaccggggtccacctggactcgacgggcgcagcgggctggacggtaaaccaggggcagccgggccctcaggccctaacggtgccgcaggcaaagccggagatcccggtcgtgatggtctccccgggctgcgaggcgaacagggtttgcccgggccttccgggcctccgggcctgcctgggaagccaggagaggatggaaagcccggcctgaacggcaaaaatggggaacccggggaccctggggaagacggcaggaagggcgaaaaaggcgatagcggagcctcaggccgggaaggcagggatggtcccaagggcgaacgaggagcaccagggatactgggacctcagggaccccccgggcttccagggcctgtggggccccccggtcaggggtttcccggcgtcccggggggaacgggtccaaaaggcgacagaggagaaacagggagtaagggcgaacaggggcttcctggagaacggggcctccggggggagcctgggagcgtcccgaacgtggatcgactcctggaaactgccggaattaaggccagcgccctcagggagatagtggaaacttgggacgagtcctctggctcatttctccccgtgcccgagcgacgaagaggccctaaaggggacagcggagaacagggcccccctggtaaagagggcccaattggatttccgggggagaggggtttgaagggtgatcgaggggatcccggtcctcagggaccacccgggctagcgctgggggaaaggggccctccagggcctagcggactggcaggagagcccggcaagccaggcattcccggcctccccggaagagcgggaggggtgggagaggctgggcgccccggggagcgaggcgaacggggcgaaaaaggcgagcggggcgagcagggccgagatggaccccctggcctgcctggcaccccaggtccccctggtccccccggacccaaagtgtccgtcgatgaaccggggccagggctgtctggggaacaggggccaccaggcttgaagggcgctaaaggcgagccaggaagcaatggcgatcagggccctaagggcgatcgaggcgttccgggaattaagggcgaccggggtgagccaggacctcgaggtcaggatgggaatcccggtctacctggcgaaagaggcatggctgggcccgagggtaagcctggtctgcagggccctagaggaccccccggtcctgttggaggacacggcgatcctggcccacctggggctccaggcctggctggccctgcgggtcctcaagggccatctggcttgaaaggagaacccggcgaaaccggcccgcccgggagaggcctgacagggccaaccggggccgtcggacttcccggtccgcctgggccctccggactcgtggggccccaggggagtcccggactccccggtcaggtgggcgaaacaggtaaaccaggcgcccctggacgggatggcgccagcgggaaggatggggatcgaggctccccgggcgtgcctggctctccgggtttacctggccccgttggtcccaaaggcgagccgggccccaccggagctccggggcaggcagtggtcgggctcccaggcgcaaaaggcgaaaagggggccccaggggggctcgccggagacctggttggggagccgggcgcaaaaggcgacaggggcctgccaggccccaggggtgagaagggggaggctgggagagcaggcgagcccggggaccctggggaggacggacaaaagggtgcccccggacctaaagggttcaaaggcgaccccggtgtgggcgttcccggctccccaggaccacctggaccccctggcgttaagggggacctcggccttccgggactccccggggcaccgggggtggtgggtttcccaggccagactggcccgcgcggagaaatgggccaaccaggcccctctggagaaaggggcctggctggacccccagggagagagggcatccccggtcctctcgggcctcccgggcctcctggctccgtgggccccccaggcgccagtggcctgaaaggagataaaggtgatcctggagtggggctaccaggccccagaggtgagaggggtgagccgggcatccgtggcgaagatggaaggcctggacaagagggccctagaggcctgactgggccccctggctctcgaggggagcgcggggaaaagggcgatgtcggaagcgctggcctgaaaggcgataagggcgattccgctgtgatccttggcccacccggcccacgtggagcgaaaggagacatgggcgaacgaggcccaagagggttagacggtgacaagggcccacggggggacaacggcgatcccggcgacaaaggcagtaagggagaacctggcgacaaaggctcggctgggctacccgggctgcggggactgctgggtcctcaggggcagccaggggcggcaggcatcccaggcgatcctgggtctcctggtaaagacggagttcctggcattcgcggggaaaaaggtgatgtagggtttatgggcccccgggggctcaagggagaaaggggcgttaagggcgcatgcggcctggacggagagaagggtgacaaaggcgaagcaggaccaccaggacggcctgggctggccggtcataagggtgaaatgggggagcctggagttccaggccagtccggcgccccagggaaagaaggtctcatcgggccaaaaggggaccgggggtttgatggccagccaggtcccaaaggcgatcagggcgaaaagggggaaaggggcaccccggggatcggtggatttcccggacctagtggcaacgatgggtccgccgggccccccggcccccccggctctgtgggcccccgcggcccggagggtcttcagggtcagaaaggcgagagaggtcctccgggggaacgagtggtcggagcgcccggcgttcccggcgcaccgggtgaacgcggtgaacagggacggcccgggcccgccgggccccgcggcgagaagggggaggcggcactaactgaggacgacattcggggcttcgtgcgccaggagatgtcccaacattgcgcctgccagggccagttcatcgccagtgggtcgcgacccctgccctcttacgctgcagatacagcagggagtcagctgcacgcggtgccagtgctgagggtgagccatgcagaagaggaggagagagtgccccccgaagacgatgagtactcggagtattccgaatattcagttgaggagtatcaggatcctgaagctccatgggactctgatgacccttgcagtctgcccctggacgagggaagctgtactgcctacacccttaggtggtatcaccgcgccgtgactggatccacagaggcatgtcatccctttgtctatggcggatgcggcggcaatgcaaatcggttcgggacacgagaggcttgcgaacggaggtgtcccccaagagtggtgcagtcacagggaacaggcacagcccaggac

SEQ ID NO: 1497 - DNA, 8832 bp, Artificial Sequence
  derived and/or modified sequence
atgactttaagattattagttgccgcactatgtgcaggaattttagctgaagctccaagagttagagcacaacatagagaacgtgttacatgtacaaggctttatgcagctgacattgtttttcttcttgatggatcctcatctattggaagatcaaatttccgtgaagtacgtagttttttagaaggattagttttacctttttcaggtgcagcatctgcacaaggagttcgatttgctacagttcaatatagtgatgatccaagaacagaattcggtcttgatgcattaggatctggaggtgacgttattagagctattagagaacttagttataaaggaggaaatactagaactggagcagctattttacatgttgcagatcatgtatttttgccacaattagcaagaccaggagttccaaaagtttgtattttaattactgacggaaaatcacaagatttggttgatactgcagcacaacgactcaaaggacaaggtgtaaaattatttgcagttggtattaaaaacgctgatccagaagaacttaagcgtgtagcttctcaacctacttcagatttttttttttttgtaaatgatttttcaattttaaggacattacttccattagtatcaagacgagtttgtacaactgctggaggtgttccagtcactagaccaccagatgattcaacatcagctccaagagatttagtattatctgaaccatcatcacaatcattgagagttcaatggacagcagcttcaggaccagtaactggatataaggttcaatatactccacttactggattgggtcaaccattaccatcagagagacaagaagttaatgtaccagctggagaaacatcagttaggttgagaggattaagaccacttactgaatatcaagtaactgttattgcattatatgctaattcaattggagaggcagtcagtggaactgcacgaacaactgcacttgaaggaccagaattaacaatacaaaatactacagcacattctttattagtagcttggagatccgttccaggagcaacaggatatagagttacttggagagttttatcaggaggaccaactcaacaacaagaattaggaccaggacaaggatctgttcttcttcgagatttagaaccaggaactgattatgaagttactgtttctactttatttggaagaagtgttggtccagcaacatctttgatggcaagaaccgatgcttctgttgaacaaacattaagaccagttattttaggacctacatcaattcttttatcatggaatttagttccagaagctagaggttatagattagaatggagacgtgaaacgggattggaaccacctcaaaaagtagttttaccttcggatgttacaagataccaattagatggtttacaaccagggactgaatacagattgactttgtatacgctattagaaggacatgaagttgcaacaccagctactgttgttccaactggacctgaattaccagtaagtccagtaactgatttacaagctactgaattaccaggacaaagagtaagagtttcttggtcaccagttccaggtgcaactcaatatagaattattgttagatcaactcaaggagttgagagaactcttgtattacctggatctcaaactgcttttgatttagatgatgttcaagctggactttcatatacagtacgagtaagtgcacgtgttggaccacgtgagggatctgcttctgtcttaaccgttaggcgtgaacctgagacaccattagcagttccaggattaagagtagtagtaagtgatgctacaagagttagagtagcatggggtccagttccaggagcttcaggatttagaatttcatggtctacaggatcaggtccagaaagttctcaaactttaccaccagattcaacagcaaccgacatcactggacttcaaccaggaacaacatatcaagtagctgtttctgttttaagaggacgagaggaaggtccagctgcagttattgttgcaagaacagatccattaggacctgttagaacagtgcatgttactcaagcatcttcatcaagtgtaactataacatggacaagagttccaggagctacaggataccgagtaagttggcattcagctcatggtcctgaaaaatctcaacttgtttccggagaagctacagttgctgaactagatggtcttgaaccagatacagaatatacagttcatgttcgtgctcatgtagctggagttgatggaccacctgcatctgtagttgttagaacagctccagaaccagttggaagagtttcaagattacaaattttaaatgcttcatcagatgttttacgtattacatgggtaggagtcaccggtgcaactgcatatagattagcttggggtagatctgaaggtggaccaatgagacatcaaattcttccaggaaatacagacagtgctgaaattagaggattagaaggtggagttagttatagtgtaagagttactgctttagttggtgatagagaaggaactccagtttcaatagtagttactacaccaccagaagcacctccagctctagggacattgcatgttgttcaaagaggagaacattcattacgtctaagatgggaaccagttccaagagctcaaggttttttacttcattggcaaccagaaggaggtcaagaacaatcaagagtgcttggaccagaattatcttcttaccacttagatggacttgagccagctacacaatacagagtaagattaagtgttcttggtccagcaggagaaggaccaagtgctgaagttacagctagaactgaatctccaagagtaccatctattgaattgagagttgttgatacatctatagatagtgtaacattagcatggactccagtttcaagagctagttcatatattttaagttggagaccattaagaggaccaggacaggaagtaccaggatctccacaaacattaccaggaatttcaagtagtcaaagagttacaggacttgaacctggagtatcttatatattttcattgactccagttttagatggagtcagaggtccagaagcatcagtaacacaaacgcctgtttgtccaagaggattagctgatgttgtatttttgccacatgcaactcaagataatgctcatagagcagaagctactcgtagagttttagaaagattagttcttgctttaggaccactaggtccacaagcagtacaagtaggtttattatcttattcacatagaccaagtccattatttcctcttaatggatctcatgaccttggaattattttacaacgtataagagatatgccatatatggatccatcaggaaataatcttggaacagcagttgttacagcacatagatatatgcttgctccagatgctccaggaagaaggcaacatgttccaggagttatggttttacttgttgatgaaccattaagaggtgatattttttcaccaatcagagaagcacaagcttctggattaaatgtcgttatgttaggtatggcaggtgctgatccagaacaacttagaagattagctccaggaatggatagtgttcaaacttttttcgctgttgatgatggtccttcacttgatcaggcagttagtggtttagctacagcactttgtcaagcatcttttacaactcaaccacgtccagaaccatgtcctgtttactgtccaaaaggacaaaagggagaacctggagaaatgggactacgaggacaagttggaccaccaggagatcctggtcttccaggaagaactggtgctccaggaccacaaggacctcctggttcagctacagcaaaaggagaaagaggttttccaggagcagatggacgtccaggatctccaggaagagctggaaatccaggaacacctggagctccaggattaaagggatctccaggacttccagggccaagaggagatccaggagaaagagggccacgtggaccaaaaggtgagccaggagcacctgggcaggttataggaggtgaaggacctggacttccaggaagaaaaggggatccaggaccatcaggacctcctggacctagaggtcctcttggagatccaggtcctagaggtccaccaggattaccaggaactgcaatgaagggagataaaggagatagaggagaaagaggaccacctggaccaggagaaggtggaatcgcacctggagaacctggattaccaggacttccaggatcaccaggtccacaaggacctgtaggtccacctggaaaaaaaggagaaaaaggtgattcagaagatggagcacctggtttgccaggtcaaccaggatcaccaggagaacaaggtccacgtggaccaccaggagctattgggcctaaaggtgatcgaggattccctggaccacttggagaagctggggaaaaaggagaacgtggaccaccaggaccagctggttcaagaggacttcctggtgtagctggtagaccaggagcaaaaggaccagaaggacctccaggaccaacaggaagacaaggagaaaagggagaacctggaagaccaggagacccagcagtagttggtccagcagtagctggtccaaaaggtgaaaagggagatgtcggaccagctggaccacgtggagctacaggagttcaaggagaaagaggaccaccaggattggttcttcctggagatcctggtccaaaaggagatcctggagatagaggtcctattggattaactggaagagcaggaccaccaggtgactctggaccaccaggtgaaaaaggagatccaggaagaccaggaccaccaggtccagttggaccaagaggaagggacggagaagttggagaaaaaggtgatgaaggtccacctggagatccaggattaccaggtaaagcaggtgaaagagggttaagaggagcaccaggagttagaggaccagttggagaaaaaggtgatcaaggagatccaggagaagatggaagaaatggatcaccaggaagttcaggaccaaaaggtgatagaggagaaccaggaccaccaggacctccaggaagacttgttgatactggaccaggtgctagagaaaaaggagaaccaggagacagaggacaagagggtccaagaggtccaaaaggagatccaggattaccaggagctccaggagaaagaggtattgaaggatttagaggaccaccaggacctcagggtgacccaggtgtaagaggtccagccggagaaaaaggagatagaggacctccaggattagatggaagaagtggtttagatggaaaacctggtgcagctggaccttcaggaccaaatggagctgctgggaaagcaggggacccagggagagatggattaccaggtttaagaggagaacaaggtcttccaggaccatctggtcctccaggtcttccaggaaagcctggtgaagacggaaaaccaggattaaacggaaaaaatggagaaccaggagatccaggagaagatggtagaaaaggtgaaaaaggtgattcaggagcatcaggtagagaaggaagagacggtcctaagggagaaaggggggcacctggtattttaggaccacaaggaccaccaggacttccaggaccagttggacctccaggacaaggtttcccaggtgtaccaggaggaacaggaccaaaaggagatagaggagaaactggttcaaaaggagaacaaggattaccaggtgagagaggtcttagaggggaaccaggatctgttccaaatgtagatagattattagaaacagcaggaattaaagcaagcgcattgagagaaattgttgaaacatgggatgaaagttcaggaagtttccttccagttccagaaagaagaagaggaccaaaaggagattcaggagaacaagggcctccaggaaaggaaggacctattggttttcctggagaaagaggacttaaaggggatagaggagatccaggtcctcaaggaccaccaggattagcacttggagaaagaggaccaccaggtccatcaggtttagcaggagaaccaggaaaacctggaattccaggattaccaggaagagctggtggtgtaggagaagcaggaagacctggtgaaagaggagaaagaggagaaaaaggagaaagaggagaacaaggaagagatggtccaccaggtttaccaggaactccaggtccaccaggacctccaggaccaaaagtatcagtagatgaaccagggcctggactttcaggtgaacaggggccaccaggattgaaaggagctaagggtgaaccaggatctaatggtgatcaaggaccaaagggtgatagaggagtcccaggtattaaaggagatagaggtgaaccaggtccaagaggacaagatggaaatcctgggcttccaggtgaacgagggatggctggaccagagggtaaaccaggattacaaggaccaagaggtcctccaggaccagttggaggacatggtgacccaggaccaccaggagctcctggtttagcaggaccagcaggtcctcaaggtcctagtggacttaaaggagaaccaggagaaactggaccacctggtagagggttgactggacctactggagcagtgggtcttccaggaccaccaggtccatcaggattagttggaccacaaggttcaccaggtttaccaggacaggtgggagaaacaggaaaaccaggagctccaggtagagatggagcatcaggaaaagatggtgatagaggatctcctggagttccaggttcaccaggacttcctggaccagttgggccaaaaggtgaaccaggacctactggtgctccaggtcaagcagttgttggattaccaggagctaagggagaaaaaggagcaccaggaggacttgcaggagacttagttggagaaccaggtgctaaaggagatagaggtttacctggacctcgtggagaaaaaggagaagctggaagagcaggagaaccaggtgatccaggagaggatggacaaaaaggggcaccaggaccaaaaggttttaaaggagatccaggtgttggtgttcctggatcaccaggaccaccaggaccaccaggagttaaaggagacttaggtcttccaggtttaccaggagcaccaggagttgttggatttccagggcaaacaggaccaagaggtgaaatgggacaaccaggaccttcaggtgaaagaggtcttgcaggaccaccaggaagagaaggtataccaggaccattaggtccaccaggaccaccaggatctgttggtccacctggagcttctggattaaaaggtgataaaggtgatccaggagtgggacttccaggaccaaggggagagagaggagaacctggaataagaggagaagatggaagaccaggtcaagaaggaccaagaggacttacaggaccaccaggaagtagaggtgaaagaggtgaaaaaggtgatgttggttcagcaggtcttaaaggagataaaggagattcagctgttatattaggtccaccaggaccaagaggtgcaaagggtgatatgggtgaaagaggaccaagaggattggatggagataaaggaccaaggggagataatggtgatccaggggataaaggttctaaaggtgagcctggagataaaggatctgctggattacctggtttaagaggtttgttaggaccacaaggacaacctggagcagcaggtataccaggtgatccaggtagtccaggtaaagatggtgttcctggaattagaggagaaaagggtgatgttggttttatgggaccacgaggtttaaagggagaaagaggagtaaaaggagcttgtggattagacggagaaaaaggtgataaaggagaagctggtccaccaggaagaccaggtttagcagggcataaaggagaaatgggagaacctggagttccaggtcaaagtggagcaccaggtaaagaaggattaattgggccaaaaggggatcgtggttttgacggacaaccaggaccaaaaggagatcaaggagaaaaaggtgaaagaggaacaccaggaataggaggattcccaggtccatcaggaaatgatggatcagctggaccacctggtccacctggatctgttggtccaagaggaccagaaggattacaaggacaaaaaggagaacgtggaccaccaggagaaagagttgttggtgctccaggagttccaggtgctccaggtgaaagaggggaacaaggaagaccaggtccagctggacctcgaggagaaaaaggagaagctgctctaacagaagatgatattagagggttcgtgcgtcaagaaatgtcacaacattgtgcttgtcagggacaatttattgcatcaggaagcagaccacttccaagttatgcagcagatactgctggtagtcaacttcatgcagtaccagtacttagagtttcccatgctgaagaagaagagagagttccaccagaagatgatgaatattcagaatatagtgaatattcagtagaagaataccaagatccagaagctccatgggatagtgatgatccatgtagtttaccattagacgaaggatcatgtactgcttatacattaagatggtatcacagagccgttacaggatcaacagaagcatgccatccatttgtatatggaggttgcgggggtaacgctaatagatttggaacacgagaagcttgtgaaagacgttgtccacctcgagtggtacagtctcaaggaacaggaaccgcacaagat

SEQ ID NO: 1498 - DNA, 8832 bp, Artificial Sequence
  derived and/or modified sequence
atgaccctgaggttgcttgtggcagccctgtgtgcaggaattctcgcagaggctcctagagtgcgtgcgcagcaccgcgaaagagtgacttgcacccgcctttatgcggcggatatagtgttcctgctggatggaagctcatcgatcggaagatcaaactttagggaggtgaggtcctttctggaaggactggtgctcccattttcgggagcagcatccgcacaaggcgtcagatttgcaacggtacaatactccgatgatccaagaaccgaattcggcctcgatgcactgggttcgggtggggatgtcattagagctatcagagagctgtcctacaaggggggaaacaccagaaccggcgcggccattctgcacgtggccgatcacgtgtttttgccgcaacttgccaggcctggggtccctaaggtgtgtatccttatcacggatgggaagtctcaagacctggtcgatacggcagcacaaaggctcaaaggacagggagtgaagttgtttgcagtgggcattaagaatgcagatcccgaagaacttaaaagagtggcatcacagccaacttcggacttctttttctttgtgaacgactttagcatcctgagaaccctcctgcctctcgtgtcgagaagggtctgtaccaccgcgggaggtgtgccggtcacgaggccccccgatgatagtacgagcgcccccagagatctggtcctctcggaaccaagcagccagtccttgcgggtccagtggactgcagcatcgggaccagtcactggatataaggtccaatacaccccgcttaccggacttggtcaacccctgccctcggagcgccaggaggtgaacgtgcctgcaggggaaacttcggtgagactgaggggactccgacctctgaccgagtaccaagtgaccgtcattgcactgtacgctaactcgataggtgaggcagtcagcggaactgcacggaccaccgctctggagggaccagaactcactatacagaatactactgcacattcactcctggtggcctggagatcagtgccaggcgctactgggtacagagtgacgtggcgagtgctttcgggcggtcctacccagcaacaagagttgggcccaggtcagggctcagtgttgttgcgggatcttgaaccaggcactgactacgaagtgaccgtgagcactctcttcggcagatctgtgggaccagcgacttcactgatggcaagaaccgatgcctcggtcgaacagaccctgcgacccgtgatcctgggaccgaccagcattcttctcagctggaaccttgtgccggaagcacgcgggtaccggttggaatggcgccgtgaaaccgggctcgaaccacctcaaaaggtggtgctcccttccgatgtgactcgttaccaactggatggccttcagcctggtacggagtaccgactcaccctttacactcttctggagggacatgaggtcgccactcctgcaaccgtggtgcctacggggcctgaactccccgtgagtccagtgaccgacctgcaagcaactgaactgcctggacaaagagtcagggtgtcctggtcgcctgtgccaggggcaacccagtaccgcataattgtgagaagcactcaaggcgtggagagaaccctggtgcttcctggatcgcagactgcgttcgatctggacgacgttcaggccggactttcatataccgtgcgcgtgtcagccagggtgggccctcgcgagggcagcgcaagcgtgttgaccgtgaggcgcgaacctgaaaccccactggccgtgcccggtctgcgtgtggtcgtgtccgacgcaactagagtgagagtggcttggggaccagtcccaggggcatcaggattcagaatctcgtggagcaccgggtcaggtcctgaaagctcgcagaccctcccacctgattccaccgccaccgatattactggactgcagccaggaactacctaccaggtcgcagtgagcgtccttaggggccgggaagaaggtcctgcagctgtgattgtcgcccgaaccgatccactcggaccggtgagaaccgtgcacgtgacgcaagcctcgtcatcctccgtcaccattacctggacccgtgtgcctggtgcaacgggttaccgagtctcatggcacagcgcacacggtccggagaagagccagctcgtgagcggtgaggccaccgtggcagaacttgatggtctggaaccagatactgaatacacggtccacgtgcgggcacacgtggccggagtggatggccctcctgcgtccgtggtcgtgagaactgcaccagaacccgttgggcgagtcagcagactccaaatacttaatgcatcgtctgatgtgctgcgcatcacctgggtgggagtgaccggtgcaaccgcgtacagattggcatggggacggtccgaaggcggtcccatgcggcatcaaatactgccaggtaataccgattccgcagagattcgggggcttgagggaggggtgtcgtactccgttagagtgactgcgctggtcggagatcgggagggaactccagtgtccatcgtcgtcaccaccccgcctgaagcgcctccagcacttggaaccctccatgtggtgcaacgtggcgaacacagcctccgcctgcgatgggagcctgtccccagagcacaaggttttctgttgcactggcagccagaggggggacaagaacagtcgcgggtgttgggacccgaactgtccagctatcaccttgatggacttgaaccagcaactcaataccgagtcaggctgagcgtgttgggtccagcaggcgaaggaccttcggcagaggtgactgcacgtactgagtcgcctcgtgttccgtcgatagaacttcgcgtcgtggacacctcaattgattcggtgacccttgcttggactcccgtgtcaagggcctcatcgtacatcctgtcctggcgtccgctcaggggacccggtcaagaagtccctgggtcccctcaaacgcttcctgggattagctcgtcccaaagggtcacgggactggaaccaggtgtgtcgtacattttctcgcttacccctgtcctggacggtgtccgaggaccagaggcaagcgtgacccaaaccccagtgtgtcctcggggacttgcggatgtggtttttcttcctcatgccactcaagataatgcgcatcgcgctgaagctacccggcgagtcttggaaaggctggttcttgctttggggcctttgggtccacaggccgtgcaagtgggcctgttgtcgtactcgcacagaccttcaccactgttcccactgaatggttcccatgacctcggcatcatactgcagcggatccgagacatgccgtacatggatcctagcggcaacaatctgggaaccgcagtggtcaccgcccataggtacatgctggcacctgatgcaccagggcgaaggcagcatgtccccggagtcatggtgctgctggtggacgaaccacttcggggagatatctttagccctatcagggaagcacaagcctccggtctgaacgtggtcatgcttggaatggccggagccgatcccgagcaactgagaagattggctcctggaatggactctgtgcagactttctttgcagtggatgatggtccttcccttgaccaggcggtgtcgggactggcaaccgcactttgtcaagcctccttcaccacgcaaccacggccggagccatgccctgtttactgtccaaagggtcagaaaggcgagcccggagaaatggggctgcgcggccaggttggtccaccgggtgaccctggcctcccgggccgaactggtgcacctggaccccagggtccgccaggctccgcaaccgcaaagggtgaaagaggtttccctggtgcagatggcagaccaggatcacctggaagagcaggcaaccctggcactccgggtgcgcccggtctgaaaggatcccctggactgcctggacctcgaggtgatcccggggagagagggcctcgtgggcccaagggagaacctggtgcgcctggacaagtcatcggtggtgaaggacctggactgcctggaagaaagggcgaccccggcccttccggtcctcccgggccccggggtccacttggtgacccaggaccccggggaccaccaggacttcctggtaccgcgatgaaaggagataagggagatcgcggtgagagagggccacctggcccaggagagggcggtattgcccctggagagccaggcctgccaggactgcctggaagcccaggcccgcaaggacccgtgggccctcctggaaagaaaggtgaaaagggagactccgaagatggtgcaccaggacttccaggtcagcccggctcacctggtgaacagggtcctcgtgggccaccgggcgcaattggcccaaagggtgatcgagggtttccaggacccctgggtgaagccggggagaaaggagaaagagggccacctggccccgccggatcaagaggattgccgggcgtggctggtagacctggggccaaaggtcctgaaggaccacctggacccaccggtagacagggcgaaaaaggtgagccaggacggccaggtgaccctgcagtggtggggccagccgtggcaggtccaaaaggggagaagggagacgtgggacccgcggggcctcgcggcgcaactggagtccaaggagaacgtggtcctccggggttggtgcttccaggcgaccccggtcccaagggtgatccaggcgaccgcggaccaattggactgaccggacgcgccggcccccctggtgattccggtccaccaggtgagaaaggtgacccaggccgcccagggccccctggaccagtgggtcctaggggtagagatggagaggtgggtgagaaaggagatgaaggacctcctggtgatccgggactgcctggaaaggcgggtgaaagaggactgagaggcgcaccaggcgtccgcggacccgtcggagaaaagggagatcagggtgatcctggtgaagatggtagaaatggatcccctggaagctccggcccaaagggtgacagaggagagccaggcccacccggcccacccggtcgacttgtggatactggtcccggagcaagagaaaagggagagccaggcgaccgaggccaggaagggcctcgcggtccgaaaggtgacccaggactgccgggagcccccggtgagagaggaattgaaggattcaggggaccccctggtcctcaaggtgacccaggggtgcggggacctgcaggtgagaagggagatcgggggcccccgggactggatggtcggtccggccttgacggaaagcccggcgcagcaggaccgtctgggccaaatggagctgcaggaaaggccggcgacccaggtcgcgatggacttccagggttgaggggagaacagggacttcccggtccttcgggaccccccggtctgccagggaagcctggggaagatggcaagccaggcctcaatgggaagaacggagaacctggtgaccctggggaagatgggcggaaaggagaaaagggagattcaggagcgtccggacgagagggcagagacggaccgaaaggggaacgcggtgcacctggtattcttgggccacaaggtccccctggcttgcccggaccagtcggcccccctgggcaagggttcccaggtgtgccaggggggacgggccctaagggcgaccgaggagagactggatcaaagggagaacaaggcctgccgggagaacgcggactgagaggtgaaccaggatcagtacctaacgtggatcggcttctggaaactgcgggaatcaaagcatctgctcttcgagaaattgtggagacttgggacgaaagctcgggttcctttcttccagtgccagagaggagacgcggacccaagggcgactcaggcgaacagggaccacctggaaaggaaggtcctattggctttccaggcgagcgggggcttaagggagatcggggcgacccgggacctcaggggccaccaggactggcgctgggtgagcgagggcctccaggaccaagcggcctggcaggcgaacctggaaagcctggcattcccggacttcccggacgcgccggtggggtgggagaggcaggacgcccgggggaaagaggagagcggggagaaaaaggagagcgcggtgaacagggtcgcgatgggccgcctggcttgcctggaactcctgggccgccgggaccgccaggacctaaggtttccgtggatgagcctggtcctggtttgtccggagagcaaggtccacctggacttaagggtgccaagggggaacccgggtccaatggtgatcagggacctaagggggacagaggtgtccctggtattaagggtgatagaggggagcctggaccccgaggccaggatggcaatcccggacttcccggtgaacggggtatggcaggaccagaagggaaacccggacttcagggaccacggggaccacctggcccagtgggcggtcatggcgacccgggtccacccggagcacctgggcttgccggcccagcgggtccccaagggccttcggggctgaagggagaacctggagaaactggacctccaggaagagggctcacgggaccaaccggagccgtcggactgcctggacctcccggcccttccggacttgtcggcccacagggtagtcctgggctccctgggcaagtgggtgagacgggcaagccgggtgcaccaggtagagacggcgcatctggtaaagacggagacagaggatcgcccggtgtccccgggagccctgggctgccaggaccagttggaccaaagggagaaccaggacctaccggtgcacctggtcaggccgtggtcgggcttcccggtgccaaaggagagaaaggtgcgcctggaggacttgcaggggatctggtgggtgaacctggagcaaagggtgatcgaggtctgcctgggccgaggggcgagaagggtgaggcagggcgcgcaggagagcctggggatcccggagaagatggacagaagggagcaccagggcccaaaggtttcaagggagatcctggagtgggggtgccaggatcgcctggcccgcccggcccccctggagttaagggtgatctgggtttgccaggcttgcccggagcgcctggagtcgtcggctttcctggacaaaccgggcctagaggagaaatgggacagccgggaccaagcggcgaacgcggactggcaggccctcctggtcgggagggtatccctgggccacttggaccccccggcccacctggctcggtaggaccgccaggagcttctggactgaagggggataagggcgatccaggagtgggtctgccaggtccccggggtgaaagaggagaaccagggattagaggcgaagatggacggccaggtcaggaagggcctcgcgggctgacgggtcctcctggttcccgaggagagagaggagaaaagggagacgtaggttctgcagggctgaagggagacaagggggattcggcagtgatcttgggcccaccagggccgagaggggccaagggagatatgggcgaacgaggcccacggggtctggatggagataagggacccagaggtgacaatggggatcccggtgacaagggatccaagggggaacccggcgataaagggtctgcgggtctgccaggcctccggggacttctgggaccacaaggccagcctggagcagcaggcattcctggtgaccctgggtcgccaggtaaggacggcgtccccggtataagaggagaaaaaggagatgtggggtttatgggaccccgaggcctcaagggcgaaaggggtgtgaagggggcctgcggccttgatggagaaaagggagataaaggagaagccggcccacctggtagacctggcctcgcaggtcacaagggtgaaatgggtgagccaggagtgcctggacagagcggcgcccctggtaaagaaggacttattggacctaaaggagataggggcttcgacggtcaacctggcccaaaaggcgaccagggtgaaaaaggagaaagagggacccctgggattggaggtttccccggcccttcggggaacgatggttcggcaggccccccaggaccacctgggagcgtcggtccaagaggaccagaaggtctgcagggtcagaagggtgagagaggtcccccaggagaacgcgtggtgggagctcctggagtgcccggagctcccggggaacgcggagaacaaggacgtcccggacctgcgggtcctaggggtgaaaagggggaagcagctcttacggaggatgacatccgcggatttgtccgtcaagaaatgtcgcagcattgtgcatgtcaaggacagtttattgcatccggatcgcgaccactcccttcttacgccgcagatactgcgggttcacaattgcatgcagtccccgtccttcgagtgtcccacgcggaagaagaagagagggtgccccctgaggacgacgaatactccgaatactcggaatacagcgtggaagaataccaagatcccgaggcaccatgggattcagatgacccctgttccctccctctcgatgaaggttcctgcaccgcctacaccctgaggtggtaccaccgtgccgtgaccggatccactgaagcctgtcatcctttcgtgtacggaggatgtggaggtaacgcaaaccgttttggaactcgggaagcatgtgagagaagatgtcctccaagggtggtccagtcacagggaacgggaaccgcgcaagat

SEQ ID NO: 1499 - DNA, 8832 bp, Artificial Sequence
  derived and/or modified sequence
atgacgctccgactgctcgtagccgcgctatgcgccggcattctggccgaggctcctagggtgcgcgcacagcaccgagaacgcgtgacctgcacacgcctgtatgccgctgacattgtgttcctgctagacgggtccagctcaattggcagaagcaacttccgggaagtcagatctttcctcgagggcctggttctgccattttctggcgcagcttctgcacagggcgttaggtttgccacagttcagtactcagatgatccaaggactgagttcggcctggatgctctagggtccgggggcgacgtgattagagccattcgggaactgtcctataaaggcgggaacactcgcacaggagccgccattttgcacgtagctgatcacgtattccttcctcagctggcccggcccggcgtcccaaaggtgtgtatactaattacagacgggaaatcccaggacctggtggacactgccgcccagcgcttgaaaggacagggagtgaagttattcgctgtcgggatcaaaaatgctgatcctgaagaactgaaaagagtcgcgtcccaacctacgagtgactttttcttttttgttaacgatttcagcattctcagaacactgcttcccctcgtttcgcgccgggtatgcactacggccggaggcgtacccgtgacacgcccaccagacgactcaacgtctgcacctcgtgatcttgtcctctctgagccatcttcacaatccctgcgggttcagtggacagccgcctccggccccgtaacaggctataaagtgcaatacacacccttaacggggttggggcagccattaccatccgagcggcaggaagtgaatgtgcctgccggagagacgtcagtgaggctgcgcggcctgaggccactgactgaatatcaggtgactgttatagccctctacgccaactctattggcgaagccgtatcgggcaccgcaaggaccaccgccctggaagggccagagctcacaatacagaacacaactgcccactcactgctagtcgcctggaggagtgtgccgggagctacaggctatcgtgtgacctggagggttctgtctggcgggcccacacagcaacaggagctgggcccgggtcaaggtagtgtgttactcagggacctcgaaccagggacggattacgaagtcaccgtctccaccctcttcggtaggtcagttggacccgccacttcactgatggcacgtacagacgcctccgtggagcaaactcttaggccagttatcctgggtccaacttcaatactgctttcttggaacctcgtccctgaagcacgcggatatcgtctggagtggcggagggaaacaggccttgagccaccgcaaaaggtagttctcccatccgacgtgacgaggtaccaactggacggacttcagccagggacggagtatcgcttgacattgtacaccttgctggaagggcacgaggtcgcaacgcctgcaaccgttgtaccgaccggtccagaactgcctgtgtcacccgtgacagacctccaagccaccgagctgcctggtcaaagggtgcgagtgtcctggagcccagtgcctggcgctacacagtatagaatcattgtaaggtccacccaaggtgtggaaaggacactggtgcttccgggttctcagacagcattcgatctcgatgacgtccaggctggcctgagctatactgtccgcgttagtgcccgtgtaggtccccgggagggttcagcgtcggtcctgactgtacgtcgcgaaccagaaacaccactggctgtccccggattaagagtggtggtgtctgacgcaacaagggtccgagtggcttgggggcctgtgcctggcgctagcggcttccgcattagctggtctactgggtcgggaccagaatcttcacagaccctcccacctgactccactgccactgatattacagggctccaacccggaaccacttatcaagtcgccgtgtctgtgctgcggggccgcgaggaagggcccgctgctgttatcgtggcccgcactgacccactagggcctgtgaggaccgtgcacgtgactcaggcttcttcctctagcgtcacaataacttggacgagggtacctggtgccacaggttacagagtgagttggcactctgcacacgggcccgagaaaagtcagctggtgtctggcgaggccactgtagctgagctggatgggttggaaccggacactgagtacacagtgcatgtgcgggcccacgtggctggtgtggatggtccccccgcttccgttgtggtgagaacagcccctgagcctgtgggccgggtttccaggctgcagattctcaatgcaagcagcgatgtgctccgaattacctgggtcggcgtgacaggtgccactgcttataggctggcttggggcagatcagagggaggtccaatgagacatcaaatactcccaggaaataccgattccgctgaaattaggggcctggaggggggcgtcagctactccgttcgggtcactgcattggtgggggaccgagaaggaacccccgtgtctattgttgtgacaactccgcctgaggcccctcccgcacttgggactctgcacgtggtacagcggggggagcatagccttcgcctacgctgggaaccggtaccaagggctcagggctttttactgcactggcagcccgagggggggcaggagcagtctcgggtgctcggacccgaactctccagctaccatttagatgggctggaacctgcaacgcagtaccgagtgcgactgtcagtcttggggccagcaggagaggggccttcagctgaggtcactgctagaactgagtctccaagagttccctctattgaactgagagtagtggacacaagcattgactctgtgacgcttgcttggacccccgttagcagggcaagtagctacatactgagctggagacccttgcgtggccccggtcaagaagtgcctggatctccccagactctccccgggatatcttcatcccagcgggtgaccggcctcgaacccggggtcagttatatcttttccctcacaccggtgctcgatggggtgcgaggccctgaggcttcggttacccagacccctgtatgtcctcgggggctggctgatgtggtcttcctgcctcacgccacccaggacaacgcacaccgcgcagaggccacgcggagagtcttggagcgcctggtgctagctctggggcccctgggaccacaggccgtacaggtagggttgctgtcttactcgcatcgtcctagcccccttttccccctgaacggctcccatgacttgggcatcattttgcagcggatcagggatatgccgtacatggatccaagtggcaacaacttaggcacagcagtggtcaccgctcaccgttacatgctagcgccagatgcccctggtcgcaggcagcatgtcccaggtgttatggtgctcctggttgacgagcctctcaggggcgatatattttctcccattcgggaggcacaggcctctggactgaacgtggtgatgcttgggatggccggcgccgacccagaacagctcaggaggctggcacccggtatggattccgtgcagacatttttcgctgtggacgacgggcctagcctggaccaagcagtatcaggcctggcaacggcactatgccaggcatcatttactacacagccccgacctgagccctgtcccgtctactgtcccaagggccagaagggcgaacccggcgaaatgggtctgagagggcaggtgggacctccgggcgatccgggtttgcccggacgcaccggggcccccggaccccaggggcccccgggaagtgcaacagccaaaggcgaacgaggttttcctggggcagacggacgtccaggcagccccggaagagcaggaaaccccggaacacctggcgcaccaggtctcaaaggctcaccaggcctgccaggacccaggggcgatcccggtgagcgggggcccagaggacccaagggggagcccggagcaccagggcaggtcattggtggtgagggtcccggactcccagggaggaagggggatcctgggcctagtggtccacccggcccgcggggcccactaggcgacccaggtcccaggggcccccccggcctgcctggtacagctatgaagggggataagggagatcgcggcgaacggggtccacccgggcctggagagggcggaattgcccccggagaaccagggctgcctggcctgcccgggagtcccgggccacaggggccggtgggccctccagggaagaagggcgagaaaggcgattcagaggacggggcccccggcctcccaggccaacctggcagtcccggcgaacaagggccaagaggacctcccggagccattggccctaagggcgacagaggctttcccggtccactgggggaggcgggagagaaaggggagcgtggccccccaggacctgcaggctctaggggtctccctggcgtggctgggcggcccggagctaaaggaccagaagggcctcccggtcccaccggtcgccagggggagaaaggcgagcccggccgcccaggcgaccctgctgtcgtggggcctgccgttgccggccctaagggcgaaaagggcgatgtgggcccagccggaccccggggcgcaacaggagtccagggtgaaagaggtccaccaggtttggtactgcctggtgacccaggacccaagggtgaccccggtgatcgaggtcccattggccttaccggcagggccggaccccccggagattcaggaccaccaggcgaaaagggcgaccctgggcgaccaggtcctcccgggccggtcggccctcgcgggcgcgatggcgaggttggggagaagggagacgaaggaccgcctggtgatcccgggcttcccgggaaggcaggggagcgcgggctgaggggagctccgggcgttcggggacccgtgggagaaaagggcgaccagggcgaccctggggaagatggtcgtaacggcagccctggttcatctggcccgaagggtgaccggggcgagcccggtccccccggcccaccaggaaggcttgtggacactggccctggagcgagggagaaaggtgagcctggagataggggccaggaagggcctaggggtccgaaaggagaccctggactgcccggtgcgccgggcgagaggggcatcgaggggtttagagggccccctggccctcagggcgatccaggggtgcggggaccggccggtgagaaaggagataggggacccccgggactcgacgggcgctcaggacttgatggaaagccaggcgccgccgggcccagcgggccaaacggtgccgcgggtaaggcaggagaccctggaagggacggcttgcccggactcagaggggaacaaggcctgcccgggccatccgggccacccgggctgccgggtaagccaggagaagacggaaaacctggactgaacggaaaaaacggggagcccggggaccctggagaggatgggcggaaaggtgaaaaaggcgatagcggtgcatccggtcgggaagggcgtgacggcccaaaaggggaaaggggggccccaggtatcttaggtccacagggcccccccggcttgcctgggccagtcggcccgcctgggcagggttttccaggcgtgcctgggggcaccggacctaagggcgaccggggcgaaaccggctccaaaggggaacaaggactaccaggtgagagaggactcaggggcgagcccggatccgtgcccaacgtcgataggctgctggagactgctggtatcaaagcatccgcacttcgcgaaattgttgagacctgggacgaatcctccgggagttttctgccggtccccgagaggcggcggggacccaaaggagactccggcgagcaggggcccccaggaaaagaaggccccatagggtttcctggggagcgaggcctgaagggtgatcggggagacccagggcctcaggggccacctggactggccctaggcgagagagggcctcccggaccatcaggtctagccggagaacccggaaaacccggcatcccaggcctgcccggcagggctggcggggtgggcgaagccggccgtcctggagagagaggggaacggggagagaagggcgagcgcggcgagcagggcagggacgggccacccggactgcccgggactccaggtcctccaggtccccccggaccaaaagtgtcagttgatgaacccggacccggcctttcaggtgaacaggggcctccagggctgaaaggggcgaaaggggagccagggtccaacggcgaccagggaccgaagggtgaccgcggggttcctggaatcaagggagatcgtggggaacctggccccaggggacaggacggcaatcccggattgccgggcgaaaggggaatggctggaccagagggcaagccaggactacagggccccagggggccccccggcccagtgggcggtcacggggaccccgggcccccaggcgcccctgggctggccggacctgctgggccacaggggccttccggcctgaaaggggaacctggagagactgggccccccggtcgcggcctgacaggccccactggcgcggtcggtcttcccggacctcccggaccgagcggcctggtagggccacagggaagccctggtctgcccggccaggtgggagaaaccggtaagccaggcgcaccgggtcgtgatggggcatctgggaaagatggggatagagggagtcctggcgtcccagggagcccaggactgccaggccccgtgggaccaaagggcgaaccaggcccgaccggtgcccctggtcaggccgtggtgggtctgccgggcgctaaaggcgagaagggagcacctggcgggctggctggagatctagttggagagccgggcgcgaagggagatcgcggcttgccgggtcctagaggagaaaaaggggaagccggaagagccggcgaaccaggggatcccggggaggacggccagaaaggggcccccggacccaagggtttcaaaggcgacccaggcgtgggtgttcctgggagccccggcccccctggcccgccaggagtcaagggggacctcggattacccgggctgccgggcgctcctggcgtcgttggctttcctggacagacgggaccacgcggggagatgggacagcccggaccctccggtgagaggggcttagccgggcccccgggccgggaggggatccccgggccgctggggccacctggtcccccagggtctgtgggccccccaggcgccagcggcctaaaaggtgacaagggcgatccaggggtcggcttgccaggcccacgaggagagcgaggggaaccaggcatcaggggggaggacggtagacctggccaggaagggcccaggggcctaaccggcccaccaggttctcggggcgaacgcggagaaaagggcgatgtcggaagcgccggcttgaagggtgacaaaggcgacagcgccgtcatcctaggacccccaggccctcgcggagccaaaggcgacatgggagagagagggcccagagggctcgatggcgacaagggacctcgcggtgataatggcgatcctggagataaaggcagcaagggtgagcctggagataaaggatccgccggattaccagggctgagagggttactcggaccccagggacagcccggtgctgccgggatcccgggcgaccctgggagccccgggaaggacggcgtgccgggaattagaggggagaaaggcgatgttggtttcatgggccccaggggcctgaaaggcgagcgcggggttaaaggagcgtgtggcctggacggcgagaagggcgacaaaggggaagcaggaccgcctggccgtcctggtttggcggggcacaaaggagagatgggtgaacccggtgtacccggacagtcaggggcaccaggaaaggagggcttgatagggcccaagggcgataggggctttgacggacagccaggtcccaagggtgaccaaggcgagaagggagagaggggaacacctgggatcggcggtttcccagggccctccggaaatgacggaagtgcgggacccccgggacctcctgggtctgtgggtcccaggggccccgagggcctgcagggccagaagggcgagagggggcctcctggcgaacgcgttgtcggcgcccctggggtgcctggcgccccaggcgagagaggcgagcagggccggccgggaccagccggcccaaggggcgagaagggggaagccgcgctaactgaagatgatataaggggcttcgtccgccaggaaatgtcacagcactgcgcatgccagggccagttcatcgccagcggatcgagacctttgcctagctacgctgcagacacggccgggtcacagttacacgctgtgcctgttttacgagtctctcatgccgaggaagaagaacgagtgccccccgaggatgatgaatacagcgaatattccgaatactccgttgaggagtatcaagaccctgaggccccctgggattctgacgacccatgcagcctacccctggatgagggctcctgcacagcctataccttgcgctggtaccatcgggccgtgaccggcagcacagaggcctgccaccccttcgtgtacggcggctgcggcggcaacgcgaacagatttggcacccgtgaggcctgtgagcgtcgatgtccacccagagttgtgcagtctcagggcacgggtactgctcaggac

SEQ ID NO: 1500 - DNA, 8832 bp, Artificial Sequence
  derived and/or modified sequence
atgactctgagattgctggtggcagccctgtgcgcaggaatactcgctgaggcaccacgggtgagggcacaacaccgcgaaagggtgacctgtaccaggctgtacgcggctgacatagtgttcctcctcgacggatccagtagcatagggaggagtaactttcgtgaagtgagatctttcctggaggggctggtcctgccattcagcggcgcagctagtgctcagggagtccggtttgctaccgtgcagtacagcgacgatcctcgcactgagttcggactcgatgcactgggctctggaggagatgtgatacgggcaattcgcgagctttcttacaaaggcggcaacaccagaaccggcgctgctatcctgcatgtcgcagaccacgtgttccttccgcaactcgccaggcccggcgttccgaaggtgtgcattctaattactgacggaaagagccaggatctcgtcgacacagcagctcagaggcttaaaggccaaggagtcaagctgttcgcagtcgggattaagaatgcagacccagaagaactgaaacgcgtagcctcacagccaaccagcgacttcttcttttttgtcaacgatttcagcatcttgagaaccctgttgcccttggtaagcaggagggtgtgcaccaccgctgggggagtcccggtcactcggccccctgacgatagcacgtcagccccaagggatctggttctgtcagaacctagcagccagagtcttagggtccagtggaccgctgcctccggtcctgtgacaggatacaaggtgcagtacactcccctaactggcctggggcagcccttgccgtctgaacggcaggaggttaacgtgcctgccggcgaaacctctgtgcggctgagggggcttaggcccctcacagagtaccaggtgaccgttatcgccttgtatgccaatagcatcggcgaagccgtcagcgggacggctaggaccaccgctctcgaagggcccgaattgaccatccagaacacaaccgcccattccctgctggtagcctggagatctgtgcccggagcgaccggataccgtgtaacttggagggtgttgagcggaggaccaactcaacaacaagagctgggcccgggacagggctctgttctgttgagggatcttgaacctggaactgattatgaagtcacagtgtctaccctgttcggacgctctgtgggcccagctacttcgttgatggctcgcaccgatgctagtgtggagcagaccttgcgccccgtgattctgggacccacatctatcctcctcagctggaatctagtgcctgaggcacgtgggtaccggcttgagtggagaagggagacagggctggagccaccacagaaggtggtgcttccaagcgacgtgactcggtaccagctggatggccttcagcccggcaccgagtacaggctgaccctttacactcttctcgaggggcacgaggtcgcaacacccgcgactgtagtccccaccggtccagaacttcctgtgtcccctgtgactgacctgcaagctactgagctgcccggccagagggttcgcgtgtcatggagtcccgttccaggcgctacccagtatcgcatcatcgtcagaagcacgcagggagtcgagcgcactctggtcctccctggaagccagacggcatttgatctggatgatgtgcaggctggcctgagctacaccgttcgtgttagtgctcgggtgggaccccgcgagggaagcgccagcgtgttgaccgttaggagagaacccgaaaccccgctcgcagtcccgggcctgagagtagttgtctccgatgctacccgcgttagggttgcatggggtcccgtgcctggggcatcaggctttcgcatcagctggtcaaccggcagcggacctgaatcttctcagacactccccccagactcaacggctactgacatcacgggtcttcagcctggaaccacataccaagtagcggtgagtgtgctgcgcggccgcgaagaagggccggctgcagtcatcgtggctagaaccgacccactcgggcccgttagaactgtgcacgtgacccaggcatccagctcttctgtcacaatcacttggacccgggtccctggtgcaacaggctacagggtaagctggcactctgctcatggccctgagaagagccagctggttagcggtgaagcaaccgtcgcagagcttgatgggctcgagcctgacaccgaatacacggttcacgtgagggctcacgtggctggcgtggacgggcctcccgcaagcgttgtagtccgcactgctccagagcccgtaggacgcgtttctagactgcagatactaaacgcgagtagcgacgtgcttagaattacttgggtgggagtgacaggggcaacagcctacaggctggcttggggcagatccgaaggaggcccaatgcgtcatcagatcctgccaggcaacaccgattcagctgaaattcgcggacttgagggtggcgtatcatattccgtgagggtgaccgcactcgtgggcgatagagaaggaactcctgtcagcatcgtggtcaccacaccacccgaggcaccgcccgcccttggcacactgcatgtagtgcaaaggggcgagcattcactgcgcttaaggtgggagccagtgccaagagcacagggattcctattgcactggcaacctgagggtggacaagaacagtctcgcgtgcttggacctgagctgagtagttatcatctggatggactcgagcctgctacacagtaccgagtgagacttagtgtccttggacccgctggcgagggcccaagcgctgaggtgacggcccgtaccgagtcacccagggtgccaagcattgaactgcgggtggtcgatacatctatcgattctgtgaccctggcttggactcccgtgagcagggcatccagttacatcctcagttggaggcctttaagggggcctgggcaggaagtcccaggcagccctcagacacttccaggtatctcatcttcccaacgtgtaaccggtctcgagcccggggttagttatatattctctctgaccccagtacttgatggcgtgcggggccccgaggcctcagtgacgcagacgccagtgtgtcctagaggccttgctgatgtcgttttcctaccccacgctacacaagataacgcccaccgcgcagaagccactcgccgtgtgctggagagactggtcctggccctgggcccactgggcccacaggccgttcaggtgggcctcctgtcatattcccacaggccttcacccctcttccccctcaacgggagccatgacctcggcataatcctccagcggatccgcgacatgccttacatggaccccagcggcaacaatctcggaacggctgtcgtgacagctcacagatacatgctggctcccgatgcccctgggcgccgtcagcatgtgccgggggtcatggttttgttggtcgacgagcccctcagaggcgacatttttagtcccatcagggaagcacaagcgagcgggctcaacgtggttatgcttggaatggcgggagcagatccggaacagttacgaaggctggcccctggcatggacagcgtccaaacgttttttgcagtcgatgacggaccctccctggaccaggccgtatctgggctggccacagctctctgtcaggcgtcctttacaacgcagcctagacccgaaccttgccccgtgtactgccccaaaggacagaagggggagcctggcgaaatgggtctccgcggccaagtaggaccccctggtgatccaggacttccaggaaggactggggccccgggcccccagggtcctccgggctcagctaccgcgaagggcgaaagaggatttcccggagcagatggcaggcccggctcacctggacgggccggaaacccaggtactcctggagctccgggcctgaagggctcacccgggctcccaggtcctcggggcgatccaggagagcgcggtccacgcggccccaagggagaaccaggcgcccctggacaggtcataggaggtgagggccccggacttcccgggagaaagggcgatccagggccaagtggaccgccaggcccaaggggacccttaggagaccccggccctagaggaccacccggcttgccaggcaccgcaatgaaaggagacaagggagataggggagaacgggggccgcccggacccggagaaggcggaatcgcgcccggggaaccaggactgcctggattgcccgggagtcccgggccacagggccccgtcggccctcctggtaagaaaggggagaaaggagattcggaagacggagcaccaggcctgcccggtcagccaggttcacctggagagcagggtcccagaggcccgcctggtgccatcggacccaagggtgaccgcgggtttccaggccccttgggcgaagcgggcgagaaaggagaaagaggcccacctggacccgctggctcaagaggactcccaggggtagccggaaggcctggtgccaaagggcccgagggccccccgggaccgactggaaggcagggcgaaaaaggcgaacccggacgacccggggatccagccgtcgtgggaccagctgttgctggcccaaaaggcgaaaaaggagacgtgggacctgccggaccgagaggggctactggagtgcagggcgaacgcgggccgcctgggctcgtgctgccaggcgaccccggccctaaaggcgatcccggcgataggggcccaatcggcctcacaggcagagcagggccacctggcgattcgggccctccaggagagaaaggagatccagggagacctggaccgccaggacctgttggacctagaggtagggacggagaggtgggagaaaaaggagacgaaggacctccgggagaccccgggctgcctggcaaagcaggagaacgaggacttcgaggggctcctggagttagggggccagtgggggagaaaggagaccaaggagatcctggcgaagatggcagaaatggctcaccaggatctagcggtcccaaaggggacagaggcgaacccggaccccctggacctcccgggcgtctcgttgataccggcccaggcgcccgcgagaaaggagagcccggcgaccggggacaggaaggacctagggggcctaaaggagatccagggctcccaggtgctcctggagagaggggcatagaagggtttagagggccgccaggccctcaaggcgacccaggcgtgagaggccctgccggggaaaagggagatcgcggaccccctggattggatggcagaagcggactcgatggcaaacccggagctgctggacctagcggacccaatggagcagctggcaaagccggagatccgggccgagatggcctgccaggactgagaggagagcagggacttccaggaccttcaggtcctcctggcctgccaggcaagcctggagaggatggaaagcccggcctaaatgggaaaaacggcgaacccggcgatcctggcgaagacggaagaaagggagagaaaggagatagtggagcttccgggcgcgaaggaagagatgggccaaagggggaaaggggtgctcccggcattcttggcccgcaagggccaccgggactccctggcccagtgggccctccgggtcaagggttcccaggagtccctgggggcacgggccccaaaggggatcgtggagagaccgggtctaagggtgagcagggacttccaggagagaggggcctccgaggagaacctggctcggtaccaaacgtcgatcgcctgctggagacggccggaatcaaggcttctgccctgagagagattgtggagacctgggatgaaagctctggaagctttctcccagtgccagagcgtaggcgtggacctaaaggggattctggggaacaggggcctcccggtaaggagggacctattggatttccaggggagcgcggtttgaaaggcgatagaggcgatccgggtccacagggaccccccggcctcgcgcttggagagcggggaccccccggcccttccgggcttgcaggcgagcctggaaagcccggcatccccggactgcctggcagggctggcggagttggagaagccggacggcctggagaacgcggagagcgaggcgaaaagggcgagcgtggcgaacaggggcgggacgggccccccggccttccaggcacgcctggcccccctggcccacctggcccgaaggtttcagtcgacgaaccaggtcccggtctgagcggggaacagggaccacccgggctcaagggggcaaaaggcgagcctggctctaacggcgatcaagggccgaagggagaccgcggtgttcccgggatcaaaggcgacagaggcgagccgggaccgaggggccaagacggcaacccgggtttgcccggcgaacgaggtatggctggtcctgagggcaagcccggcctccagggccccagggggccacccggtccagtaggcggccacggagatccgggaccgcctggtgcacctggactggctggtcccgccggcccacagggcccctccggtctgaaaggcgagcccggagaaacagggccccctggaaggggattgacagggcccaccggcgctgtgggacttccaggcccacctggaccttcaggcctggtcggacctcagggaagcccagggctgcccggtcaagtgggcgagaccggcaaacctggggctcccggccgggacggagccagcgggaaggatggagataggggaagcccaggcgtgccgggatcacccggcctgcctggcccagtcggacctaagggcgaacctggccctactggcgcacccggacaggcagttgtcgggctgccgggcgccaaaggcgaaaagggagctccaggcggacttgcaggagacttggtcggagaaccaggagccaagggggatagaggactgccgggccctaggggtgagaagggcgaagcgggaagggcaggcgagccgggagaccccggtgaggatggccaaaagggggccccagggcccaaaggctttaaaggcgacccaggagtcggggtacctggaagccccggtcctcctggacctcccggcgtgaaaggagatctgggcctgcccggactccctggcgctccaggagtggttggattccccggtcagaccggaccacgcggggagatgggccaaccaggtccctcaggtgagaggggccttgccggcccaccggggcgtgaggggatccccggacctcttggacctcctgggccccctggatcagtggggcccccgggcgcatctggacttaagggagacaaaggcgaccctggcgttggcctgcctggccctcgcggagagagaggagagcccggaataaggggagaggatggaaggcccggacaggaaggacccagggggttgactggaccccctgggtcaagaggcgagagaggtgagaaaggtgatgtggggtccgcgggactgaagggagacaagggggactccgcagtgatattgggaccacctggaccacgcggcgcaaaaggcgatatgggagaaagaggcccccgcggcttggatggagacaaaggaccgaggggcgacaatggagatcccggagacaaaggctcaaagggagagccaggagacaaagggtctgccggcctccccggcctgagaggacttctgggcccccaaggccagcccggagcagcaggcatccccggcgaccctggctcgcctggtaaagatggcgtacccgggattaggggcgagaaaggagatgtgggcttcatgggccccagggggctgaaaggcgagaggggtgtcaaaggagcgtgcggcctggatggcgagaagggtgataagggcgaagctggaccaccgggtagacccggactagcaggacacaagggagagatgggtgaaccaggagtgcctggacagtctggcgctcctggtaaagaggggctgatcggccctaagggagatagaggatttgatggacagcctggacccaagggcgatcagggggagaagggggaaaggggcacacctggaatcggcggcttccccggtccgagtggaaatgatgggtctgcaggcccacctggacccccagggagtgtgggcccacgcggccccgagggtcttcaaggccagaaaggcgaaagggggccaccaggagagagggtggtgggcgcacctggcgtcccaggcgcacctggcgagaggggagagcaaggaaggcccggccctgctggccctaggggtgagaagggagaagctgcattaaccgaggacgacatcagaggcttcgttcgccaggagatgagccagcactgtgcatgtcagggccaatttatcgcttccgggtccaggcccctgccctcttacgctgctgacactgcaggttcacaactgcacgctgtccctgtgctgcgcgtgagccacgccgaggaggaggagagagttcctcctgaggacgatgaatattctgaatactccgaatacagtgtggaagaataccaggaccctgaggccccctgggactcagacgacccatgttccctgccattggacgaggggtcctgcacagcatacactctgagatggtaccaccgagcagtaaccggaagcactgaggcttgtcatcctttcgtatacggaggttgcggtggcaatgcaaacagattcggaacacgagaggcatgtgagagacgttgtccacctcgcgtcgtgcaatcacagggcaccggcacggcgcaagac

SEQ ID NO: 1501 - DNA, 8832 bp, Artificial Sequence
  derived and/or modified sequence
atgaccctcagactgctggtggcggcgctgtgcgcgggtattctggctgaagcccccagagtccgggcccaacacagagagcgggtaacctgcaccaggctgtatgccgcggacatcgtttttctgctcgacggatctagctccattgggcgcagtaacttccgcgaggtgaggagctttcttgaaggcttggtcctcccttttagcggagcagcatctgcacagggggttaggttcgccacagtgcagtactcagatgacccgcgcaccgagtttgggctggatgcactaggctccgggggtgacgtgatcagagccattagagaactgtcttacaagggcggcaataccaggacaggagcagctattctgcatgtggccgatcatgtctttttgccacagctggcccgaccaggcgttccaaaagtgtgtatacttatcacagacggtaagtcccaagacctcgtggacacagcggcccagcggttaaagggacagggcgtgaaactcttcgccgtgggaattaaaaatgccgatcccgaggagcttaagagggttgcgtctcagccaacatcggatttctttttctttgtgaacgatttctccatactgcggactctgctccccttagtaagccgacgagtttgtactaccgccggaggtgttcctgtgacaaggcccccagacgattcaacaagtgcccccagggaccttgtgctctcagagccttcttcccaaagcctgcgcgttcagtggacagcagcttccgggcctgttacaggatacaaggtacagtatacaccccttaccgggctggggcagccacttccaagcgagcgacaggaagtgaacgtacccgccggcgagacgtccgtgcggctgcgtggactgagaccactgaccgaataccaggtgacagtgatcgctctgtatgccaatagcataggtgaggccgtgagcggtaccgctaggacgactgctctggaagggcctgaactgaccatacagaacacaaccgcccattcgttgttagtggcgtggcgctcagtacctggcgcaacaggatatagagtaacatggcgcgtgctgagtggagggcccacccaacagcaggagctgggtcccggccaaggcagcgtgctgttacgtgatctggaaccagggaccgattatgaagtgactgttagcacactcttcgggcggtctgtggggcctgcaacgagtttgatggcacgcaccgacgctagcgttgagcagacattaagaccagtgattttggggccaacaagtattctgctgagttggaacctggtgccagaggcacgcggatatagattggagtggagaagagagacgggtctggagcctccccagaaggtggtgcttccgagcgatgtcacgaggtatcagctagatggcctgcagcccggaaccgagtatcgcctcactctctacactctgctggaaggccacgaagtcgcgacaccagctaccgtggtgcccactggacccgagctccctgtgtccccagtcaccgatttgcaagctaccgagctccccggtcaacgggtcagggtgtcctggtcccctgtcccaggggccactcagtacaggatcatcgtgcgttctactcagggcgttgagcgtacactggtgttacccggatctcagaccgccttcgaccttgatgatgtgcaggctggcttgtcctataccgtccgcgtctccgcgcgagtggggcccagggaggggagcgccagcgttctaaccgtaaggcgcgagcccgagactcccctggccgtgcctggactacgcgtggtggtgtctgacgccacacgagtgcgggtggcctggggtccggtgccgggtgcctccggctttcgcatttcttggtctactggcagtgggccagagagttcccagaccttacctcctgactctacggccacagacattaccggcctgcagcccggcacgacttatcaggttgccgtgtccgttctgcgaggtagagaagaaggcccagctgccgttatcgtcgccagaacagatccacttggccctgtccgtaccgtgcacgtgactcaggcgagctcctccagcgttaccattacatggaccagagtgccaggagcgaccggctatagggtgagttggcattctgcccatggccctgaaaaatctcagctggtcagtggggaagcaaccgtggcggaacttgatggactggaacccgacaccgagtacaccgtacatgttcgggctcacgttgcgggcgtcgacgggcctcctgcctcggttgtggtgagaactgcgccagagcccgtcggccgcgtctcacggctgcagatcctgaacgcctcttccgatgtcctgcgaatcacctgggtgggcgtgaccggggcgacagcctacaggctcgcctggggccgttcggagggaggccctatgcgccatcagattttaccaggtaatacggattcagctgaaatcaggggtcttgaaggaggagtttcttactcggtaagggtaacggccctggttggcgacagagaggggacaccagtcagtattgtagtgactacgcccccggaggccccacccgcgctgggtacgcttcatgtggtacaaagaggtgagcacagtcttcggttacggtgggaacctgtgccccgcgcccagggctttctcctccattggcagccagagggtggacaggaacagagccgcgtcctcgggccagagttatcgtcctaccacctggacggattggaacctgccacacagtatcgcgttagactttctgtcctgggaccagcaggagaaggacccagcgccgaggttaccgctcgcaccgagagtccacgagttccaagcatagaattaagagtggtcgatacatcgatcgacagcgttaccctagcatggactcctgtgagtcgtgcctccagctacattttatcctggcggccattgaggggcccgggacaggaggtcccaggcagcccacagacactgcccggaattagtagcagccagcgtgtgactggcctcgagcccggagtctcctacatcttttccctgacccccgtactggacggagttcgcggccccgaagcatccgtcactcagacacctgtgtgtcctagggggctggcagatgtggtttttttgcctcacgcgactcaggacaacgcccaccgagccgaggcaacaaggcgagtactggaacggctggtgctcgcactggggccgctggggccccaggctgtgcaggttggactgctgtcctacagccatcgaccttcaccactgtttcctttaaatggttctcacgatttaggtattatcctccagcggatccgagatatgccgtacatggacccctctgggaataacttaggcaccgccgttgtgactgcacatcgatacatgctggcaccggacgctccaggcagaagacaacatgtgcctggtgtgatggtgctcctggtggacgagcctctgcgcggcgatatctttagccctatccgggaagctcaggcgagtggtcttaacgtcgtgatgctgggcatggccggtgcggatcccgagcagctgcggcgcttggcacccggaatggattcggtgcagactttcttcgctgtcgacgatggcccctcgcttgatcaggctgtaagtgggctggctactgctctgtgtcaggcgtccttcactacacagccccgacctgagccttgccccgtttactgtccgaagggacagaagggtgaaccaggcgaaatgggtttgcggggtcaggtcgggccgcccggtgaccccgggcttccagggcgaaccggcgctccagggccgcaagggccgccaggttcagccaccgccaaaggagagcgcgggttcccgggggctgatggcaggcccggctcccctggccgcgctggaaatcctgggaccccaggggcgcctgggttgaagggatcccccggtcttcccggtccccgcggcgaccccggggagcgcgggccccgcggacctaagggagagcctggcgcgcctggccaggttattggaggcgagggtccaggcttgcccggccgcaagggggacccgggaccaagcggccctccggggccacgggggcctctcggcgatcccggccccagggggcctccagggctgcctggcacagctatgaaaggtgataagggcgatcggggagagagaggtcctccaggaccaggggaagggggcatcgcgcctggagagccagggctgcctggacttcctgggagccccggtccccaggggccagtcggaccacccgggaagaaaggggagaaaggagatagcgaagatggcgcccctgggcttccaggtcaacccggatcaccaggtgagcaaggacctcgcggacctcctggcgccattggacctaagggggatagaggcttcccaggcccattgggcgaggccggcgagaagggggagcgagggcctcccggccccgctggcagtaggggcttgcctggagtggcaggccgtccaggagctaaggggcccgaagggccaccaggccccacaggaagacagggagaaaagggcgaaccaggacgaccaggagatcctgctgtagtgggtccagccgttgcaggtcctaagggagaaaagggagacgttggccctgcagggcctcgaggagcgaccggcgtgcagggtgagcgcggccccccagggttggttctgccgggagatcccggaccaaagggtgacccaggcgaccgaggcccaatcggtctgaccggacgcgccggtccaccgggagatagtggtccgcctggcgaaaagggagacccggggaggccggggcccccaggcccggtcggccctcgaggccgcgacggggaggtgggcgaaaaaggggacgagggaccgccaggagacccaggcctccccgggaaggcaggagaaagagggctcagaggcgccccgggcgtgcgtggaccagtgggggaaaagggagatcagggagaccctggagaagatggccgcaatggaagccccggctcatcagggccaaaaggcgataggggcgaacccgggccgcccggtcctcctggacgcttagtagacacagggcccggggcaagagaaaagggcgagcccggcgatagggggcaggagggacccagaggacctaaaggcgatccaggcctccccggcgcccccggcgaacgcggaattgaaggtttcaggggaccacccggcccccagggggatccaggagtgaggggaccggccggggagaaaggagacaggggccccccaggactggatgggagatcagggctggacggcaaacccggcgcagccggaccgtctggcccgaatggagcagccggcaaggcaggagaccccggtcgggacggcctgcctggtttgaggggagagcagggcctgccaggaccgtcggggccgccaggacttcctggcaaacccggggaggacggtaaaccaggactcaatgggaaaaatggggaacctggggaccctggtgaggatggtcgaaagggagaaaagggcgatagcggagcaagcggcagggaaggccgcgatggccccaagggcgagagaggagctccaggaattttaggtcctcagggaccaccgggcctgcctggccccgtgggtcctcctggccaggggttccctggagttcccgggggcacgggccccaagggagacaggggcgaaaccggaagcaaaggagaacagggactgcccggtgagcgcgggctgaggggtgagccaggttcagttcctaatgtggacaggctgcttgagaccgcagggatcaaagctagtgcactgagggagattgtggaaacctgggatgagtccagcggaagcttcctccccgttccggaaaggcggcgtggaccgaagggagattctggggagcagggaccgccaggcaaagaggggcccatcgggtttcccggagaacgtggactgaaaggtgatcggggtgacccaggacctcagggccctcccggtctcgccttaggcgaacgggggcctcccggcccttccgggcttgccggtgagcccggtaaacctgggatcccaggacttccaggacgggctgggggagtgggggaggccggccggcccggcgaaaggggagagaggggagagaaaggcgaacggggggagcagggacgagatggacccccaggactacctgggacacctggtcctccaggccctcccggacctaaagtcagtgtagacgaacctggccccggactcagcggcgagcagggacccccagggctgaaaggggcgaagggagaacctggctcaaacggcgaccaaggaccaaaaggggatcggggggtgccggggatcaaaggagacaggggtgaacccgggccccggggccaggacggtaaccccgggttgccgggagagcgggggatggcagggccggaagggaaacctggattacagggccccaggggtcctccagggcctgtggggggacacggagaccccgggccaccaggtgccccgggactcgccgggccagccggtccccagggcccgagcgggctaaaaggggagccgggcgagaccggccctcctgggagaggcctgacagggccaaccggggccgtgggattgccgggaccccccggacctagcggcctcgtgggcccacagggttctccagggctcccgggccaagtcggcgagactggcaagccgggggccccaggaagggacggagccagcggaaaggatggcgatcgaggctctccaggggtgcccggctctcctggactgcccggacccgtggggccaaagggtgaacccggtcctacaggcgcgccagggcaggcggtggtgggactccctggcgccaagggggaaaagggagccccaggggggttagctggtgatcttgtaggagaacctggggccaagggtgatcgcggacttcctggccctcggggcgagaagggggaagccggccgggctggagaaccgggcgatccaggcgaggatggacagaagggggctccagggcctaagggcttcaagggggaccctggagtaggagtgcctggaagccctggaccccccggacctccaggtgtaaaaggcgacctcggtctgcccggcttgccaggggcccccggcgtggtgggatttcccggccagacaggcccacgaggcgaaatgggacaacccggaccatcaggggaaagagggctagctgggcccccgggccgcgagggcattccagggccactaggacccccggggccgccgggctctgttggaccccctggggcttctggccttaagggagacaaaggcgaccctggtgtaggactccccggaccgagaggcgaaaggggggaacctggaatacggggcgaagatggccgtcctgggcaggagggccccaggggcctgacagggccacccggctcccgaggcgagagaggagaaaaaggcgatgtaggctcagcaggcctgaaaggggacaagggggatagcgcagtgatcttgggtccaccgggccctagaggtgccaaaggggacatgggagagcgcggaccacgtgggctcgacggagacaagggacctcggggggataatggggaccccggagacaagggcagtaaaggtgaacccggagataaagggagcgccggcttgccgggattgagggggctgctgggaccacagggacaacccggggctgcgggcatccccggggaccctgggagtcctggcaaggatggtgtgcccgggatcagaggggagaaaggggatgttggattcatgggtcctcgcggactcaaaggggaacggggggtcaagggtgcttgcggcttggacggcgagaagggcgataaaggggaggctggccctcccggcagacctggtctggccggacacaaaggcgagatgggcgaaccgggcgtgccagggcagagtggcgccccaggaaaagagggactgattggccctaaaggcgacaggggttttgacggtcaaccgggccccaaaggcgaccagggtgagaagggggagcgcgggacaccgggcattggcggcttccccggtccatcgggcaacgacggatcggcaggacctcctggccctccaggatctgtgggccccaggggcccagagggtttgcagggccaaaagggggagaggggaccccctggggaaagagttgtgggtgcaccaggggtacctggagcgccaggagagaggggggagcaggggcgaccaggccctgctggaccgagaggcgagaagggagaagctgccctgacagaggatgatattagaggatttgtacgacaggagatgtctcagcattgcgcctgccagggacagttcattgcaagcggcagcaggcctttacccagctacgccgccgacaccgcgggtagtcagctgcacgctgtgccagtgcttagggtcagccacgccgaggaggaggaaagagtgcctccagaagatgatgaatatagcgaatactctgagtattctgtggaagagtaccaggatccagaggccccctgggattcagacgacccttgctccctgccgcttgacgagggcagctgtactgcgtacaccctacgctggtaccaccgcgccgttacgggatcaacagaagcctgtcacccttttgtgtacggaggctgcggcggaaatgcaaaccggttcgggacgcgcgaagcgtgtgagcggcggtgtccacccagggtcgtgcagtcacaggggactggcaccgcccaggac

SEQ ID NO: 1502 - DNA, 8832 bp, Artificial Sequence
  derived and/or modified sequence
atgaccctgaggcttcttgtcgcggcgctgtgtgcaggaattctcgcagaagcgcctcgggtcagggcacaacacagggagcgcgtgacctgcactcggctctacgccgcggatatagtgttcttgctcgacggctcatcctcaataggcagatcaaactttcgcgaggtgcgctcatttctggaaggactggtgcttcccttttcaggtgccgcaagcgcacagggggtccggttcgccactgtccaatatagcgatgacccccgtaccgaatttggtttggacgctctgggatccgggggtgatgtgattagagccattagagagctttcatacaagggagggaatactcgcactggggctgcgattcttcatgtggcagatcatgtgtttctgcctcagcttgcgcgccctggagttcccaaggtctgtatcctcattacggacggtaagtcgcaagatctggtcgacacggcagctcagagactcaaaggacagggggtgaaactttttgcagtaggaattaagaacgctgatccagaggaactcaagagagtagcaagccagcctacttccgactttttcttttttgtgaacgattttagcatcctccgaactctgttgccgcttgtgagcagaagggtgtgtaccactgcaggcggggtgcctgtcactagacctccagatgattcgacgtcagcaccacgcgatctggtgctgagcgaaccaagcagccagtcgcttagagtgcagtggactgcagcctccggccccgtgaccggatacaaggttcaatacactccactgactgggctcggacagccacttccaagcgaacgccaagaagtgaacgtgcctgcaggtgaaactagcgtcagacttagagggctgaggccgctgaccgagtaccaggtgaccgtcattgccctgtacgcaaattccattggagaggcagtttccggaaccgcacggaccaccgccttggaaggtccggaacttactattcaaaataccactgcgcattctttgttggtggcttggcggagcgtcccaggagcaacgggttacagagtgacgtggcgagtcctttcaggaggacctacccaacaacaggaactgggacctggtcaaggctcggtccttcttcgggatctggagcctggaaccgattacgaagtgaccgtgtcaaccctgttcggacgctcagtggggcctgcaacttcgcttatggccagaactgatgcaagcgttgaacagactcttagaccggtcatacttggtcctacttcaatactcctttcgtggaacctcgtccctgaagcaagaggttaccggctcgaatggagacgggaaactgggctggaacctccacagaaggtggtgcttccttccgatgtcaccaggtaccagctggacggattgcaacccgggaccgaataccggctgaccctgtatactcttctcgagggccatgaggtggcaacccctgcaacggtcgtgcctaccggaccagaactccctgtgagccccgtcaccgatctgcaggccaccgagctgcctgggcagagagtcagagtttcgtggagcccggtgcccggcgcaactcaataccgaattatcgtccgctccacccaaggcgtggaacggacgctggtgttgccaggaagccagacggctttcgatctggatgatgtgcaagcaggactctcgtacactgtccgggtgtcagcacgcgtgggaccgcgtgagggtagcgcatccgtcttgactgttagacgagaaccggaaacgccccttgccgtgcccggacttagggtggtcgtaagcgatgccacgcgcgttcgcgtggcgtggggacctgtgcccggagcaagcggcttcagaatttcatggtcgactggatccggtccggagtcctcgcaaactctgcctccagatagcaccgcaactgacatcaccggactgcaaccaggtaccacttaccaagtggcagtgtctgtcctgagaggccgcgaggaaggacctgcagcggtgattgtggcaaggactgacccactgggccctgtccggacggtgcatgtgacccaggcgtcctcgtcctccgtgaccatcacttggactagagtgccgggagcgaccggctaccgcgtgtcctggcattcggctcatggtcctgagaagtcccagctggtgtctggtgaagcaaccgtggccgaacttgacggtctggagcccgataccgaatacactgtccacgtgcgcgcacatgtggcaggagtcgatgggccccctgcatcggtcgtggtgaggaccgcaccagagcccgtcggtagagtttcgcggctgcagatccttaacgcttcgtcggacgtgctgcgtattacgtgggtgggagtaactggtgccaccgcctatcgcctggcatgggggagatccgaaggtgggcctatgcgtcaccaaatacttcccggaaatactgattcggccgagatccgcggattggaaggcggcgtgtcgtactcggtgagagtgaccgccctggtcggagatcgcgagggtacccctgtctccatcgtggtgaccacgccccctgaagcacctccagcacttggaactctgcatgtggtgcaacggggtgaacattcgttgcggcttcgttgggagccagtgcctcgtgcacaagggtttctgcttcattggcaacctgaaggaggacaggaacaatcacgtgtgttgggtcctgagctttcgagctaccacctggacggactggaacctgctactcagtacagggtcaggctttcggtgctcggcccggcaggggagggaccatcagcggaggtgaccgcgcgaaccgaatcacctcgcgtgccgtcgattgagctgcgtgtggtggatacttcaatagattcagtgactctcgcatggactccagtctccagagcatcatcctacattctgtcgtggaggccactgagaggacctggacaagaggtgcctggatcgccacaaactctgccaggtattagcagctcacaaagggtgaccggtctggaacctggagtgtcgtacattttcagtcttacgccagtgctggatggagtgcgcggccccgaggcctccgtgactcaaacccccgtgtgtccaaggggcctggcagacgtggtctttttgcctcacgcaacccaggataacgcacatcgtgcagaagctactcgacgtgtgcttgaaagactcgtgctcgcactgggccctctgggacctcaggcagtgcaggtcggtctgctgtcctacagccacaggccctcaccactttttcctttgaatggatcccacgacttgggcatcatcctccaacgcattcgggacatgccatacatggacccgtcaggcaacaaccttggtactgcagtcgtcactgcccaccggtatatgctggcccccgacgccccgggcaggcgacaacatgtccctggagtgatggtgctgctcgtggacgaaccacttaggggcgacatcttttcacctattagggaagcccaagcgtcgggacttaacgtggtcatgctgggcatggctggtgccgatccagagcagctgcgacgactggcacctggcatggattccgtgcaaacctttttcgcagtggacgatggaccctcgctggatcaagctgtgtcagggttggccaccgctttgtgccaagcatccttcaccacccaacctcgcccagaaccttgtccagtgtactgtcccaaggggcaaaagggagagcctggggaaatgggtctgcgtggccaggtgggtccgccaggtgacccaggccttcctggtcgcaccggagcaccagggcctcaagggcccccagggtcggctaccgcaaagggagaacgcggatttccaggtgcagatggtcggccaggatcacctggtagagccggtaacccaggcactccaggggcacctggattgaaggggtcgcctggactgcctggaccccggggggacccaggcgaacgcggtcccagaggacctaagggagaaccgggtgccccaggacaggtgattggaggtgaaggcccaggtttgccaggaaggaagggcgatccaggcccgtcgggaccaccgggacccaggggtcctctcggggaccccggcccgcggggcccacctggtttgcccggtacggcaatgaagggtgataaaggggatagaggtgagcgtggccctcctggacccggtgaaggaggaattgcccccggagaacctggactgcctgggctccctggatcgcctggtccacaaggacccgtgggcccccctggaaagaagggagaaaaaggtgatagcgaggatggcgcgcctggtctgccaggccaaccgggatcccctggagaacagggacctagagggcctcccggagcaatcggccctaagggagatcgcgggtttcctggtccactcggagaggcaggggaaaagggagaacgcggcccacctggacctgcagggagccgtggactgcccggagtcgccggacgaccgggcgcaaagggacctgagggtcctcccggaccaaccggacgccaaggggagaagggtgaacccggtagacccggcgacccagcagtggtgggaccagcagtggcaggaccaaaaggagaaaagggggatgtcggacctgctgggcctcggggcgctaccggagtccaaggcgaaagaggccctcctggactggtgctgcctggagatcctggccccaaaggagatcccggcgacagaggtcctattggattgactggtcgcgcaggccctcctggagactccggaccacctggtgagaagggggatcctggccgccctggcccacctggaccagtcgggccaaggggaagagatggagaggtcggagaaaagggagatgaaggaccccccggtgatccaggactccccgggaaagcaggtgaaagggggcttaggggcgcacctggagtgagaggtcctgtgggagaaaagggtgaccaaggagatcccggagaggatgggagaaatggttcgcctggttcctcaggtccaaagggagatcgaggagaacccggaccacccggtccccccggccggctggtggacaccggtccgggtgcaagggaaaagggagaacccggagacagagggcaggaaggtccgcggggacccaagggtgaccccggattgcccggcgcccctggcgagcgcggtattgaaggatttagaggtcctcctggtcctcagggagatccaggtgtgcgcgggcccgccggcgagaagggcgataggggaccacccggactggatggacgcagcggcctggacggcaagcccggagccgcaggtccttcaggacctaatggcgcagccggaaaggcgggggatccggggcgtgatgggctgcctggacttagaggcgagcaaggactccccggaccgtccggcccccctggacttccaggcaagcccggcgaggacggtaaacctggtcttaatggaaagaacggtgagcccggggaccctggtgaggacggtaggaagggggaaaaaggtgattcgggagcatccggaagagaaggcagagacggccccaagggagaaaggggcgcccctggaattctggggcctcaaggtcctcctgggctcccaggtcccgtgggtccgccaggacaaggatttcctggcgtcccaggaggtactggacccaagggagatcgtggagaaaccggctcgaagggagaacagggacttcctggcgaacgagggctgcgaggagaacctggctccgtcccgaacgtggaccgtctgctggaaaccgccggtattaaggcgtcagccttgcgagaaattgtggaaacgtgggatgaaagctcgggctctttccttcctgtgcccgaaagacgccgcggaccaaagggagattccggcgagcaaggccctcctggaaaggagggtcctattggattccctggcgagagaggccttaagggcgatagaggtgacccgggtccacaaggacctcccggcctggccctgggggagcgcggacctcctggtccttcgggtctggcgggagagccaggaaagccaggaattcctggcctgccgggtcgagcaggcggggtgggcgaagccggacggcccggcgagaggggggagcggggtgagaagggagaacggggagaacaaggtagagacggacccccaggccttccaggcacccctggaccgccaggtccaccgggccctaaggtttcggtggacgaacctgggccaggtttgtccggtgaacagggacctccagggcttaaaggtgccaaaggggagcctggcagcaatggagatcaaggaccaaagggagatcgaggagtgcctgggattaaaggggaccgaggtgagcctggccctagaggtcaagatggtaaccctggccttccaggagagcgcggtatggcagggcctgaaggaaaacctggtctgcagggacctcgcgggcctcctggcccagtcggaggccatggcgaccctggacccccaggagctcctggcctcgcaggacctgccggccctcaagggccttccggcttgaaaggagagccaggggaaaccggaccacctggacgcggtcttaccggaccgaccggggcggtgggattgccggggcccccaggtccatcagggcttgtgggaccacaagggtcgcccggccttccaggacaggtgggagaaaccggtaaacctggtgcgccgggccgagacggagcatccggtaaagatggcgacagaggtagccctggagttcctggatcccctgggcttcctggaccagtgggtccaaagggagaaccaggacctaccggtgccccgggtcaagccgtcgtgggactgcccggtgcaaaaggagaaaaaggtgcacctgggggactggcaggggatcttgtcggggaaccaggagcaaaaggcgaccgcggtctgccgggtccacgtggagagaagggagaagcgggacgtgcaggagaaccgggcgaccccggagaggatggacagaagggagcaccaggacctaaggggtttaagggcgatccaggcgttggagtccccggatcgccaggtcctccaggccctcccggtgtcaagggagatctggggttgcctggccttcctggagcaccgggtgtggtgggtttccctgggcaaactggccctagaggtgaaatgggtcagccgggaccatcgggtgaacgtggcctggccgggccaccaggtcgggaaggcattcccgggccactcggacctcctggcccgcctggttcggtgggtccccctggtgcaagcggtcttaaaggggacaagggtgacccaggagtgggtctgccaggacctcggggtgaacggggagaacccggcattcggggcgaggacggtagacccggccaagaaggaccacggggcctcactggacctcctggttcgcgcggtgagcgcggagaaaagggagacgtcggatcggccggattgaagggagataagggggattcggccgtgatcctggggcctcctggcccgcggggcgcgaagggcgacatgggagagcgcggtccacggggtcttgatggtgataaagggcctagaggagataacggcgacccaggtgacaagggctccaagggtgaacctggggataagggttccgcaggactgccaggcctccgtgggctcctgggaccgcagggacaacctggagccgcgggaatccctggagatcctggaagcccaggtaaggatggagtgccaggtattcgcggagaaaagggagatgtcgggtttatgggacctcgagggcttaagggggagcgcggggtgaagggagcatgcgggctcgatggggaaaagggcgacaagggggaagccggtccacctggcagacctggactcgcagggcacaagggagagatgggtgaaccgggggtgcctggtcaatccggcgctcctggtaaggagggacttataggacctaaaggagatcgtgggttcgatggacaaccgggacctaagggggatcagggtgagaagggagaacggggtacccctggcatcggggggtttcctggcccaagcggaaatgatggatccgcaggcccgccaggtcctccaggatcagtgggaccacgagggccggaaggactgcagggacaaaagggggaaaggggacctccaggcgaaagagtggttggagcaccaggagtccctggtgctccgggcgaaaggggggagcaaggcagacccggccccgcaggaccaagaggagaaaagggcgaagcagcactgaccgaggatgacattcgtggcttcgtccggcaagaaatgtcgcaacattgtgcttgccagggtcagtttattgcctccggctctcgccctctgccatcctacgcagccgatactgccggtagccaacttcatgccgtgcctgtgctccgggtatcgcatgctgaagaggaggagcgcgtcccacccgaggatgatgaatactcagaatactcggaatactcggtggaagagtaccaggatcctgaagcaccttgggattcggacgacccatgttcgctcccacttgatgaaggttcctgtactgcgtacacccttagatggtaccaccgcgccgtgactggttcaactgaagcctgtcaccctttcgtttacggaggatgtggaggcaacgccaacagatttggcacccgcgaggcatgtgaaagacgctgtccaccccgtgtcgtgcagtcacagggaacgggaactgctcaagat

SEQ ID NO: 1503 - DNA, 8832 bp, Artificial Sequence
  derived and/or modified sequence
atgactctcagactcttggtcgcagcgctatgcgctggtatactagccgaagccccacgagtgcgtgcacagcatcgcgaacgtgtaacttgtacccgcctgtatgcagcggacattgtttttctcctggatggcagcagttccatcggcagaagcaacttcagggaagtccggtcatttcttgaaggtctcgtgttgccattctcgggggccgcgtctgcgcagggcgtccggtttgccaccgtgcagtatagtgacgatcccaggaccgagttcggattagatgcactcggctcgggaggagatgtgatcagggcaattagagagctgagctacaagggcggaaacacaaggactggcgcggcaatactccacgttgccgatcacgtgtttttgccccagcttgcacggcctggtgtgcctaaggtttgcatcttgattaccgatggaaagtctcaggaccttgtggataccgccgctcagcgcctgaagggacagggggttaaacttttcgccgttgggataaagaacgctgacccggaggaactgaagagggtggcatcccaacccacatccgacttcttcttcttcgtgaacgatttctcgatactgcgaacattattgcctcttgtcagtcggagggtctgcacaacggcgggcggggtgcctgtcaccagacccccggatgatagcacctctgcaccacgcgacttggtgttgagtgaacccagcagtcagagcctgcgggtgcaatggactgccgcgagcgggcccgtgacaggttacaaagtccagtataccccgctgaccggactaggtcagccactgcccagcgagaggcaggaggttaatgtgcccgccggcgagacgtccgtgcggctcagggggctgcgcccactaacagagtaccaagttacggttatcgccctgtacgctaactccatcggcgaagccgtgtcaggaaccgccaggactaccgcccttgaaggccccgaactgacgattcagaatacaacagcgcactcccttctggtggcttggcgctccgtgccgggagctacaggataccgcgtcacatggcgcgtgttgtctggaggacccactcagcagcaggagctaggcccaggccagggtagtgtgctcctgcgggacttggagccaggaaccgactacgaggtcacagtgtcaacactcttcggaagatcagtcggacccgccacgtcccttatggccaggaccgacgcatctgttgagcagacgttgagaccagtgatccttggtcccacctccatcctgttatcatggaatttggtcccggaggcgagaggctaccgattagaatggagaagggagactggtcttgagcctcctcagaaggtggtgctcccaagcgacgtcacacgttaccaattagacggcctgcaacctgggacggagtatagactgacgctgtataccctgctggagggccatgaagtggccaccccagcaactgtagttcccacgggacccgagctgcctgtttcacccgtgacggacctgcaggcgaccgagcttcctgggcagcgcgtgcgggtgtcctggagtcccgtgcctggggctacgcagtacaggattatcgtgcggagtacccaaggagtggagcgaacactggtgctgccaggttcacagaccgcatttgacctggatgacgtccaggctggtctgtcttataccgtccgagtttccgcccgagttgggccccgggaggggtccgccagtgtcctgacggtcaggagggagccagaaacacctcttgcggtgcccggactgagggtggtcgtgtccgatgccactcgcgtcagagtggcttggggccctgtcccgggggcatcaggatttagaatttcgtggtcaacgggatcagggcccgagagttcgcagacgctgccccccgatagcacagctaccgatattacaggcttgcagcctggcacaacataccaggtggcagtgagcgtcttaagggggcgcgaggagggccccgccgcagtgatcgtagcacgaaccgaccccctggggccagtgcgtaccgtgcacgtgacccaggcctccagcagctccgtgacaatcacttggactagggtccctggtgccacaggataccgtgtctcctggcacagcgctcatggtccggagaagtcgcagctggtcagcggggaggcgaccgtggccgagctcgacggactggagcccgataccgagtataccgttcacgtgagagcgcacgtggcgggcgtggatggcccccccgcctctgtggtggtacggacagcacctgaaccggtgggcagggttagccgattacaaatactgaatgcgtcttctgatgtgctgcgcatcacctgggttggagtgactggcgccaccgcctacaggctggcttggggaaggagtgagggaggcccaatgcgacatcaaattctacccggaaacaccgattccgctgagatccggggcctcgaggggggcgtgtcctatagcgtgcgcgtgacggccctggtcggcgacagggagggcacaccagtgtctatagtcgtgacgacgccgcctgaggcgccccctgctctggggactctgcatgtggtccagcgaggggagcactccctaaggttgcgatgggaacccgtgccaagagcacagggcttcctgttacattggcagcctgaaggcggccaggagcaaagtcgggttcttggacccgaactctcatcttaccatctcgatgggctagaacctgcaacacaatacagggtcaggctgtctgtcttgggtcctgccggagagggtcctagtgccgaggtgacagcacgcacagagtcgccccgcgtcccaagcattgagctgcgagtggtcgatacgagtatcgattccgttactctcgcctggacccctgtgtcgcgagcgagctcctatatactgtcttggcgccctttgcggggccccgggcaagaggtgccaggatctcctcagactctgcccgggatctcctcctcccaacgtgtaaccggtctggagcccggtgtctcttacatattctctcttacgccggtgctcgatggagtgaggggacctgaggcatccgtcacccagacgccggtgtgccctagaggcctcgccgatgtcgtgttccttccccatgccacccaggataatgctcaccgtgcagaggccacacggagggtgctggaacgcttggtactagcactggggccactgggcccacaggcagtccaggtcgggctgctttcctacagccatcgacccagccccctgttccccctcaacggaagtcatgacttggggatcatcctgcagaggatcagggatatgccatatatggacccgagcgggaataatctgggaacagccgtagtgaccgcccacagatacatgttggcccctgatgcccctggacgcagacagcacgtccctggggtaatggtgcttctcgtagacgagccactgcgcggggacatattttcccctatcagagaggcgcaagcctccggtctcaatgtggtgatgctgggtatggcaggagccgatccggagcaacttcggcgactggcaccagggatggattccgtccagacctttttcgcagtggacgatgggcccagtctagaccaagccgtgtccgggcttgcgactgccctgtgccaagcatcctttacaacacaacctagacctgagccttgcccagtgtactgcccaaagggccaaaagggggaacctggcgaaatgggactccgaggacaagtgggccctcctggcgatccagggctaccaggacgcacgggcgcacccggaccacagggaccaccaggtagcgccacggcaaaaggagagcgcggatttccaggtgccgacggtcgtcccgggtccccgggccgggccggcaacccagggaccccaggagccccggggctgaagggctctccaggcctcccaggccctaggggtgacccaggtgaacgagggccccgcggcccaaaaggcgagccgggtgcgccgggccaggtgatcggaggggagggccccggtttgcctggccggaagggcgatccgggcccttctggccctcctggcccacgcgggcccctgggagatcctggaccgcgagggccgccgggccttccaggaaccgctatgaaaggcgataagggagatcgcggcgagagagggccacccggcccaggggaaggcggcatagccccgggagagccagggctgccaggtctgcccgggagccctggcccgcaagggcccgtgggacctcctggcaagaaaggcgagaagggagattcagaggacggtgcccccgggctgccaggccagccgggcagtcctggcgagcaagggccacgcgggcctcctggcgcaatcggccccaaaggagaccggggatttcctggccccctgggcgaggcgggggagaaaggggagaggggacctccgggcccggcagggagccgaggtttacctggagtggccggacgacctggcgccaagggacctgagggtcctcctggtcccacggggaggcagggtgaaaaaggggaaccaggacgtcccggggatcccgcagtggtgggtcccgcagtggctgggcccaagggtgaaaagggggatgttggtccggctgggccaagaggcgcaaccggggtccagggagaaaggggccccccgggcctggtcctgccaggggatccggggccaaaaggggatcctggagatcggggacctataggtctgactgggcgggccggtccacctggcgattcagggccaccaggggaaaagggtgaccctggaaggcctggtcctcccggacctgtcggtcccaggggacgtgacggcgaggtgggggagaagggggacgaaggtcctccgggggatcccggcctccccggcaaagccggcgaaagaggattgcggggggcacctggagtacgagggccggtgggcgaaaagggagaccagggcgaccccggcgaagacgggcgaaacggcagccctggcagtagcggtccaaaaggggatcgaggtgaaccggggccacccggtccgcctggacgcctcgtggatactggacctggggctcgggagaagggagaacccggtgacagagggcaggagggacctaggggacccaagggcgatcctgggctgcccggggcaccaggcgaacgcggtatcgaaggctttcgaggacctcccggcccacaaggggatcctggcgttaggggacctgcaggagaaaagggcgatagaggcccacctggcttggatgggagatcaggattggatggcaaacccggcgcggccggtccatcaggaccaaacggtgctgccgggaaggccggcgacccagggagggacggactgcctggactcaggggcgaacagggtcttccgggaccctctgggcctcctggcctgccaggaaaaccaggggaagacggcaaaccaggactgaacggcaagaatggcgagcccggcgaccctggggaggatggaaggaaaggagaaaagggcgacagcggggcctccggacgcgagggccgagacgggccaaaaggggagcgaggcgctcctggcatactgggcccacaggggcctccaggtctgcccggccctgtgggtcccccggggcaagggttccctggcgtccccgggggcactggcccgaaaggagaccgcggggaaactggctccaagggtgaacagggactcccaggtgaacgggggttgcgaggcgaacctgggtccgtgcccaatgtggacaggctgctggagactgcgggcatcaaggcatccgccttaagagagatcgtcgaaacttgggatgagtcttccggctcatttcttccagtgcccgagaggaggcgtggccctaagggcgacagtggcgagcaaggtccgccgggcaaagaagggccaatcggattcccgggcgagcgtgggctgaaaggtgatcgaggggatcccggaccccagggacccccaggactcgcactgggagaacgggggccccctggaccttcggggctggccggggagcctggcaaacccggaatcccgggcctacctggcagggccggcggagtaggagaagccgggcggcccggcgagcggggggagcgtggggaaaagggcgagcgaggagagcaaggacgggacggccctcccggactgccgggtacaccagggcctccaggtcctcccggacccaaagtgagcgtggacgagcctggccccggcctgagcggagagcagggccctccagggctcaagggcgccaaaggtgagcccggcagtaatggggaccaggggcctaaaggagaccgcggcgtcccaggcatcaagggagatagaggtgagcccggaccacgaggccaggacggcaacccagggctcccaggggaaagaggaatggctggcccagaggggaagcccggcctccaaggcccccggggaccgcccggccccgtgggtggccacggggatccgggtccgccaggcgcacctgggcttgcgggccccgccggccctcaggggccttctgggctgaaaggggagcctggcgaaaccggcccaccagggcgggggctaactgggcccaccggagccgtgggtttgccgggtcccccaggtccctctggacttgtagggccccagggctcacccggcttgccgggacaggtcggcgagaccgggaagcctggggctcccggccgtgatggggcctctggcaaggacggggaccggggctctccgggggttcccggtagtcctggcttgcccggccccgtcggccccaaaggcgagcccggccctactggcgcgcccggacaggccgtggttgggctccccggagcgaagggcgagaaaggagcccctgggggactggcgggtgatctggtaggcgaaccaggcgccaagggagatagggggctccccggaccccgaggggaaaagggcgaggcgggtcgggccggagaaccgggggatcctggcgaggacggtcagaagggtgcgcccggacctaaaggcttcaagggcgatcctggagtgggcgtgccaggtagtcctggaccgccgggcccgccaggcgtgaagggtgacctggggctgcctggtctgccaggtgcaccgggtgtcgtgggattccccggacagacgggcccacggggagagatggggcagcccgggccctccggcgagcggggactggctggcccacctggcagggagggcattccgggtccactcgggccccctgggccgccaggctccgtaggcccacccggcgcatcaggactgaagggggacaagggtgatcctggcgtcgggctaccaggaccaaggggcgagcgcggggagcctggcataaggggtgaagacggtcgccctggccaggaaggaccccgtgggttgaccggccccccaggaagccgcggagagcggggagagaagggggacgtcggttccgcgggactcaagggcgataagggagacagcgcagtgatccttggccctcctggtcccagaggcgccaaaggcgacatgggggagcgcggacctagagggcttgacggcgacaaaggtccacgcggcgacaatggagatcctggcgataaaggctccaagggagagcccggggacaagggtagtgctggactgccagggctccgcggtctgctgggccctcagggccagcccggggccgctgggatcccaggcgatcctggaagccccggaaaggacggagtaccaggcatacgcggcgaaaaaggagacgtcggcttcatggggccccgaggcctgaagggggagaggggagtgaagggcgcctgcggactggatggagaaaagggtgataagggggaagcagggcctcctgggcgaccaggtctggcaggacataaaggtgaaatgggggaacccggcgtccccggtcagagcggggctcctggcaaggaggggcttataggccctaaaggagacaggggattcgatggacagcccgggccaaaaggcgatcaaggcgagaagggcgaaagaggcacgcctggaatcgggggtttccctggaccaagtggaaacgacgggtctgcgggtccgcctggcccccccgggagcgtagggccaagaggacctgaggggctgcaaggccagaaaggcgaacggggccccccaggagaacgggtggtgggagcccccggggtccctggagctcccggagagcgaggagaacagggcaggcccggcccagcggggcctcggggggagaaaggggaagcggcgctgacagaagatgacatacggggttttgtgaggcaggagatgagccagcactgcgcatgtcagggacaattcattgcctccggatcgaggcccctcccttcgtatgccgccgatacagcgggcagccagctccacgccgtccctgtgctgagagtatcacacgcggaggaagaagagcgcgtcccgcccgaggacgacgagtatagtgaatactccgagtatagcgtggaagagtatcaggaccccgaggccccctgggactccgacgacccttgttctcttccactcgatgagggtagctgcacggcttacacattaagatggtaccaccgcgcagtcaccggatctaccgaggcatgccacccgttcgtctacggcggatgtggcggcaacgcaaatcgcttcggcaccagggaggcgtgcgagagaaggtgtcctcctagagtggttcagtctcagggaacagggacagcccaggac

SEQ ID NO: 1504 - DNA, 8832 bp, Artificial Sequence
  derived and/or modified sequence
atgaccctgcgcctgctggtggcggccctgtgcgcaggtattctcgcagaagcaccgagagtgagagcacaacaccgggaacgcgtcacttgcactcgactttatgcggcggacatcgtgtttctcctggatggttcgtcatcaatcggaagatcgaactttcgcgaagtgcggtcgtttctcgagggtcttgtgctgcctttctcaggagcagcctcagcacagggcgtgagatttgcaaccgtgcagtactctgatgatcctcgaaccgaattcggacttgatgcccttggttccggtggcgatgtgattcgtgcaatcagggaattgtcgtacaaaggaggcaacacccgcaccggagccgcgattctccatgtggcagatcacgtattcttgcctcaactggcaagacccggggtccccaaggtgtgtatcctcatcactgacggaaagtcacaagaccttgtggacacggcagcacaacgcctgaagggtcaaggagttaaactgttcgcagtgggaatcaaaaacgctgatcctgaggagcttaagcgtgtcgcatcccagcctaccagcgacttcttcttttttgtgaacgattttagcattcttcgcaccctcctgcctcttgtgtcacggagggtctgtactacggcagggggagtgcccgtgactaggccccctgatgactccacttcggcacctcgtgatctggtgctttccgaaccttcgtcccaatccctgagagtgcaatggactgcggcatcgggccctgtgactggttacaaggtgcaatacactcccttgactggacttggacagcctctcccctcggaacgccaagaggtcaatgtgcctgcaggcgaaacgtcggtcagactgagaggactgcgacccctgacggaatatcaggtgactgtcatcgcactgtacgctaattcgatcggtgaagctgtgtcgggaactgcgaggaccactgcacttgaaggtcctgagctcactatccagaacaccaccgcacattcacttttggtggcgtggagaagcgtcccaggcgcaaccggctatcgcgttacctggcgagtgctgagcggtggtcccacccagcaacaagagttgggcccaggtcaaggatccgtgctgcttcgggatctggaacccggtaccgattacgaagtgaccgtctccacgctgttcggcaggtcggtcggaccggccacctccttgatggcgcgaaccgatgcatccgtggaacagacccttagacccgtgatactcggtcccacctccattctgctgtcatggaatctcgtgcctgaggcacgaggctaccggctggagtggcgccgtgagactggacttgaaccgccacagaaagtggtgcttccctcggacgtgactaggtaccagctggatggactgcagcctggtactgagtacagactcactctgtacactctgctggaagggcatgaggtcgcaacccctgcgaccgttgtcccaacgggccctgagctccccgtctcgcccgtgactgatcttcaagcaacggagctccctggacaacgtgtgagagtcagttggagcccagtccctggagcaactcagtataggatcattgtcagatcgacgcaaggcgtcgaaaggaccctggtccttcctgggtcccaaactgcatttgatcttgacgatgtgcaggccggactctcatacaccgttagagtgtccgccagagtcggccccagggaaggttcagccagcgtcctgaccgtccgaagagagcctgaaacgccattggccgtgcctggcctgagagtggtggtgagcgacgcaactagggtgcgggtcgcctggggccccgtcccgggagcttcgggattccgtatttcgtggtcaactggatccggacccgaatcatcacaaaccctgccacctgatagcactgctactgatataaccgggctccagccaggtaccacctaccaagtggcagtcagcgttctccgggggcgcgaagaagggcctgcagcagtgatcgtggcacgcaccgacccccttggccccgtgagaacggtgcacgtgacccaggccagcagcagctcggtgaccattacctggacgcgggtgccaggcgcaaccgggtacagggtatcgtggcattcggcacatgggccagaaaagtcccaacttgtgtccggagaagcaactgtggccgaactggacggtcttgaaccagatactgaatacaccgtgcatgtacgggcgcatgttgcgggggtggatggacctcctgccagcgtcgtcgtccgtactgcacctgaaccagtggggcgagtgagtcggctccagattcttaacgcatcatctgatgtgctgcgtattacttgggtgggtgtcaccggggccacggcataccgactggcgtggggtcgaagcgagggtggacctatgcggcaccagattctccccggcaacactgattccgccgaaatccggggacttgaggggggcgtgagctacagcgtgcgtgtgacggcgctggtgggcgatagagaaggtactcccgtgtcgatcgtggtcaccacgccccctgaagcacctcccgcacttggtactcttcatgtggtgcaaaggggtgagcattcgctcaggctgaggtgggagccggtcccaagggcgcaaggtttcctcctgcattggcaaccggagggtggtcaggaacaatcccgagtgctcggacctgagctgtcctcctaccatctggatggtctggaacctgcaactcaatacagagtcagactttcggttcttgggcctgcaggtgagggtccctccgcagaggtcacggctagaactgaatcgcctcgagtgcccagcattgaactgagggtggtggacacctcgattgactcagtgactctcgcatggactccagtgtcgagagcatcttcgtacattctctcatggcggccactgcgcgggcctggacaagaagttcccggaagtccccaaactcttccaggtatatcctcttcccaaagagtcactggactcgaaccgggcgtttcgtacatcttttcactgactccggtgttggacggggtgcgcggcccagaagcctccgttacccagaccccggtctgtcctcgcggactggcagatgtggttttcctcccacatgctacccaggataacgcccatagggcagaggctaccaggcgagtccttgaacgcctggtccttgctctggggccccttggaccccaagcagtccaggtggggctccttagctactcacatagaccttccccgttgtttccgcttaacggaagccacgaccttggcatcatactccagcgcattcgcgatatgccttacatggacccatcgggcaataatctgggaaccgcagtggtcactgcacatcgctacatgctggcccctgatgcacccggtcggcggcagcacgtgcctggagttatggtgctgctcgtggacgaaccccttagaggcgacatcttttcgcctatacgggaagctcaagcatccggccttaatgtggtcatgctcggaatggccggggcagacccagaacaacttagacggctggcaccagggatggattcggtccagacttttttcgcagtggatgatgggccgagccttgatcaggcagtgtcagggcttgctaccgcgctctgccaggcatcgtttacgacccaacccagacctgaaccatgtccagtgtactgcccaaaggggcaaaaaggggaacccggagaaatgggattgaggggacaggtggggccaccaggtgaccccgggctgccgggccgtaccggtgcgccaggaccacaaggccctccaggaagcgcaacggccaagggtgaacggggttttccaggggccgatgggaggcctggatcgccaggtagggcaggaaacccaggtacgccgggtgcgccaggacttaagggttcgcctggactccccggacctaggggcgaccctggcgagcgcggtcctcgtggaccaaagggtgaacctggcgcccctggtcaagtgattggtggtgagggtcctggtctgccaggtcgcaaaggcgaccccggacccagcggacctccggggccaagaggaccactcggagatcctggcccaagaggtcctcccgggctccctggtaccgctatgaaaggagataaaggagatcgtggagagcggggcccacccggtcctggtgaaggtggtatcgcacccggtgagccagggctgcctggcctgcctggtagccctggcccgcagggacctgtaggacctccaggcaaaaagggagagaagggagatagcgaagatggagcacctggactcccggggcagccgggttcacctggcgaacaaggccctcggggtccgcctggagccattggcccaaagggagatcgtggatttccagggcctcttggtgaggcgggagaaaagggtgagcggggtcccccgggacccgcaggatcaagaggactgccgggtgtggcgggaaggcccggagcaaagggcccagaggggccccctggaccaactggaaggcagggtgagaaaggtgaacccgggcgcccaggagatccagccgtggtgggcccggctgtggccggacctaagggagagaagggtgacgtgggaccggcaggtccacgtggtgccactggggtgcaaggcgaacgtggtcctccagggctggtcctgccgggtgacccaggaccaaaaggcgatcctggtgatagagggccgattggactgaccggtcgggcaggaccgccaggtgactccggaccaccgggcgagaaaggggatcctggtcgaccggggcctccaggtccagtgggtccccgcggccgggatggcgaagtgggggaaaaaggagatgaaggtccaccaggagatcctggcctcccaggaaaggcaggagagagagggctgaggggtgctccaggcgtgcgggggccagttggagaaaagggggaccaaggtgatccgggtgaagatggccggaacggtagccccggatcaagcggtccgaagggggacaggggtgaacctgggcctcctgggcccccaggccgcctggtggatactggccccggtgcaagagagaagggggaaccaggggaccgggggcaagagggtcctagagggcccaaaggcgaccccggactgcccggtgctccgggagagagaggtatcgagggatttcgcggtccccctgggccccagggtgaccctggagtccgcggccctgcgggtgaaaaaggcgaccgcggccctcctggcctggatggacgctcggggttggatggtaagcctggtgcagcaggcccctcgggaccgaatggagcggcgggcaaggctggtgaccccggtagagatgggctcccaggattgagaggagaacaaggactgcccggtccttctggtcccccgggccttccgggcaagcctggagaagatggaaaacctggacttaatgggaagaacggcgaacctggcgatccaggcgaggatggaagaaaaggggaaaagggagatagtggagcctcgggtagggaaggacgcgatggcccaaaaggcgagagaggagcacctgggattcttggacctcagggaccccctggcttgcccggcccagtgggaccccccggtcagggtttcccgggtgtcccaggtggaacgggcccgaagggtgatcggggggagactggatcgaagggagagcagggattgccaggtgaacgaggccttagaggagaaccagggtctgtcccaaatgtggatagactgttggaaaccgccgggataaaggcctctgcccttcgcgagatagtcgaaacctgggatgagtcgagcggctcatttcttcctgtccccgaacggagaagaggccctaagggggactccggagaacaggggcctcctggaaaggagggccctattggcttccccggggagcggggtcttaagggcgaccgcggtgacccaggtccgcaaggcccgcctggactcgctctgggggagagaggccccccagggccaagcggacttgctggagaacctgggaagcccggaattcctgggttgccgggacgcgcaggaggagtgggagaagcaggtagacccggggaaagaggggaacgcggcgaaaagggagaacgcggggaacaggggcgcgatggacctccaggtttgccagggacgccaggacctccggggccccctggtccaaaggtatctgtggatgaacctggccctggactttcgggcgagcaaggaccaccggggctgaagggtgccaaaggagagccaggaagcaacggcgaccagggccctaaaggagatcgtggtgtgccgggcattaagggtgaccgaggagagccgggccctcgcggacaggatggaaatcccggccttcccggcgagcgaggtatggcaggacccgaggggaagcctggtctgcaaggaccccgcggacctcccggacccgtcgggggtcacggtgacccaggacctcctggtgccccaggtctggctggaccagccggaccacagggaccctcgggcctcaagggagaacctggagaaactggtccgccgggacgagggctgaccggaccgactggtgcggtcggacttccaggtccacctggtccctccggtctggtgggtccccaaggctcccctggtctgccgggacaggtgggcgagacgggtaagcctggggcacctggaagagatggcgctagcggaaaagatggcgacaggggatccccaggagtccctggatctcccgggttgccaggtcctgtgggacctaagggtgaacctggacccactggcgcccctggacaagcggtggtgggactgcccggcgctaagggagaaaagggcgcacctggaggactcgcaggtgatttggtcggggaaccaggagcaaagggtgaccggggactgccgggcccccgaggagaaaaaggcgaggcaggacgggcgggcgaacctggtgaccctggcgaggacggccaaaagggtgcccctggccccaagggattcaagggcgatcctggggtgggagtgcctggctcgccaggccctcctggtcctcctggtgtgaagggagatctcgggctccctggacttcccggggcgcctggagtggtgggatttcccggacaaactggtcctcgtggggaaatgggtcaaccaggccctagcggagaaagagggctcgcagggcccccaggaagagagggaattccgggaccactggggccacccggccctcctggatcagttggaccgccaggagcatcaggacttaagggcgataagggagatcctggtgtcggactcccggggcctcgcggggagcggggagaacccggcattcgaggcgaagatggcagacctggtcaagaagggccccgcggccttactggccctcccggctcaagaggggaacggggagaaaagggcgatgtgggaagcgccggacttaaaggggacaagggagattccgctgtcattttgggccctcctggaccacggggagcgaagggagatatgggcgagaggggtcctcgaggcctggacggagataagggacctcgtggagataacggagatccgggcgacaaaggatccaaaggggaaccaggcgacaaaggttcagcaggacttccaggccttagaggcttgttgggtccacaaggacaaccaggggctgcggggattcctggggaccctgggagccctgggaaagatggagtccctggaattcgaggagaaaagggagacgtgggttttatgggcccacggggacttaagggagaaagaggcgtgaaaggggcctgtggacttgatggtgagaagggagacaaaggagaagctgggccacccgggaggccgggtctggcgggccacaagggtgaaatgggggagcccggtgtgcctggacaatctggtgcacctggaaaggaaggactcatcggccctaaaggtgatcgtgggtttgatggacagcccggtccaaagggggatcaaggtgagaagggagaacggggtacgccaggcattggaggattccccggcccatccgggaacgatggctccgccggtccccctgggccgcctggatcggtggggcctagaggtccagaaggcttgcaaggtcaaaagggtgaaagaggtcccccgggtgagcgtgtggtgggggcgccgggcgtgcctggtgcccctggtgaacggggcgagcagggacgcccagggccggcaggtccccgcggggaaaaaggagaagcggcccttaccgaagatgacattcgtggatttgtccgccaagagatgtcccagcactgtgcatgtcaaggacagtttatagccagcggatcacgtccactgccttcgtacgcggcagataccgcaggctcccagctccacgccgtcccagtcttgagggtttcccatgcagaagaagaagaaagggtccctcccgaagatgatgaatactcagagtacagcgaatactcagtggaagagtaccaggacccggaagcaccatgggactcggacgacccctgttcccttcctctggacgaaggatcatgtactgcctatacgcttagatggtaccatagggccgtgaccggctcgaccgaagcatgccacccctttgtctacggaggttgtggagggaacgcaaatagattcggtaccagagaggcatgcgagagacgctgtccccctcgtgtcgtgcagtcccagggaaccggaactgcacaggat

SEQ ID NO: 1505 - DNA, 8832 bp, Artificial Sequence
  derived and/or modified sequence
atgactctgcgcctcctggtggcagccctgtgcgcgggaatcttggcggaagcccctcgcgtccgcgctcagcaccgcgagcgtgtgacttgcacccgcctgtacgccgctgacatcgtgtttctgctcgatggctcgtcgtcgatcggtcgctccaacttcagagaagtgcgatccttcctcgaaggtcttgtgctcccgttctcaggcgctgcctccgcgcagggagtgagatttgctaccgtgcaatactccgacgaccctcggaccgaattcggcctggacgccctcggctcgggaggagacgtcatcagggccatccgggagcttagctataagggtggaaatacccgcaccggggcagcaatcctccacgtggccgaccatgtgttcctcccgcagctcgcccggccaggggtgccgaaggtctgcatcctcatcacggacggcaagtcgcaagatttggtcgataccgcggcccaacgccttaagggacagggagtcaagctctttgcggtgggaatcaagaacgcagatcctgaagaattgaagagggtagccagccagccaacctcggacttcttctttttcgtcaatgacttctccattctgcgcacgctcctcccgctcgtctcgcgcagggtgtgcactaccgccggaggcgtgcccgtgacccgaccgccagatgatagcacttcagcaccacgggacctggtgctgtctgagccgagctcacagtcgctgcgagtgcagtggacggccgcatcgggaccggtgacgggctacaaggtccagtacactcctctgactggcctgggccagccactcccaagcgagagacaggaggtcaacgtgcctgcaggagaaactagcgtccgccttcgtggactccgcccactgactgagtaccaggtcaccgtcatcgcgctgtacgccaactcgatcggggaggccgtcagcgggaccgcgcgcactacggccctggagggaccagaactgactatccagaacactaccgcccatagcctgctggtggcgtggcggtccgtgccaggtgcgaccggctaccgcgtcacttggcgcgtcctgtcaggcggaccgactcagcaacaggagctcggccccggccagggcagcgtgctcttgagagatttggaaccaggaaccgattacgaagtgaccgtgtcaactctgtttggccggtcggtgggaccagctaccagcctcatggcccggacggacgcgtccgtggagcaaactttgcggccggtgattcttggtccgactagcatcctgctgagctggaatctcgtgccagaagcacgggggtaccggctggaatggagacgggaaactggactggagcccccacaaaaggtggtcctcccgtcggacgtgaccagataccaactggatggactccaaccgggaaccgaataccgcctcactttgtacactttgctcgaaggtcacgaagtcgccacccctgcgaccgtggtgccgaccgggccagaactgcccgtttcccccgtcactgacctccaggcaaccgagctgcctggacaacgggtgcgcgtgtcgtggagcccagtgccaggcgccactcaataccggatcatcgtccgctcgacccagggagttgaacggacgctcgtcctgccaggctcgcagaccgcctttgacctcgatgacgtgcaagccggactgagctacaccgtccgggtgtccgcccgcgtcgggcctagagagggatcggcgtccgtcctgacggttcgccgcgaaccggaaactcccctcgcagtgccgggcctgcgcgtggtggtgtcggacgccaccagagtgagagtggcttggggaccggtgcctggagcctcgggattccggatctcatggtcgaccggctcgggaccggagtcgtcccagacccttccgcctgattcaaccgctaccgacattactggactccagccaggaaccacgtaccaggtggcagtgtccgtgctgcgcggccgcgaggaaggcccagcggccgtgattgtggcgcgcactgacccgctgggcccggtgcggacggtccacgtgacccaggccagcagctcttcggtgactatcacctggacccgggtgccaggggccaccggatacagagtgtcgtggcattccgcccatggcccggaaaagtcgcaactggtcagcggggaggcgaccgtggctgaactggatgggctcgaaccagatactgaatacaccgtgcacgtgcgggctcacgttgctggcgttgacggacctccggcgagcgtcgtggtgcgcaccgcaccggaaccggttggccgcgtgtcccgtctccaaatcctgaacgcctcgtcggacgtgctccgaattacctgggtcggggtcaccggagctacggcctacagactggcatggggccggtcagagggaggtccgatgcgccaccagatcttgcccggaaataccgatagcgccgaaattcgggggctggaaggaggggtgtcctacagcgtgagagtgactgctctcgtcggcgaccgggagggcacgccggtgtccatcgtggtgaccactccgccggaagctccccctgcgctgggaactcttcacgtggtgcaacggggagagcattcccttcgcttgcggtgggaacccgtcccacgggctcagggattcctcctgcattggcagccggaaggaggacaagaacagtcgagagtgctgggaccggaactctccagctatcacttggacgggctggaaccggcgacccagtacagagtcaggctgagcgttcttggcccggccggagaaggaccttcggcggaggtaactgcgagaaccgagtccccgagagtgcctagcatcgagttgcgcgtggtggacactagcatcgattcggtcactctcgcctggaccccagtctcgcgcgcttcttcttacatcctcagctggcggccgctgcgcggaccgggacaggaggtgccaggatcgccgcagaccctgccaggaatctcaagctcccagagagtgactggcctcgagcctggcgtgagctacatcttctcccttaccccagtgctcgacggagtccgcggcccagaggcgtccgtcactcagacgccagtgtgtccacgcggactggcggacgtggtcttcctgcctcacgccactcaggataacgctcacagagctgaagcgacccgcagagtgctggagcggctcgtgctggccctcggaccacttggaccgcaggcggtgcaggtggggcttttgagctacagccaccgaccgagcccgctgttcccgctgaacggatcgcacgatcttggtatcattttgcaacgcatccgcgacatgccctacatggacccctccggaaacaaccttggaactgcggtggtgactgcccacaggtacatgctggccccggacgccccgggaagaagacagcatgtgccaggtgtgatggtgctgctggtggacgaaccactccggggggatatcttctcaccaatcagggaagcccaagcctccggcctgaatgtcgtcatgctgggaatggccggcgcagaccccgagcagctgcgccggctggcaccgggaatggattcggtgcagacctttttcgccgtcgacgacggaccatccctggaccaggctgtcagcgggctggcaactgccctttgtcaggcgtcgttcaccacccagcccagacctgagccatgcccagtgtactgtccaaagggacagaaaggcgaacctggagaaatgggcctcaggggacaggtgggaccgccgggcgacccgggactcccgggtaggactggggccccaggaccacagggacccccgggatcggccaccgccaagggagaacggggcttcccgggggctgatggaagaccaggatcacctggaagggcgggaaaccccggcaccccaggagccccgggactcaaagggtcgccgggcctgccgggaccacgcggagatccgggcgaacgggggccacgcggtccgaagggagagccgggagccccaggacaagtgattggcggggaaggaccaggtctgccaggtcggaagggggaccctggaccgtctggtccgcctggaccgcgggggccactgggagatccaggaccgcggggcccccctggcttgccaggcaccgcaatgaaaggcgataaaggcgatcgcggtgagaggggaccgccgggacctggggagggcggaattgcccctggtgagccgggactcccgggcctgccggggagcccaggaccacaagggccggtgggaccgccggggaagaagggagaaaagggagactccgaggacggggccccaggactgcctggacagccaggctccccaggcgagcagggaccgcggggacctccgggcgcaattggaccaaagggggatcgcggattcccggggcctctgggagaagcaggcgagaaaggagaacgcggaccacccgggccggccggatcccgcggattgccgggagtggcgggacgccccggagcaaaggggccggaggggcctccgggccctactggaaggcaaggcgagaagggagaaccgggccgccctggagatcccgctgttgtgggaccagccgtcgccgggccaaaaggggagaagggcgacgtgggcccagcaggcccgcgcggtgcgaccggagtgcagggagaaaggggacctcctggactggtgctgcctggtgacccgggaccgaaaggcgacccgggagatcgggggcctatcggactgactggaagagccggaccgcctggggactcaggcccaccgggagaaaagggagatccgggacggccgggacccccggggcctgtgggcccgcgcgggcgggatggagaggtgggagagaagggggacgagggaccaccgggggaccctggactgccaggcaaggcaggtgagcgaggactcaggggagccccgggagtgaggggccctgtgggcgagaagggcgaccagggagatccaggagaagacggacgcaatggatcacctggttcgagcgggccgaaaggtgaccggggggagcctgggccacctggtcctccgggtagactggtggacactggaccgggagcgagggagaagggtgagccgggagatcggggtcaggagggacctcggggaccgaaaggtgaccctggactgcctggcgctccaggtgaaagaggaatcgaaggattcagaggaccgccaggaccacagggagatccgggagtgagaggcccagccggcgaaaaaggagacagggggccaccgggacttgacggaagatctggcctggatggcaaaccgggcgccgccggcccgtcgggaccgaatggagccgccgggaaggccggggacccgggccgagatggactgcctggcctcaggggagaacaaggcctcccaggaccttcaggcccgccgggactgccaggaaaaccaggagaagatggaaagcctggactgaatggtaagaacggagaaccgggagatcccggagaagacggacgcaaaggtgagaaaggcgactccggggcatccggacgggagggacgcgacggacccaagggggaaagaggcgcccccgggatcttgggaccacagggaccaccaggattgccgggacctgtgggacccccgggacaaggattcccgggagttccgggaggcaccggcccaaagggcgacaggggagaaactggtagcaagggtgagcaggggctcccaggtgagagaggcctgcgaggagagccgggatccgtgccaaacgttgatcgcctcctcgaaaccgcaggcattaaggcgtccgctctcagagagattgtggaaacctgggatgagtcaagcggatcattccttccggtgcctgaaagacgaagaggaccgaaaggggactcgggagaacaaggtccacccggaaaagagggaccaatcggattcccaggggagcgagggctgaaaggagacaggggcgatcctggaccgcagggaccgccggggctggcccttggagaaagaggcccgcctgggccgtcgggcctggctggggaacctggaaaaccggggataccagggctgccgggccgcgctggaggggtgggggaggcgggaagaccgggcgaacggggagaacgaggtgaaaagggagaacggggagaacagggtcgcgacggaccaccagggctgccaggaaccccgggaccaccgggaccgcctggccccaaggtcagcgttgacgaaccgggtccgggactttccggagaacagggaccgcccggattgaagggcgcaaagggggagcccggctcaaacggtgatcagggaccaaagggagacaggggggtgccggggatcaagggagatcgcggagagccagggccgcgggggcaagatggaaatccaggactgccgggtgagcgcggcatggcggggcccgaaggaaagccgggactgcaaggacctagaggaccgcccggcccggtgggcgggcatggagatccaggacccccaggagcgccgggcctggcggggccggcgggaccgcaaggaccatcgggcctgaagggcgaaccgggagaaactgggccgcctggcagaggactgaccggacctactggagcggtgggactgccaggaccaccaggaccttccgggcttgtcggaccccaggggtcgccgggactcccaggccaggtcggggagactggaaagccgggcgccccagggagagatggggcgtcaggcaaggatggggatcgcggttccccgggtgtccctggaagcccaggactgccgggaccggttgggccaaaaggtgagccggggcccactggcgcccccggacaagccgtggtggggctcccaggtgcgaagggcgaaaaaggagcgcctggaggactggccggcgaccttgtcggagagcctggtgccaagggcgatcgcggtctgcctggacctagaggcgagaaaggagaagcaggacgggcgggagagcctggcgatccgggagaggacggacagaagggagcaccggggccgaaaggattcaaaggggacccaggagtcggtgtcccgggttcccccggcccgcctggcccgcctggagtgaagggagatctgggactgcctggcctgccaggcgctccaggagtcgtcggattcccgggacagactggaccacggggagaaatgggacaaccaggaccctcgggagaacgcggcctcgctggacctccggggagagaggggatccctggtccgctcgggccgccggggccgccaggatctgttggaccgccaggagcgagcggcctcaaaggagacaaaggagatcctggggtgggactcccaggaccgagaggagagcggggggagccaggtatcaggggggaggatggacggccaggacaagaaggacccaggggattgaccgggccgccgggatcacggggagaacgcggagaaaagggagacgtgggaagcgccggccttaaaggtgacaagggagattccgctgtcatcctcggaccaccaggaccccgcggtgccaaaggcgacatgggggaaaggggtccgaggggactcgacggagataaaggaccgcggggagacaacggcgaccctggagataagggctcgaagggagaaccaggagataaagggtcagcagggctgcccggactgcggggactgctgggaccgcagggccaacctggcgcggcggggatccctggagatcctgggtcaccgggaaaagatggagttccaggcattcgcggcgaaaagggcgatgtgggctttatggggccacggggactcaagggagaaaggggggtgaaaggcgcatgcggactggacggtgaaaagggagataagggcgaagctggaccaccgggacgcccgggcctcgcaggacacaaaggtgaaatgggtgagccgggagtgccaggacagtccggcgccccgggaaaggagggtttgattggaccgaagggagatcgcggattcgacggacagccgggacctaagggtgatcagggagagaagggggagcgcggaacccctggcatcgggggattcccgggaccatctggcaatgatggaagcgcgggtcctccggggcccccgggatccgttgggccgcgcggtccggagggcctccagggacagaagggagaacgcggcccaccgggtgaacgggtggtgggagctcccggagtgccgggagcgccgggggaacgcggagaacagggaagaccgggcccggccggaccgcggggcgagaagggcgaagctgccctgactgaagatgatattagggggtttgtcagacaggaaatgtcccagcactgcgcttgccaaggacagtttattgcctccggatcacggccgctgccttcgtacgccgctgacaccgcgggaagccaactgcatgcagtcccggtgctccgcgtctctcacgccgaagaggaggagagagtgccgccggaagacgatgaatattcggagtactcagaatacagcgtcgaagaataccaagatcccgaagcaccgtgggacagcgatgacccttgctcgttgccgctcgacgagggatcgtgcaccgcgtacactctccgctggtatcaccgcgcggtgaccggaagcaccgaggcctgtcatcccttcgtgtacggtggctgcgggggaaatgccaatcgcttcggcactagagaagcgtgcgagcggcgctgcccgccccgcgtggtccaatcgcagggaaccggaactgcccaggac

SEQ ID NO: 1506 - DNA, 8832 bp, Artificial Sequence
  derived and/or modified sequence
atgactttaagactgctagtggctgccctgtgcgccggcatcttggcagaagctcctagagtgcgggcccagcatcgagagcgcgtgacttgcactcggctttatgccgccgacattgttttcctgttggatggctcttcttcaattggtcggtcgaattttcgggaagtaaggagttttctggagggactggtgttgcctttctctggagccgctagtgctcagggcgtgcgctttgctacggtccagtactcagacgatcctagaaccgagttcgggttggacgctctggggtccggcggcgatgttattcgcgctattcgcgagctaagctacaaaggcggtaatacacgcactggcgccgctatactccacgtcgccgatcatgtgttcctgccgcagctggcgcgtcctggcgttcctaaggtgtgcatcctgatcacagatggtaagagccaagacttagtcgacaccgccgctcagcgtctcaaagggcagggcgtgaagctcttcgcagtggggatcaagaatgcagacccagaagagttaaaaagggtggccagccagccaacctctgatttttttttctttgtaaacgatttttccatcttgcgaacgctcctccccttggtatcacgcagggtttgcacaacagctggcggcgttcccgtcactcgacccccagatgattcgaccagcgcgccccgggatctggtgctttcagagccctccagtcagtcactgagagtccagtggaccgcggcatctggtcctgtgacaggttacaaagtgcagtacaccccgttgactggactcggacagcctctgccgagcgagagacaggaggttaacgttccagccggcgagacgtctgtccggctcagagggctgcggcccttgactgaataccaggtcaccgtaatcgccttgtacgccaatagcatcggggaggccgtatccggaactgcccgcacaaccgcgctggagggtcccgagttaaccatccagaacactacagcgcattccctgttggtggcgtggcggtccgtcccgggtgctacaggttacagagtgacctggagggttctgagtgggggtcctacccaacaacaggaactgggaccaggacaaggttcagtcttgctccgcgatctcgaaccaggcacggactatgaagtgaccgtgtcaactttgtttggccgctctgtgggacccgcgacttctctgatggcacggaccgacgcgtccgtagagcagactcttcggcccgtgatcctaggccccacttctatcctactcagttggaacctggtaccggaagcgcgagggtataggcttgagtggaggagggaaacaggcttagagccccctcaaaaagtcgttctgccttccgatgtcacccggtaccaactggacgggctgcagccagggactgaatacagactcactttgtacacattgctggagggtcatgaggtggccacaccagccacagtggtcccgaccggacctgagctgcctgtgtctccagttactgacttacaggcaacagaactgcccggccagcgagtgcgagtgtcatggtcacccgttcccggcgccacacagtaccgaatcatcgtccggtcgacccagggtgtcgagcgaaccctggtcctgccaggctctcagacggcattcgacctggacgacgtgcaggcaggactcagctacactgttagggtctccgcgagggtagggccaagagaggggtcggcgtcggtcctcacagtgaggcgcgagcctgaaactcctctcgcagtaccaggccttcgagtggtggtcagtgatgccacgcgcgtgagagtcgcgtgggggcccgtgcccggagcaagcggattccgaatatcctggtccactggtagcggccccgagtccagtcagaccctcccacccgactctacagccaccgacataaccggtctgcaaccagggaccacttatcaagttgccgttagtgtgttaagggggcgtgaagaagggcctgccgctgtgatcgtagccagaacagatcctctaggacctgttcgtactgtgcacgtgacacaggcttctagtagcagtgtgactataacctggacacgcgtcccaggggccactgggtatcgggtcagctggcacagcgcacatgggcctgaaaagtcacagctagtcagtggggaagctaccgtggcggaactggacggcctggagcccgacaccgagtataccgtccatgtgcgtgcccatgtcgccggtgttgatggtccacctgccagcgtcgtggttcgaacggcccctgagcctgttgggcgagtatcaaggttacagatcttaaatgcatcttctgatgtgctgcggatcacctgggtgggcgtcaccggcgcaacagcttatcgcctggcgtgggggcggtctgaaggaggccccatgaggcatcagatcttacctgggaatactgacagcgcagagatcagaggcctggaaggcggcgtgtcctattctgtcagagtcactgccttggtcggtgaccgcgaggggacacccgtcagtatagtggtaacgacccctccggaagctccccctgctctgggcactctgcacgtcgttcagagaggggaacatagtctgagactccgatgggaaccagttcccagggcccaaggctttttgctccactggcagcccgaggggggacaggagcagtctagggtcttgggacctgagctgtcctcttatcatctggatgggcttgaacctgcgacccagtatagagtgcgcctcagcgtgctaggacccgccggagagggacccagtgcagaggttaccgcccgaactgaaagccccagagtcccgtctatcgagttacgcgtagtggacactagtatcgactccgttacgttggcctggacacctgtgagccgggcatcatcatatattctgagttggcgccccctgcggggtcccgggcaagaagtgccagggtccccgcaaactctgcccgggatcagttcaagccagagggttaccgggctcgagcccggggtttcttacatttttagccttacacctgtgctcgacggcgtacgcggtccggaggcaagcgtgacccagacccccgtttgccccaggggactggccgatgttgtatttttaccacacgcaacacaggataacgcccatcgcgctgaggccacgcggagggtgctggagaggctggtgctggctttaggcccactgggcccccaggctgtccaggtgggtctgttatcctactcccataggccctccccattattcccattgaacggctcccatgatttgggtattattctccaacgcattagagacatgccctacatggacccctctggaaacaatctgggcactgctgtggtcaccgctcacaggtacatgcttgcgcctgatgcgcccgggcgaagacagcacgtgccaggggttatggtgctattggtggacgaaccacttcgtggtgacatttttagccctatccgcgaggcacaggcgtccggactaaatgtggtcatgctcggaatggccggagccgacccggagcagcttagacggctcgcaccaggaatggattcagttcagacattcttcgcagtggatgatgggcccagccttgaccaggctgtgtctggtctggcgaccgcactatgccaagcttcatttaccacgcagccgcgacctgaaccttgcccagtctactgtccaaaaggtcagaagggcgagccgggcgaaatggggctgcgtggtcaagtgggccctcccggggaccccgggttgcccggtagaactggtgcccctgggcctcaggggccacctgggtccgccactgcgaaaggggaaagaggattccccggcgcagatggcagaccaggaagcccaggaagggccgggaacccagggacccctggtgcgccagggctgaagggatcccccggactacccggtccacgcggcgatccaggagaaaggggtcctaggggccccaagggcgaaccaggagcccctggccaggtaattgggggtgaagggcccggactgcctggaagaaagggcgaccccggtccctccggaccccccggtccacgggggccgttaggtgatccaggccctcgaggaccgccaggattaccggggaccgccatgaaaggcgataagggcgatcgcggcgaacgggggccgcccggccctggcgagggcggaattgcccctggggagcctggcctccccggtctccccggatccccagggcctcagggccctgttggcccacctgggaagaagggtgagaaaggtgattccgaagacggtgctccggggctcccggggcaacctggatcacctggcgagcagggaccacgcggaccaccaggggctattggcccgaaaggggatcgggggttccctggcccgcttggggaagccggagaaaaaggggagcgggggcctcccgggcctgcggggagcagaggcctgccgggtgtagccgggcgacctggcgccaaggggcccgaagggcctcctggacccaccggaagacagggagaaaagggcgagcctggtaggcccggagaccccgccgtggttggacccgctgtggcgggccctaagggcgagaaaggggacgtgggccctgctggccccaggggggccactggcgtgcagggagagcgcggcccgcccggcctcgtccttcctggcgatcctggccctaaaggcgatccaggagaccggggcccaatcggtcttactggccgagcagggcctcctggagattctgggcctcctggggagaaaggggaccctggcagacccgggccacccggaccggtgggtcctcggggacgggacggcgaggtaggggagaaaggtgacgaaggaccacctggagaccccggactgccggggaaggcaggggagcgcgggttgagaggcgccccaggagtgcggggaccagtgggcgagaagggcgatcagggggacccaggcgaagacgggagaaacgggtcacctgggagtagcgggccaaagggtgatagaggggagcccggaccacctgggcctcctggccggttggtcgatactggaccaggcgctcgagagaaaggcgagccaggtgacagggggcaggaggggcctcgcggccccaaaggggacccaggcctccctggcgccccaggcgagcgggggattgagggttttagaggaccaccagggccacagggggatccaggtgttagaggcccagccggcgaaaaaggtgacagggggcccccaggcctcgacggtagatccggcttagacggaaagccgggagccgccgggcccagtggtcctaatggcgccgctggcaaggcaggggatccgggacgcgacggcctacctggattgcgtggcgagcagggtctacctggtccaagcgggcccccgggactgccaggaaagccgggcgaggatgggaaacctggattgaacggcaaaaatggcgaaccaggggatccaggtgaggacggccggaaaggggagaagggtgatagtggtgcttccggcagagagggacgagacggccccaagggggaacgcggggctccagggatcctaggacctcagggcccgccagggctgccgggcccggtcgggccacctggacaggggtttcccggtgtccccggggggactggccctaaaggggatcgcggagagaccgggtccaagggtgagcagggtctgcctggagagagaggtttaaggggggagcccgggtccgttcctaacgtagatcgcctgctcgagaccgccggcataaaggcttctgcacttcgcgaaattgtggaaacctgggacgaatctagcggcagttttttacccgttcctgaacggcgacgaggtccaaaaggcgactctggagagcaagggccgccaggcaaagagggccccataggttttccgggggaacgcggattgaagggggatcggggggacccggggccccagggaccaccagggctcgcactgggcgaacggggccccccaggaccctctggactggcaggtgagccaggtaagcctgggattcccgggctcccaggccgagctggtggagtcggggaagccgggcggcctggggagcgcggcgaacgcggagagaaaggtgaaaggggcgaacagggtcgggatggcccccccggtttgccaggcacccctggaccgccaggtccccccgggcccaaagtcagcgtcgatgaaccgggtccagggctctctggggaacagggcccacccggactgaaaggcgctaagggagagccagggtcgaacggggaccaaggtccgaagggcgaccgcggggtgcctgggatcaaaggagaccgaggcgagccagggccccggggacaggacggtaacccaggattgcccggtgagagaggaatggctggcccagagggcaaacctggattacagggtccaagaggaccccccggtccggtcggcggccacggagatcccggtcccccaggagctcccgggctggctggtcctgccggacctcagggcccctccggattgaagggtgaacccggagaaacaggaccgccgggccgggggttgacgggacccactggcgccgtcggactgcccggccccccggggccatccggactagtgggtccccaaggatctccaggcttacccggccaggttggtgaaactggaaagcccggcgcacccggtagagacggcgcaagcggtaaagacggagaccgcggatctcccggtgtaccaggctctcccgggctgcccgggcctgtcggtcccaagggcgagccaggtcccaccggagctcctgggcaagcagtcgtgggcttgccgggtgccaaaggagagaaaggggcccctggcggattggctggggacttggtcggtgagcccggcgccaaaggggatagaggacttcccgggccaagaggagagaagggagaagcaggccgcgccggggagcccggagatcccggagaagacgggcagaaaggcgcaccagggcctaaaggtttcaaaggagacccaggggtcggggtccccggtagccccgggcctcctggtccaccaggagtaaagggtgatcttggccttcctgggctccccggcgctcccggggtggtcggcttccctgggcagaccgggccgcgcggggagatgggccaaccagggccttcgggagaacgcggactggccggccccccagggcgggaaggaatacctggtccgctgggccccccaggccccccggggtctgttgggccccccggcgcctctggccttaaaggggacaagggagatccaggtgtcggtcttcccggacctcggggtgagaggggtgagccaggtatcaggggcgaggatggacgccccgggcaggaaggtcctcggggattgactggcccacccggcagtagaggtgaaaggggcgaaaaaggggacgtgggctccgctgggttaaagggggataagggcgattcagcagtgattttgggcccacccggacctcgaggcgctaagggcgacatgggtgagagaggtccgcgcggactcgatggagacaagggacccagaggcgacaacggtgatccaggagataagggaagcaaaggtgaacccggagataaggggagcgcgggcctgcccgggcttcgtggactacttggaccacaaggacagcctggagcggccggcatcccgggggacccaggctctcctggcaaggatggggttcctggcatcagaggggaaaagggggacgtcgggttcatgggaccccgcggtcttaagggtgaacgcggtgtaaaaggcgcttgtggcctggacggagaaaaaggggacaaaggcgaggctggacctccgggccggcctgggctggccgggcacaagggtgaaatgggcgagccaggtgtcccagggcaaagtggtgctcccgggaaggagggactgatcggccccaaaggggacagagggtttgacggacagccagggcccaaaggcgaccaaggcgaaaaaggcgaaagaggcacccctggcataggcggttttccagggccttccggcaatgatggatctgccggcccccccgggcctcctggaagcgtgggtccacggggacctgagggtctccagggccagaaaggcgagagaggccctccaggcgagcgggtcgtgggagcccctggcgtgcccggagcacccggcgagaggggagagcaggggaggccgggacctgccggtcccaggggggagaaaggcgaagctgctctgaccgaggatgacatacgcggtttcgttcgacaagaaatgagtcagcactgtgcttgccagggccaatttatcgccagtggaagtcgccccctcccttcctacgccgctgataccgccggaagccagctgcatgccgtacctgtgctccgcgtgtcgcatgctgaggaggaagagagggttccccccgaggatgatgaatacagcgaatactccgaatacagtgtggaggagtatcaggatccagaagcgccttgggattccgatgacccatgttcacttcctctggacgagggctcatgtacagcttacacactgagatggtaccatagggctgttaccgggagtacagaggcgtgtcacccgttcgtatacgggggctgcggtggcaacgctaatcggttcgggactagggaagcttgcgaacggagatgcccccctcgtgtcgtgcagtcccagggcactggcactgcccaggac

SEQ ID NO: 1507 - DNA, 8832 bp, Artificial Sequence
  derived and/or modified sequence
atgaccttgagactgctagttgctgctctgtgcgcgggcatcctggcagaggccccacgcgtgagggcgcaacaccgtgagcgcgtgacttgcacaagactgtacgccgcagacatcgtctttctgctagacgggtcttcgtccatcgggagaagtaattttagagaagtcaggtcttttcttgaggggctggtcttgccattttccggcgccgcatcggcccagggggtgcgcttcgctacggtgcaatactctgacgacccccgtaccgagtttggcctggatgcactcggttctggaggcgatgtaatccgggctatcagagagctttcttataaagggggaaatacacggactggcgctgccattttgcatgtggccgaccacgtgttcctgccccagctggctaggccgggcgtacccaaagtgtgtattctgatcaccgatggaaagagccaagacttggttgacaccgccgcgcaacgcctgaaggggcagggggtcaaactgttcgctgttgggataaagaatgcagaccccgaagagctcaagcgggtggctagtcagcctacgtctgacttctttttttttgtgaacgatttcagtattctgagaacattgctccctctcgtgagccgtcgagtctgcacaactgcaggtggcgtccccgtgacccgccccccagacgatagtacaagcgctccccgcgatcttgtactatcagaaccaagttcccaaagcctgagggtgcagtggactgctgcgtctggtccagtcaccggatataaggtgcaatatacaccactgacggggctggggcaacccttgcctagcgaaaggcaagaggttaatgtgccggctggcgaaacatctgttagactcaggggactgagacctctgactgagtatcaggtcacagtgattgccttatatgccaattctataggagaggcggtttctggaacagctaggacaactgcgcttgaagggccagaactcaccattcagaacaccaccgcccattccctgctggtggcctggaggtcggtgccgggtgccacaggttatagggtgacctggcgcgtgctgtctggcggacctacacaacaacaagaattaggccctggccaggggagtgtcttgcttagagacctggagccaggaactgactacgaagttaccgtatccaccctctttggaagatccgttgggcctgctacttcactgatggcccggacggatgcctctgtagagcagaccttgcggcctgtcatccttgggcccacatctatccttctctcgtggaaccttgtgccggaagctcggggctacagactcgaatggcgtcgtgaaacaggtttggagcccccgcagaaggttgtgctcccctctgatgttacccggtaccagctggatggcctgcagcctggtactgagtacaggctcacactgtacacactgctggagggtcacgaggttgcgaccccagcaactgttgtgcctacaggccctgaactccccgtaagtccagttacagatctgcaggcgacggagctaccaggacagcgggtgagggtctcctggtcaccggtgccgggagctacacaataccgtataatcgtgcgaagtacccagggggtagagaggaccctagtccttcctggcagtcagacagcgtttgatctcgacgacgtgcaggcagggctatcctataccgtacgagtgtccgcccgcgtgggaccgcgtgagggtagcgcgagcgtcctgacagtgcgtagagagccagaaaccccgttggcagttcccgggctgcgagtggtcgtctctgatgcaactcgggtgagagtggcttggggtcccgtgcccggagcaagcggattcaggatcagctggagcacagggagtggccctgagtcgtcgcaaaccctgcctccagattccaccgcaacagatattactgggctgcagcccggcaccacatatcaggtggctgtttcagtccttagaggtcgagaggagggtcccgccgccgtaatcgttgctcgcacggatccacttgggccagttcgcaccgtccacgtgacacaggcctcttcttcttccgtaaccattacctggactagggtgccgggggccaccggttatcgggtttcatggcactccgcccacggtccagagaagagtcagttggttagcggcgaggccactgtggccgagctggatgggctcgagcccgataccgagtacaccgtgcatgtgcgagctcatgtcgccggagtggacggaccccctgctagtgtcgtggttaggacagcccccgaacctgtggggagagtctcaagactgcagattctcaatgcaagctcggatgtccttagaataacttgggtcggtgttaccggtgctaccgcatacaggctggcctggggacgaagtgaaggaggacctatgagacatcaaattcttcccggcaatacagattcagccgaaattaggggactggagggaggagtgagctacagtgttcgggtgacggccctcgtgggtgacagggaaggtacacccgtgagcatagtggtgactaccccccctgaagctccacccgctctgggtacactgcatgttgtgcagagaggagagcattccctgcgactcaggtgggaaccagtcccgcgagcccagggcttcctactccattggcagcccgaaggcgggcaagagcaatccagagtgctcggacctgaattgtcctcctatcacctggatggtctcgagcccgcaacacagtatagagtcaggctttcagttctgggaccagcaggtgaggggccttctgccgaggtgacagcccgaacagaatctccccgcgtccccagcatagaactgagggtggtggataccagcatcgatagcgtgaccctggcctggactcctgtaagcagagcaagctcctatatcctaagctggagacctcttagaggacccggacaggaagttccagggtctcctcaaaccctcccgggcattagctcatctcagcgggtaacaggcctcgagccaggcgtttcctacatattctctctgacccccgtcctggacggtgttcggggcccagaggcttccgtgacccaaactcccgtctgcccccgtggcctggccgacgtcgtgtttttaccgcacgccacccaggataatgcccaccgagccgaggcaacccgacgagttctggaacgcctggtgctagctctggggcctctcggtccacaggccgtgcaagtgggcctgctgtcttactcacaccgacccagccctctattcccgctgaacgggagtcacgatctgggaataatcctgcagcggataagagacatgccttacatggacccttcagggaacaatctcggcactgcagtagtcaccgctcaccgttacatgcttgcgccagatgcaccgggcagaaggcagcatgtgccgggcgttatggtactgctggtggacgagcccctgaggggagacattttctcgcccatacgggaggcccaggcgtcggggctgaatgtggtaatgctgggaatggccggcgctgatccagagcagctgagacggcttgcaccaggaatggactctgtgcagaccttctttgccgtggatgacggccctagcctagatcaagcagtgtccgggcttgccaccgccctttgtcaggcttccttcaccactcagcctcgccccgaaccctgcccagtttactgcccaaaagggcagaaaggggagcctggtgaaatgggactgcggggacaagtggggcctcccggcgatccgggactgcctggtcgcacaggcgctcccgggccgcagggtccccctggaagcgcaactgccaaaggggaacgtggtttcccaggtgcggacgggcgtcctggatccccaggaagagctggtaacccaggcacgccaggagcaccaggtctgaagggtagtcctggactccctggacccagaggtgatcctggcgaacgggggccccgcggaccaaaaggagagcccggagcaccagggcaagtcattggcggtgagggtcctgggctacctggtcgcaagggagatcctgggccaagcggcccaccagggccacgggggcccctcggagacccaggcccaagagggccacctggcctgccaggcacagcgatgaagggggacaagggcgaccgaggcgaaagagggccacctggccctggcgaaggaggaatagcccccggagagcccgggctccctggattgcccggttccccgggaccccagggccctgttggacctccgggcaagaagggcgagaaaggcgattcagaggatggggcacccggtctgccaggacagccggggtcacccggcgaacaggggccaagggggcccccaggcgcaattgggcctaaaggggatcgaggatttccaggacctctcggggaagcaggcgaaaagggagagcgcggccccccaggaccggccggctctcggggactgccaggtgtggccggtagaccaggggcaaaggggcctgagggcccccccggtcctacaggccgccagggcgaaaaaggagagccaggacgcccaggggaccctgcagtggttggacccgcagtggcggggcccaagggcgaaaaaggggatgtgggaccggcaggcccccggggagccaccggagtgcagggcgaacgggggcctccgggtctggttctgccaggagatcctggtcctaaaggagacccaggggatagaggaccgatcggactcacgggccgcgctggcccccctggtgatagcggtccgcctggggagaagggtgatccaggtagacctggcccccctgggcccgttggacccagaggcagggacggtgaggtgggggaaaagggagacgagggtccaccaggtgaccctggactccctggtaaggctggcgagcgtgggctgaggggggcgcctggcgtccggggtcctgttggggaaaagggagaccaaggggaccccggcgaagatggtcggaacgggtccccaggatccagtggacccaagggagacagaggggagccaggcccccccggaccaccagggcgtcttgtagatacaggtcccggcgcaagggaaaagggcgagcccggcgaccgggggcaggaggggccgcgaggcccaaagggtgatcctgggcttccgggagccccaggcgagaggggaatcgaaggcttcagaggacctcccggtccacagggagaccctggagtcaggggccccgccggcgagaaaggggaccgaggaccaccggggctcgatggtagatcaggcttagacggcaaacctggagctgccgggcccagcggacccaacggcgctgccggcaaggccggtgaccccggccgggatggactacccggcctccgcggggagcaaggtcttccaggcccttctggaccccccgggctccctgggaaacctggcgaggacggcaaacctggactgaatgggaagaatggcgagcccggagacccaggagaggacggccgcaagggcgagaagggcgatagtggagcttcgggaagagagggacgggacggacccaagggcgaacgtggagcccctggtatactgggtccccaaggcccccctggcctgccaggccctgtggggccacccggtcagggattcccaggcgtgcctggtggcactgggcccaagggtgataggggcgagacaggcagcaaaggagagcagggactgccaggcgagcgggggttaaggggcgaacccggctccgtcccaaatgtggaccgactgctggaaacggcaggaattaaggccagcgccctcagggagattgtcgagacctgggacgagagtagcgggagcttcctccccgtgcccgagagacgaaggggccccaaaggggacagcggtgagcagggcccacctggcaaggaagggcctatcggcttccctggcgagcgaggactgaagggggataggggcgatccgggcccacaaggaccaccaggattggccctgggggaaagaggaccccctggaccgtcaggcctcgctggagagccaggcaagcccggcatcccgggactgcccggccgagcaggaggcgtgggggaggccggtcgtcctggcgagcgtggggaacgaggggaaaaaggggagagaggtgagcagggcagggacggtccacccggccttccgggcacccccggaccgcctggtccgcctggcccaaaagtgtccgtggatgagcccggcccaggacttagcggcgagcagggacctcctgggctgaagggcgccaaaggcgagcctggctcaaatggagaccaaggccctaagggcgataggggggtaccaggtatcaagggagaccgcggcgaaccaggtccaaggggccaggacgggaatcctggtctgcctggggagagggggatggcagggcctgaaggaaagcctggcctgcaaggacctcgaggccccccaggccccgtgggagggcatggggatccaggccctccaggcgcgcctggcctggccggccccgccgggcctcaggggccttctggcttgaagggagagccgggggaaaccgggcctcccggcagaggtctgacaggacccactggagctgtcggactgcccggaccacctggcccgtccgggcttgtgggtcctcaaggctcgccaggcctccctggacaggtcggcgagaccggcaagccgggtgctcccggcagagatggagccagtggcaaggatggagaccgtggcagtcccggggtccccggctcacctggccttcccgggcctgtaggcccaaagggggagcccgggccgactggcgcgcccggccaggcagtggttgggcttcccggggcaaagggcgaaaaaggagcgcccggcgggctggctggggatcttgtgggtgagccgggggcaaagggtgatcgaggtctccctgggcctcgaggtgagaagggagaagccggaagagccggcgagccgggggaccccggagaggacggtcagaaaggcgcccccgggccaaagggttttaaaggggatcctggagtcggtgtccccggtagtcctgggccacccggcccacccggcgtcaagggcgacctggggttgcctgggttaccaggggctcccggtgtggtcggcttccccggacagaccgggccccgtggtgagatggggcagccaggcccttccggggagagggggttggctggcccccctgggcgggaggggatccccgggcctctgggcccccctgggccacccggatctgtcggtccccctggtgcctcgggcctaaagggggataaaggggatcctggcgttggtttacctggaccacgaggagaacgtggggagcccggcatccggggtgaggacgggaggccgggtcaagagggcccacgtggcttgaccgggccacccggatccaggggggagcgcggcgaaaaaggagacgtcggatcagctggtctgaagggggataaaggcgattccgcggttatcctcggaccaccgggaccaaggggagcgaaaggcgacatgggcgagagaggacctagaggcctggacggagacaaaggaccacgcggggataatggtgaccctggggacaagggtagcaaaggagagccaggagacaaaggcagcgctgggcttcctggactgagaggcctgttgggccctcaggggcagccaggtgcagctggtatcccgggcgacccagggagcccaggcaaagacggggtgccgggaatcaggggagagaaaggagatgttggctttatgggaccacggggcttgaagggtgaaaggggagttaaaggagcctgtggcttggacggcgaaaagggcgataagggggaggccggccccccaggcagacctggacttgcaggccacaagggcgaaatgggggagccgggggtaccggggcaatctggagcccctggtaaagagggcttgattggccccaaaggtgaccgagggttcgacggccagccaggacctaagggcgaccagggagagaaaggtgaacgaggcactcctgggatcgggggcttccctggccctagcgggaatgatggaagcgcgggtccgcccggtccgccaggctccgttggaccgagagggcctgaagggctccaaggccagaaaggcgaacgtggccctcccggagaaagggtagtgggtgcccctggagttcctggcgcgccgggtgagcgtggagagcagggacggccaggacctgcaggtcctaggggcgagaaaggcgaggctgcgctgactgaggacgatataaggggcttcgtgagacaggagatgtcgcagcactgtgcatgccagggtcagttcattgcttctggatctagaccactgccgtcctacgccgcagacacggccggaagccagttacacgctgttcctgtgttaagagtgagccacgccgaggaagaagaaagagtgcctccagaggacgatgagtactctgaatacagcgagtacagtgtcgaagaataccaggaccccgaagccccctgggatagtgatgatccctgtagtttgccgttggacgagggatcatgcactgcctatacactgagatggtaccaccgggcggtgacaggctctacggaggcgtgccaccccttcgtctacggcggctgtgggggaaatgcaaacaggtttggtacacgggaagcttgcgagaggagatgtccccccagggtggtgcaaagtcagggcaccggcaccgcccaggac

SEQ ID NO: 1508 - DNA, 8832 bp, Artificial Sequence
  derived and/or modified sequence
atgactctccggctcctggtggccgctctctgtgccggtatcttggccgaggcaccgcgcgtgagggcccagcacagagagagggtgacttgcacccgactttacgccgctgatatcgtctttctgctggacggctcgtcgagtatcgggcggagcaacttccgggaggtgcggagcttcctggaaggccttgtgttgcccttctctggagccgcgagcgctcagggcgtcagattcgctactgtccagtactcagacgacccgagaaccgaattcggacttgacgctctgggctcaggaggagacgtgattcgcgcaatccgcgaactctcatataaaggcggaaacacgcggacgggagcggctatcctccacgtcgcggatcatgtgttcctgccgcagctggcacgcccaggagtgccaaaagtgtgcatcctcattaccgatggaaagtcgcaagacctggtggacaccgcggcacagcgcctgaagggccaaggagtgaagctgtttgctgtgggtatcaagaacgcggacccagaagaactgaaacgcgtcgcgtctcagccgacttcggactttttctttttcgtcaatgatttctccattctgaggactttgctccctcttgtgtcacgccgcgtctgcactaccgccggaggagtgcctgtcacccggccgccagacgattccacctcagcaccgagagatcttgttctgagcgagccgtccagccagtcactgagggtccaatggaccgccgcttcgggaccagttaccggatacaaggtgcagtacactcctttgaccggactgggacaacctttgccgtccgaaagacaggaagtgaacgtgccggccggagagacttcagtgcggcttcgtggactgcgcccactgaccgagtaccaagtcacggtgatcgcgctttacgctaattctatcggagaggccgtgtcgggcactgcgcggaccaccgctctggaggggccggaactcacgatccaaaacactacggcgcatagcctcctcgtggcctggagaagcgtgcccggcgcaaccggataccgagtgacctggagagtgctgtccggcggacctacccaacagcaagaattgggtccgggacagggatccgtgttgcttcgggatctcgaaccaggcacggactacgaggtgactgtgtcaactctgttcggccggtccgtcggtcccgccacctcgctgatggcgagaaccgacgctagcgtggagcaaaccctgcggccagtcatcctcggtccaacttccatcctcctgtcctggaatctggtcccggaggcgaggggctaccggctggagtggagacgcgaaactggcctggagcctccgcaaaaggtggtcctgccaagcgacgtgactcggtaccagttggacggtctgcagccaggaaccgagtaccggctgaccctctacaccctccttgagggacacgaggtggccactcctgccaccgttgtgccgaccggtccagagctgccggtgtcgcctgtgaccgaccttcaggctactgagctcccgggtcagagagtgcgggtgtcgtggagtccggtccctggcgctactcagtacagaatcatagtccgcagcactcaaggcgtagaacgcaccctggtgctcccgggatcgcagaccgcgtttgatctggacgacgtgcaggcaggactctcctacactgtgagggtttccgcgcgcgtgggtccccgggagggatccgccagcgtgctcacggtgagaagggaaccggaaactcccctcgctgtgccgggactgcgcgtcgtggtgtcggacgccaccagagtgcgggttgcctggggtccagtgcctggagcctcgggattccgcatttcctggtccaccgggagcggaccggagagctcgcagaccctgcctccggactcgactgcaaccgatatcactggactgcagccgggcactacctaccaagtggcagtctccgtgctgcggggtcgcgaggagggaccggcagccgtgattgttgcacgcactgacccgctcggcccagtcagaactgtccatgtgactcaagcgtcgtcgtcgtcagtcaccatcacctggaccagggtgccgggggccaccggctaccgagtctcgtggcactccgcccacgggcccgagaagtcccaactggtcagcggggaggccactgtggcagagctggatggacttgagccggacactgaatacactgttcacgtgcgggctcatgtcgctggagtggatggcccaccagcatccgtcgtggttcggaccgcccctgagcctgtcggaagggtcagccgactccagatcctgaacgcatcctcagatgtgctgagaatcacctgggtcggggtgactggcgctactgcgtatcgcctcgcctggggaaggtccgaagggggaccgatgagacatcaaatcttgccaggcaatactgatagcgcagaaatccgcggcctcgaaggtggtgtttcatactccgtccgggtgacggctctcgtcggggaccgggagggaacccctgtctccatcgtggtgactacccctcccgaggcaccaccggccctgggaactctgcacgtcgtccagcgcggtgagcattcccttcgcctcagatgggaaccggtgccccgggcgcagggatttctcctgcactggcagcctgagggtggccaggagcagtcccgggtcttgggaccggaactgtcgtcctatcatctggacggacttgaaccggccacccaataccgtgtgcgcctttccgtgttgggaccagcgggagaaggaccatcggctgaagtcactgcccgcactgaatccccgcgcgtgccttcgattgagttgcgcgtggtggacacttcgattgactccgtgaccctggcgtggaccccagtgtcccgcgcatcctcatacatcctctcgtggcgcccgctgcggggacctggccaagaagtgcctggctcgccccagactctgccaggaatctccagctcgcagagagtgaccggactggagccgggagtctcctacatcttctctctgaccccggtcctggatggcgtgcgagggccggaagccagcgtgacccagactccagtgtgtccgaggggactcgccgatgtggttttcctgccccacgccacccaggacaacgcgcaccgagccgaagcgactcgccgcgttctcgaacgcctcgtgctcgccctgggaccgctgggcccgcaggccgtgcaagtgggactgctgtcctactcacaccggccgtccccgctgttcccgctgaacggttcacatgatctcggcatcatcttgcagagaattcgggacatgccgtacatggatccgtccggaaataatttgggaacggccgtggtgactgcccacagatacatgctggcaccagacgcccccggacgcagacagcacgtgcctggggtcatggtgcttctggtggatgagccccttcgcggtgatatcttcagcccgatccgtgaggcccaagcctcaggactcaatgtggtgatgctcggaatggccggcgccgatccggagcaactgcggcgcctcgccccaggaatggactcggtgcagaccttcttcgcggtggacgacggaccgtcactcgaccaggccgtgtcgggactcgcgaccgccctctgccaggcgagcttcaccactcaacctcgcccggagccttgtccagtctactgccccaagggacaaaagggtgaaccaggggagatggggctccgcgggcaagttggccctcccggcgacccgggtctgccaggaagaaccggtgcgcccggcccgcaaggaccgccaggatcagccaccgccaagggagaaaggggatttccgggagccgacggccggccgggaagcccaggccgcgccggtaaccccggaactcctggcgccccaggtctgaagggaagccctggactgccaggcccgcggggcgacccgggcgaaaggggaccgcgtggcccgaagggggagcccggggcaccgggacaggtcatcgggggagaaggtccgggattgcctggcagaaagggggacccagggccgagcggccccccaggaccgagagggccacttggtgaccccggaccacgcggaccaccaggactcccgggcactgccatgaaaggagacaaaggcgacagaggagaacgaggaccacctggacccggcgaaggaggaatcgctccgggcgagccaggattgcctggactgccaggttcaccaggaccccaaggaccggtcgggcctccaggcaagaagggcgagaagggagactccgaagatggagcccctgggctgccggggcaacccggatcgccaggtgaacagggccctcggggccctcctggagcgatcggtccaaagggagatcggggattcccggggcctctgggcgaggctggagaaaagggagaacgcggaccaccggggccagccggttcgcggggtctgcctggtgtcgccggtagaccaggcgctaagggtccggaaggaccgcctggaccaaccggacggcaaggcgagaagggggaaccggggcggccaggagatcctgccgtggtgggcccggcagtggccggtcccaaaggtgaaaagggcgatgtggggccagccggaccgaggggagccactggtgtgcaaggagaaaggggtccaccgggattggtgctgccgggcgatccgggccccaagggagatcctggggacagaggaccaatcggtctgaccggaagggcgggaccaccaggagactcgggaccaccgggcgagaagggcgacccgggaaggccgggcccaccgggcccggtggggcctcggggtagggatggagaagtgggcgagaaaggagatgaaggaccgccgggggatcctgggctgccgggaaaggcaggggagcgcggcctcagaggtgcgccgggagtgaggggcccagtcggagaaaagggggaccagggcgatccaggcgaggacggccgcaacgggagcccgggttcctcgggaccgaaaggtgaccggggagaacctgggccgccgggtccccctgggagactggtcgacaccggccctggagcccgggaaaagggtgagccgggggaccgcgggcaggagggccctcggggcccaaagggggatcctggactgccgggcgctccgggagaacggggaatcgaaggatttcggggaccgccgggcccgcagggggacccaggggtgcggggaccagccggtgagaagggtgaccgcggcccgcccggactcgacggtagatccgggctggatggaaagcctggagcggctggcccgtctgggccgaacggagcggcgggaaaggcaggagatcccggacgcgacggactccctggactccggggagaacagggattgcctggaccgtcagggcccccaggcttgccgggaaagccgggagaagatggcaaaccagggcttaacggcaaaaacggagaaccgggggacccgggagaagatggtagaaagggcgaaaaaggagactcaggagcatcgggacgggaaggccgggacggacccaagggcgaacgcggggcgccaggaatcctgggaccgcagggacctcctggcttgccaggccctgtgggccccccgggccaggggttcccaggcgtgcccggagggacgggcccgaaaggagatagaggagaaaccggttcaaaaggagaacagggtctgccaggagaacggggactgagaggagaaccgggaagcgtcccgaatgtggataggttgctggaaactgcaggaatcaaggcgagcgcactgcgcgaaatcgtggaaacttgggatgaaagctccggatcattcctgccggtcccggagcggcgccggggacccaagggtgattctggcgaacagggccccccggggaaggaagggcctattggattccccggcgaacgcggactgaagggggatcgcggcgacccaggaccgcaaggcccgccaggcctggcgctgggagagcgcggaccgccgggtccatcaggactggcaggagaacccggaaagccggggatcccaggactcccgggccgcgcaggcggcgtcggcgaagccggacgaccaggagagcgcggggagagaggagaaaaaggagagcgcggcgagcaaggacgggacggcccgccagggctgccaggaaccccgggccctccggggccgccagggcctaaggtcagcgtggacgaaccgggaccgggcctctcaggagagcagggaccgcccgggctgaagggcgcaaaaggcgagcctgggtcgaacggggatcagggcccgaagggagatcggggcgtgcctggaattaagggtgaccggggtgagccgggaccgcgcggtcaagacggaaacccagggctccctggggaacggggcatggctggacccgaggggaagccagggctccaggggccacgcggaccgccgggcccggtgggaggacacggcgacccgggaccgccaggcgctccaggactcgctggaccggccggcccgcaggggccgtcgggtctgaaaggagaacccggagagacgggaccgccggggcgaggacttactggccccactggcgcagtgggcctgccaggtccaccgggaccttcaggtcttgtgggaccccagggctcccctggcctgcccggacaggtcggagaaactggaaagcctggggcgcccggaagagatggcgcatcgggaaaggacggcgaccgcgggagccccggtgtgcccggatcgcccggcctcccgggacctgtcgggccaaagggagaacctggacctactggtgcaccgggacaggcggtggtgggactgccgggagccaaaggagaaaaaggagcgccgggaggtctggctggtgatctggtgggggaacctggggccaagggcgaccggggacttccgggaccgagaggagagaaaggagaggccggccgcgccggagaacccggagatcctggagaggacggacagaagggagcgcctggaccgaaaggattcaagggagatccgggagtgggcgtcccgggttcaccaggaccgcccggccccccgggagtgaaaggtgacctggggctgccgggtctgccaggcgcgcccggggtcgtaggattccctgggcaaaccggaccgcgcggagagatgggacaaccaggcccatcaggggagcgcggactcgcgggaccaccgggtcgcgagggtatcccgggccccctcggaccacctggtccaccgggatcggtgggaccgccgggggcaagcggcctcaaaggcgacaagggagatccaggagtgggcctgccaggacccagaggcgagcgcggagagccgggaatccgcggggaggatggaaggccgggccaggaaggaccacgggggctgaccgggcctccgggctcgcgtggagaacggggagagaagggggacgtgggatcagctggactgaagggcgacaagggagacagcgcagtcattctggggcctccgggacctcgcggggccaagggagacatgggcgaacgcggaccgaggggtctggacggggacaagggaccgcggggcgataatggggatccaggcgacaagggatccaagggagaacctggagacaagggatcggcaggcctcccaggactgcgcggtttgctgggcccacagggccagccaggagccgccggaatcccgggtgaccctggctccccggggaaagacggagtgccaggaatcaggggagaaaaaggggacgtgggcttcatgggacccagaggcctcaagggcgaacggggagtgaagggagcgtgtgggctcgacggagagaagggagacaaaggtgaagccgggcctccgggtcggccgggcctggcaggccacaaaggcgaaatgggcgagcctggagtccccggacagagcggagccccaggaaaagaagggctgatcggaccaaagggagatcgaggcttcgacgggcaacctggcccgaagggtgatcagggagaaaaaggagaacgcggtaccccaggaatcggaggctttccaggaccctcaggcaacgacggaagcgcgggcccgccaggaccgccagggtcggtgggaccgagaggacccgaaggactgcagggacagaaaggcgaacggggacctccaggtgaacgcgtggttggtgcgccgggagtaccgggcgctcctggtgaaagaggtgagcagggacgcccgggacccgccggacctcgcggagagaagggagaagcggctcttaccgaggatgatatccggggattcgtgcgccaggaaatgtcccaacactgcgcctgtcaaggccaatttatcgcctcgggttcgaggccactgccgagctacgcagctgatacggccggatcacagctgcatgcagtcccggtcctcagggtgagccatgcggaagaggaagaacgcgtcccgccggaggacgacgaatacagcgagtattccgaatactcggttgaagagtaccaagaccctgaagcaccctgggattcggatgacccgtgcagcttgcctctggacgaaggctcgtgcacggcttacaccctccggtggtaccaccgcgccgtcaccggttcgacggaggcatgccatccttttgtctacggcggatgcggtggcaacgcgaatcggttcggaaccagggaggcctgcgagagaagatgcccaccgagagtggtccagtctcaaggaacggggactgcccaggat

SEQ ID NO: 1509 - DNA, 8832 bp, Artificial Sequence
  derived and/or modified sequence
atgaccctgagactgcttgtcgcggccctttgcgccggcattctcgccgaagccccccgtgtgagagcgcagcaccgcgaacgtgtgacctgcacgcgattgtacgccgcggacattgtgttcttgttggatggttcgtcctcgattggacggtctaattttcgagaagtgcgcagcttcctagagggactagttctgcccttttcgggtgccgccagcgcacagggagtccgcttcgctacagtgcagtacagcgacgacccacgaacagagtttggactggacgcgttaggtagcggcggggatgtgatccgagccattagggagctgtcttataaaggaggtaatacgaggacaggggcagctattttgcatgtggccgatcatgtgtttctcccgcagttggctcgcccgggcgtaccgaaggtgtgcatattgataactgacggtaagtcccaggatcttgtcgatactgccgctcagcgattgaagggacagggagtaaagttatttgcagtaggaatcaagaacgcggatccagaagagctgaagcgggtagcctctcagcccacgtcggatttctttttcttcgtgaatgacttctccatccttcgcaccctgttaccgctggtgagcaggcgtgtgtgtaccacggccggtggagtccctgttacacgtccaccggacgattcgacatccgccccccgagacttggtgctaagcgaaccgtccagccagtcgctgcgagtgcagtggacggcggcctctggcccagttaccggctacaaggtacagtacacgccgctgacaggactgggtcagcccctcccgagtgagaggcaggaagtaaacgtgccggccggcgagacttccgtgcggctgcgcggattgcgccccctcacggagtatcaggtgacggtgatcgctttgtatgcgaacagcatcggcgaggcggtgtcaggcacagcgcggaccactgctcttgagggacccgagcttactattcagaatacgacggctcacagtctgctagtagcctggcgcagcgtccctggtgccacaggctaccgcgtgacatggcgtgtcctatcgggcggaccgacgcaacaacaagagttgggaccaggacaggggtcggttctgttacgcgatctagagcccggaaccgattatgaggtgactgtctcgaccctgttcggacgctccgttggccccgcaacgtcgttaatggcgcgcacggacgcaagtgtggaacagaccttgcgtcccgtaatcctgggtccgacgagcatcctgctgagctggaacctagtgcccgaggcccgcggataccgtttagaatggcgtcgtgagaccggcctcgaaccaccgcagaaggtagtgctgccaagcgatgtcacacggtatcagctggatggactgcagcccggaaccgagtatcggctcactctgtacaccctattggagggacatgaggtagccaccccggccacggtggtgcccactggccccgagctgcccgttagtccggttaccgatctgcaggccactgagctccccggccaaagggtccgtgtgagttggtcccccgtgcctggcgctacccagtaccgcattatcgttcgtagcacacagggcgtggaaagaacactggtgctccccggctcccagacggccttcgatctcgatgatgtgcaagctggccttagctacaccgtgcgggtgtctgcacgtgtaggaccaagggagggatctgcatccgtactcactgtccggcgcgagccggagacccccctggctgtgcccggcctgcgagtagtcgtttcagatgcgactcgtgtgagggtggcatggggcccagtccctggcgcctccggattcagaataagttggtcgacaggatccggtccagaatccagtcagaccttgccgccggactcaaccgcaacggatattaccggcctgcagcccggtaccacctatcaagttgcggtttccgtgttgcgcggccgcgaggagggccccgccgcagtgatcgttgccaggacggaccccctgggcccggtccgcacagtccacgtgacgcaagcttcgtcgagctctgtaactatcacctggacccgagttccaggagccacgggctacagggtaagttggcactcagcgcacggtccagagaagtcccagttggttagcggagaagcaactgttgccgaactggacggtctggaacccgatacagagtataccgtgcatgtgcgcgcccacgtggcgggggtggacggcccccccgcgagtgtcgtggtgcgcacggccccggagcccgttggtcgtgtgtcgcgtctacagatactgaacgcttcgtccgacgtcctccgaataacgtgggtcggcgtgaccggagccaccgcatacagattagcatgggggcgctccgaaggtggacctatgcgccaccagatcctaccgggcaacacagattcggcagagatccgcggtttggaaggtggcgtcagctactcggttcgagttacggcactcgtaggcgatcgcgagggaacccccgtcagtatcgtggtgacaaccccgccggaggcccccccagctctggggaccctccacgttgtgcaacgcggcgaacattccctgcgcctgaggtgggagccggttccaagagcccagggattcttgttacattggcagccagagggaggtcaggaacagagtcgagtgctcggccccgagctttctagctatcacttggacggactggagcccgccacgcagtatcgggtccgcctgtccgtgttgggccccgcgggtgagggaccgtccgccgaagttacggcccggaccgagagtccgcgcgtgccatcgattgagctgcgcgtcgtggataccagcattgacagtgtgacgctggcctggacacccgtctcgcgcgccagctcgtatattctgagttggcgccccctgcgcggcccaggtcaggaggtgccgggaagtccgcagacactgccaggaatcagctctagtcaaagagtgacgggcctggagccaggagtgtcctacatcttttctctgacccccgtgttggacggtgtgaggggcccggaagccagcgtcacgcagacacccgtgtgccctcgaggcctagcagatgttgtgttcctgccccatgccactcaagataacgctcaccgcgctgaggccacacgacgggtcctagagaggctggtcctggccctcggccccctgggcccacaggccgtccaagtgggtcttttgtcatacagtcacaggccaagcccactgttcccactgaacggtagccacgacttgggtataatactccagcgtatcagggatatgccctacatggatccatcaggaaacaatctgggcacggcagttgtaacggcgcatcgttacatgctggctcccgacgcaccaggtcgcaggcagcacgtgccgggcgtgatggttctgctggtggacgagccactgagaggcgacatcttctcgccgatccgcgaagcccaggcgagtggcctgaacgtggttatgttgggaatggcgggtgccgacccggaacagctgcgacgactggctcccggaatggattcggtgcaaacatttttcgccgtcgatgatgggcctagcctagatcaggccgtgtctggactggctacggcgctgtgccaagcatcgttcaccacccagccgcgccctgagccgtgtccagtgtattgcccaaagggccagaagggtgagccgggcgagatgggactcagaggacaggtgggaccccccggcgatccaggactgccgggacgaactggtgctccgggaccccagggccctccgggctcggccaccgcgaaaggcgagaggggctttcccggagcggacggacgtcctggctcgcccgggcgtgccggaaatcccgggacaccaggtgctccaggtctaaagggaagccccggcctcccgggaccacgcggtgatccaggagagcgagggccgcgtggcccgaagggcgaaccaggcgccccaggccaggtcatcggaggagagggccccggtctaccgggacgcaagggcgacccgggcccgtcaggaccccccggtccccgaggacctctgggagaccctggccctcgtggtcccccaggcctacctggtaccgcgatgaaaggcgataagggggatcgtggggagcgcggcccgccaggcccgggcgagggaggtatagctccgggagaaccgggactgccgggtctcccaggctccccgggaccacagggtccagttggtcccccgggaaagaagggcgagaaaggcgatagcgaggacggtgctcctggactgcccggtcaacctgggagcccgggagaacagggcccccgcggacccccgggcgcaataggcccgaaaggggatcgcggattccccggcccgttaggcgaagccggcgagaagggcgagagaggccccccaggcccggcgggctcccgcggtctgccgggcgtcgccggtcgcccgggcgctaagggtccggaaggcccccctggtcccacaggacggcagggtgagaagggcgagcctggacgcccgggtgatccggcggtggtaggaccagcggtggctgggccaaagggagaaaagggcgacgtaggccccgcaggtccccgaggagccaccggggttcaaggcgagcgaggccctccgggtcttgtgctgccaggcgaccctggacccaagggggatcccggagatcgcggacctattggactgacgggacgtgccggaccacctggagattctggtcctccgggagagaagggcgacccaggccgtccgggcccaccgggaccggtgggtcctcgtggccgggatggggaggtaggtgagaagggcgacgaagggccaccaggtgacccaggactcccgggaaaggccggagagcgcgggctgcgcggtgccccaggggttcgcggacctgtgggcgagaaaggggaccagggtgatcctggcgaagacggtcgaaacggttcgcccggatcctcgggcccgaagggtgaccgtggcgaaccgggaccgccgggcccgcccggccgcttggtggacactggaccgggcgcgcgcgaaaagggcgagcctggtgaccgaggacaggagggcccgcgcggcccaaagggagatcccggactacccggcgctccaggcgagcgtgggatagagggttttagaggaccgccaggaccacagggggaccctggcgtgcgtggtccggccggagaaaaaggtgaccgcggcccccccggattggacggacggtcggggttggatggcaagcccggggctgcgggcccgtcaggaccaaacggcgcagcaggtaaggctggcgatcccggtcgggacggactgcccggcctccgaggcgaacagggtctgccggggcctagcggaccccccggattgccgggaaagcccggcgaggacggaaagcccggcctgaacggtaagaacggagagcctggagatccaggagaggacggccgcaagggcgagaagggcgattccggcgccagcggccgcgaggggcgcgatggacccaagggagagcgcggtgcgccgggcatcttaggcccccagggtccgccgggtctgccaggtcccgtgggtccgccgggacagggcttccctggagtgccaggaggcacagggccaaagggcgatcgcggagagactggttcaaagggtgagcagggcctgcccggagagagagggctgcgtggagagcccggtagcgtaccaaacgttgatcgcttgctggagactgctggcattaaagccagtgctttgcgtgagatcgtggagacatgggacgagtcgtcgggcagcttcctaccggtgccagagcgtcgacgaggcccaaagggggattccggcgagcagggcccccccggaaaggaaggcccaatcggtttcccgggagagcgggggctgaagggcgatcgtggagaccccggaccgcagggaccgcccggcttggcactgggcgagcgtggcccacccggcccgagcggtctggcgggcgagcccggaaagccgggtattccaggcctccccggacgcgcaggcggcgtgggtgaagccgggcggcccggagagagaggagagaggggagaaaagggggagagaggcgaacagggccgcgatggacctccgggcctccccggcaccccgggtcctcccggacccccgggcccgaaggtgagtgtcgatgagcccggcccaggtctgagcggagagcagggaccaccaggtctgaaaggcgcgaagggagagccgggcagtaacggcgatcagggacccaagggagatagaggcgtgcctggaatcaagggcgatcggggagaacccggcccccgcggccaggatggtaatccgggattacctggcgagcgcggaatggccggccccgagggcaaacctggattgcagggcccccgaggaccaccgggtcccgttggtggacatggagatcccggcccgccgggagcgcccggcctcgcaggtccggctggccctcagggcccaagcggattgaagggagagccgggcgagacgggtcccccgggacgtgggctgacaggcccgaccggcgccgtgggactgccaggacccccaggccccagcggtttggtgggaccacaaggctcgccaggcctgccaggccaggtcggcgaaaccggcaagccaggtgcgccaggacgcgatggggcatcgggaaaggatggtgaccgaggtagccccggcgtacccggaagccccggcttacccgggcctgtgggaccaaagggcgagcccgggccaaccggcgccccaggccaggccgttgttggtctccccggtgccaaaggcgagaagggcgccccgggaggcttggccggtgacctggtgggtgagccgggggccaagggagaccgaggactgcccggcccacgaggtgagaagggggaagctggccgtgcaggcgagccgggagatcccggagaggacggccagaagggggcacctggtccaaaaggcttcaagggcgatccgggcgtgggagtgccaggatcgcccgggccaccgggcccccctggtgtcaagggtgacctgggcttgccgggcctgccaggagcgccaggcgtggtcggattccccgggcagacaggtccgcggggcgagatgggacagcccggcccaagcggcgaacgcggcctggcgggtccgcccggccgtgagggcatacctggccccctggggccaccgggaccccccggctccgtgggacccccgggcgcttcgggtctgaagggcgacaaaggagatcccggcgtgggactgcctggcccgcgaggagagagaggcgagccgggaatacgaggagaagacggtagacccggccaggagggtcctcgcggcctgacgggacccccgggaagtcgaggagagcgcggagaaaagggcgatgtcggtagcgcaggcttgaaaggagacaagggcgattcagcagttatcttaggaccgcccggcccacggggcgccaagggagatatgggtgaacgcggaccccgcggcctggacggggacaagggtcccagaggcgataatggagatccgggcgacaagggaagcaaaggtgagcctggcgacaagggctcggccggcttaccgggccttcggggattgctggggccccagggccaacctggcgcggccggcatcccgggcgatccggggagcccaggaaaagacggagtgcccggcatccggggagagaagggggatgtgggctttatgggcccacggggactgaagggcgagagaggcgtgaagggtgcttgcggacttgacggcgagaagggcgataagggtgaagcgggtccgcccggccgaccaggactggctggccataaaggtgagatgggagaaccgggtgtgccgggacagtcgggcgcgccgggtaaagagggcttgatcggccctaaaggtgatcgcggttttgacggccagccaggcccgaagggcgatcagggtgagaagggtgagcgaggcacccccggcataggcgggttccccgggccctccggcaacgacggatcggcgggcccgcctggacctcctggttctgtcggcccgcggggacccgagggactccaaggccaaaagggagagcggggtccacccggagagcgtgtagttggcgcgcccggcgtacccggagctccgggcgagcgcggggaacaaggccgccccggcccggctggcccccgaggcgagaagggggaggcagctctcaccgaagacgacatacgaggctttgttcgtcaggagatgtcgcaacattgtgcgtgtcagggtcaattcatcgccagcggctcccgtccgctcccgtcctacgcggccgacacggccggatcccaactgcatgcggtccccgtgctacgagtgtcgcacgcagaggaggaagaacgcgtgccgccagaggatgatgagtattcggagtatagcgagtacagtgtcgaagagtatcaggatcccgaggctccatgggattcagatgacccctgcagcttacccctggatgaaggatcctgtaccgcctacaccctacgatggtatcaccgtgccgtgaccggttccaccgaagcatgtcatcccttcgtctacgggggatgtggcggtaatgctaaccgcttcggcacccgcgaggcttgcgaaaggcgctgcccgccacgagttgtgcagagtcagggtacaggaacggcccaagat

SEQ ID NO: 1510 - DNA, 8832 bp, Artificial Sequence
  derived and/or modified sequence
atgactctgaggctgctggtggccgcattgtgcgctggaatcttggccgaagctccgcgggtgcgcgctcaacaccgggaaagagttacctgtacccggctttacgccgcagacatagtgttcctgctggacggcagctccagcattggaagatcgaactttcgggaggtacgatcgttcctggaagggttggtgctgccctttagtggagcagcctccgcccaaggagtgcggttcgccaccgtgcagtacagcgatgatccccggaccgaattcggattggacgcgctcggatcagggggagacgtcatccgggccattcgcgagctctcctacaagggagggaacactcggactggagctgccatcctgcatgtggcggatcatgttttcctgccccagctggcccgaccaggagtccccaaggtctgcatcctcataaccgacgggaaatcccaagacctggttgataccgccgcccagcgcctgaagggacagggtgtgaagttgttcgcggtaggaattaagaatgcggatccggaggagctgaagagagttgcctcccaaccaacgtcagacttcttctttttcgttaacgacttcagcattctcaggaccttgctgccgcttgtgtcaagacgcgtttgtaccactgccggcggggtgcccgtgactcggccgcctgacgacagcacttccgcaccgcgcgacttggtgctcagcgaaccaagctcgcagtcgctgagagtgcagtggactgcggcgtccgggccggtcactggatacaaggtgcagtacactccgcttaccggactcggccagccgctgcctagcgagcgccaagaagtcaacgtgccggccggggaaacctcggtccggttgcgcgggctgcgcccgctgaccgagtaccaggtgaccgtgatcgcattgtacgccaattcaattggcgaagcggtgtcgggaactgctagaaccactgccctcgaaggaccagaactgaccatccaaaacactaccgcgcattctcttcttgtcgcctggcgatcagtgcctggcgccacgggttaccgcgtgacttggcgcgtgctctcaggcggtccgactcaacagcaagaactcggcccaggacaaggttcggtgctcctcagggatcttgagccagggaccgattacgaagtcaccgtgtccactctgtttggacgctctgttggcccagccactagcctgatggccagaacggacgcaagcgtggaacagaccctgaggcccgtgattctcggacctacttcaatcctcctgagctggaaccttgtaccagaggcccggggttacaggctggaatggcgacgcgaaaccggattggaacctccacaaaaggtcgtgctgccaagcgacgtcactcgataccagctcgacgggctgcagccaggaaccgaatacagactgaccctctataccctgcttgagggtcacgaggtggcaaccccggccacggtggtcccaaccggcccggagttgccggtgtcgccagtgaccgacctccaggcgaccgaactgccgggacagagggtccgcgtctcgtggtcgccggtgccgggcgcgacccaatacaggatcatcgtcagatcgacccaaggcgtggagcgcaccctcgtccttccgggatcgcagaccgcgttcgatctcgacgacgtccaggccggactttcctacaccgtgagggtgtcagctcgggtggggccccgggagggatcggcatcggtgttgaccgtgcgccgcgaaccagaaaccccgctcgctgtcccgggcctgcgggtagtggtatcagatgcaactcgcgttcgggtcgcctggggcccagtgcctggagcctccggattccggatctcgtggtccactggaagcggccctgagtcctcgcaaaccctgccaccggacagcactgctacggatatcaccggactgcagcccggtactacctaccaggtggctgtatccgttctccgtggaagagaggagggcccggcagcagtgatcgtggcccgcactgaccccctgggaccagttcggaccgtgcacgttacccaggcttcgtcctcgagcgtgacgattacttggacccgcgtgcccggagctacgggttatcgagtgtcgtggcactcggcccacggacctgagaagtcccagctcgtgagcggcgaggccactgtcgcagagctggacgggctcgaacctgatactgagtacaccgtgcatgtgcgtgctcatgtcgcaggggtggatggacctccggcatcggtggtggtgcggactgccccggagccagtcggaagagtctcgaggctgcagatccttaacgcttcaagcgatgtgcttcgcatcacctgggtcggcgtaaccggagcaaccgcctatcgcttggcttggggccgctccgaaggaggacccatgagacaccaaatccttccaggcaatactgactccgccgaaatcagggggctggaaggtggcgtctcgtactcagtgcgcgtgacggcactggtgggtgaccgggagggcacgccggtcagcatcgtcgtgactactccaccggaggcaccgcccgccctgggaactctgcacgtggtccaaaggggcgaacatagcctgcgcctccggtgggaacctgtgccgcgggcccaaggattcctgctccattggcagcctgagggaggccaagaacagagccgggtgctgggaccggaactgtcctcctaccatttggacggtctggagccggccactcagtaccgcgtccggctgtctgtgctcggaccagccggagagggccccagtgcggaggtgacggccagaactgaatccccgagagtgccgtcgatcgaacttagagtcgtcgacacctccatcgatagcgttactctggcgtggactcctgtgtcaagagcctcatcgtacattctgtcctggcggccgctgaggggaccgggccaggaagtccctggcagtccgcagactttgcccggtatctcctcatcacaaagagtgactggactggaacctggagtgagctacatcttttccctcacccctgtactggatggcgtgagaggacctgaggcctcagtgacgcaaacccccgtctgtccgcggggcctggcagatgtcgtgtttcttccgcacgctacgcaggacaacgctcaccgcgccgaggccacccgccgcgtgcttgaaaggctggtccttgccctcggaccgttgggtccgcaggcagtgcaggtgggacttctttcctactcacaccgcccttccccactgtttcctttgaacggatcacacgatctgggaatcatactgcagagaatccgcgacatgccgtacatggacccgtcgggtaataacctgggaactgctgtggtgaccgctcatagatacatgctggctcccgacgcaccgggccgccgccagcacgtgccaggagtgatggtgctgttggtggacgagcccctgcggggggacatcttcagtcccatcagggaggcccaggcatcggggctgaacgtggtcatgctgggaatggcaggggcagaccctgagcaactccggcgactcgcaccgggtatggattcggtgcaaaccttcttcgcggtggatgatggaccatcgctggatcaagctgtcagcggactcgcgacggccctctgtcaggcttcgttcaccacccaaccccgccccgaaccctgccctgtgtactgcccaaagggacaaaaaggtgagcctggcgaaatggggctgcggggtcaggtcggcccgccgggagatccggggctccccgggcggactggggccccgggaccacagggcccccctgggtccgctaccgccaagggcgagagaggtttcccaggcgcggatggccgcccgggaagcccaggacgcgccgggaaccctggtactcccggagctccgggactcaagggatccccaggattgcctggaccgcggggggaccctggagaaaggggacccaggggaccaaagggcgaaccaggggccccgggccaggtgatcggcggagaggggccgggcctgccgggaagaaagggtgacccgggacctagcggaccccctggaccgcggggcccgttgggagatccgggtccgcgagggccgccgggactcccgggcaccgcgatgaaaggagacaaaggtgaccggggtgagcgcggccccccggggccgggcgagggtggcatcgccccgggagagccggggctccctggactcccagggtccccgggaccacagggccctgtcggcccgcctggcaagaagggcgaaaagggagactcggaggatggagccccaggactgccgggacaacctggttcccctggtgagcaagggccgcggggaccgcctggcgcgatcggaccgaaaggagatcgtggatttccaggtccgctcggtgaagcgggagaaaagggcgagcgcggcccacccggcccggcgggaagcagaggccttccaggagtggcgggtagaccgggcgcgaagggcccggaaggtccacccggacctactgggagacagggggaaaaaggcgaaccgggacgtccgggggaccctgcagtggtcggacctgctgtggccggacctaaaggtgaaaaaggcgacgtcggacctgcaggcccgaggggggcgactggcgttcagggtgagcgaggaccacccggactggtgttgccaggcgaccctggacccaaaggcgatccgggcgaccggggacccatcgggctcacgggacgcgcgggaccgcctggggattctggaccaccgggtgaaaagggggaccccgggcggccgggccctccgggaccagtcggaccgagaggacgtgacggagaggtcggtgaaaagggggacgagggaccgcctggcgacccggggctgcccgggaaggcaggagagcggggtcttaggggcgcgcctggcgtgcgcggacccgtcggggaaaaaggagatcagggggatcccggagaggacgggcgcaatggctcgccaggaagctccggtcccaagggagatcgaggcgaaccaggacctcccggacctcccggccgcctcgttgacactggtccaggagcccgggagaaaggagaaccgggggataggggccaggagggcccacgcggcccaaagggagatccaggccttcctggcgcgcccggagaacggggaatcgagggttttcgcggtccgccaggtccgcagggggacccaggagttcgaggaccagcaggtgaaaagggtgacaggggacctccgggacttgacggtcgctccggactggacggaaagccgggagctgccggaccatcgggccctaacggtgcagccggtaaggctggtgacccgggccgagatggacttcctggactccggggggaacagggactgccaggaccgtctgggccccctggacttcctggaaaaccgggagaagatggtaagccaggactcaacggaaagaatggagagccgggcgacccaggagaagatggacgcaaaggggaaaagggcgactcgggagcctccggacgggaaggacgcgacgggccgaagggagaacggggagctccggggatccttggacctcagggcccgcctggactgccgggacctgtcggtccgccagggcagggatttccaggtgtgccaggaggtaccggcccaaagggagatcgcggtgaaaccgggtcaaagggcgagcaggggctgccgggtgaaagaggactccgcggagagccagggtcggtgcctaatgtggatcggctgctcgagacggcgggtattaaggcgtccgcgctccgggagattgtcgaaacctgggatgagagctcaggatccttcctgccggtcccagaacgcagaagaggaccgaagggggacagcggggaacagggcccgccgggtaaggagggcccgatcggattccctggcgagagagggctgaagggtgacagaggggaccccgggcctcaaggcccgcctgggctcgcgctcggtgaaaggggacctccgggaccgtccggtctggcaggtgaacccggtaagcccggaattccaggactcccgggacgcgcaggtggtgtcggtgaagcaggacgcccgggcgagaggggagaaagaggggagaagggagaacgcggggaacaaggacgggatggcccgccgggactgccgggcactcccggacccccgggcccacctggacccaaggtgtcagtggacgagccaggacctgggctctcgggggaacaaggcccgccgggactgaaaggcgccaagggagagccgggatctaacggggatcagggaccaaaaggggaccgcggcgtgcctggaatcaaaggtgacaggggagagccgggaccacggggacaggacggcaaccctggtttgccgggagaacggggaatggctgggcctgaaggaaagccgggactgcagggtccgcggggaccacctggcccggtgggaggccacggcgacccgggccctccgggggcaccaggactggccggcccagcgggccctcaaggcccgagcgggctcaagggggaacccggagaaactggcccgcctggtagagggctgactgggccaaccggagcggtcggactgccaggacctccggggccttccggactggtggggccccagggaagccctgggctgcctggacaggtgggagaaaccggcaagccaggggcgccaggccgcgacggggcctcgggcaaggacggtgaccgcgggtcccctggagtcccgggatccccagggcttcccggaccggtgggacccaagggagaacctggtccgaccggtgctccgggccaagcggtggtgggactgccgggggccaagggagagaaaggcgcgccgggagggctcgctggtgacctggtcggcgaacctggagcaaaaggcgatagaggactcccaggaccgcgcggtgagaaaggggaagcgggaagggcgggggagccgggcgatcccggcgaagatggtcagaagggggcaccgggaccgaaaggctttaagggcgatccgggagtgggagtcccagggtcgcctgggcccccgggcccacctggcgtgaaaggagatctggggctgccgggcttgcctggggctcccggagtcgtcggcttcccgggacagactggcccgcggggtgaaatgggccagccggggccgtccggcgaaagaggtctggctggtccgccgggtcgcgaaggaatcccgggcccactcgggccaccggggccaccaggttccgtcggtccccctggagcatccggactgaagggagataagggggatccaggtgtgggactcccgggcccgcggggagagagaggagagccaggaatccgtggcgaggacggccgccctggccaagaaggacctcgcggccttactggaccgcccggatcgcgcggcgaacgcggagagaaaggagatgtgggaagcgcgggactgaagggcgataagggggactcggccgtgatcctgggacctccgggccctcggggcgccaagggagacatgggtgaaagaggacctcggggacttgacggagacaagggacctcggggagacaatggggaccctggagataagggcagcaaaggagaacccggcgacaaagggtcagctggactcccgggcttgaggggcctgctcggaccacaaggacagccaggggccgccggaatcccaggcgacccgggaagccctggaaaagacggcgtgccaggaatccggggcgaaaagggcgacgtgggattcatgggaccgagaggactcaagggagagcggggcgtgaagggcgcctgcggcctcgacggagaaaagggcgacaaaggagaagcgggaccgccaggccgcccgggactggcaggacataaaggagaaatgggggaaccgggcgtgccaggacaatccggagcaccaggaaaggaaggcctgatcggaccgaaaggtgacaggggattcgatgggcagccgggccccaagggcgatcagggggagaagggagagagagggactccgggaattggaggattcccggggccgtcagggaatgacggaagcgccggcccgccaggtccaccaggatcggtgggtccgcgcggcccagaaggactgcagggacaaaagggtgaacggggacctcctggagagcgcgtggtgggagctccgggagtgcctggtgctccaggcgagaggggcgagcaaggacggcctggtcctgcgggcccgcgcggtgagaaaggggaggcggcactcacggaggatgatatcagaggattcgtgcgccaggagatgtcgcagcactgcgcttgccagggacagtttattgcgtccggctcgcgcccactgccgtcgtacgccgcggacacggcgggctcgcaactgcacgcagtgccagtcctgcgggtgagccatgcagaagaggaagaacgcgtcccgccggaagatgacgagtactcagaatactcggaatactcagtggaagaataccaggatcctgaagccccatgggactcggacgacccctgcagtctcccgctggacgaaggctcatgcactgcttacacgctgcggtggtatcaccgggccgtcactggctctactgaggcgtgccatccgttcgtctacggaggatgcggcgggaacgctaatagatttggaactcgcgaggcgtgtgaacgaaggtgcccaccgagagtggtgcaatcccagggcacgggtaccgcccaagat

SEQ ID NO: 1511 - DNA, 8832 bp, Artificial Sequence
  derived and/or modified sequence
atgacgttgcggctgctggttgctgcgctttgtgccggtatcctggcagaggctccacgagtgcgtgcgcagcatagggagagggtcacttgcacgcgcctgtatgctgcagacatcgtatttctcctcgacggctcatcaagtattggcagatccaatttcagagaagtccgaagttttctggagggactggtgctccctttctctggtgctgcgagcgcgcagggtgtcagattcgctaccgtccagtacagcgacgatccgcgcacagagttcggcctagatgctctcgggtcaggaggcgatgtgatccgtgccattagggagcttagctataaaggagggaatacccggacgggtgccgccattttgcacgtggccgaccatgtttttctgccacagctcgcccgccccggggtgccaaaagtttgtatcctcattaccgacggaaagagtcaggatttggtggataccgccgcgcaacgactcaaggggcaaggagtcaaactcttcgcggtgggaattaaaaacgcggatcccgaagaactcaaacgggttgccagccagccaacttctgatttcttcttctttgtaaatgacttctcaatcctgagaacactgctccctctggtttccaggcgcgtgtgtaccactgccggcggagtgcctgttactcgcccccccgacgatagcacaagcgcacctagggatttggtgctcagcgagcccagcagccaatctctaagggtacagtggacagcagcatctggtccagtaacgggatataaggttcaatacactccattgaccggtctgggtcagccactgccttccgaacggcaggaagtgaacgtaccagccggcgaaacatccgtccggttaagagggcttaggcctctgaccgaatatcaggtcaccgtgatcgcactgtacgccaacagtattggagaagccgtgtcaggcaccgcaaggactactgctttagagggacccgaattaactattcagaatactacagcgcactctctgctggtcgcatggcgctcagtgcctggcgccacgggctatcgggtgacctggcgcgtcttgtcgggtggccctacacagcaacaggagctcggtcctgggcagggatcggtactgctgagggacctcgagccaggcactgactacgaggttacagtgtccaccctgttcgggcgcagcgtcggcccagcaacttccctaatggcacgtacagacgcctcagttgagcagaccctgcggccagtgattctaggcccaacaagtatcctgctgtcatggaatcttgtacctgaggcgcgcgggtatagactggaatggaggagagagaccggtctggagccaccacaaaaggtcgtccttccaagcgatgtaacccgttatcaactggacgggttgcagcccggcacagaatatagactaacactgtatactctgctcgaaggacatgaggttgcgacaccggcgaccgtcgtccctaccggccctgagctccctgtcagcccggtcaccgatctgcaagccactgaactcccagggcagcgtgttcgggtgtcatggagccctgtgccaggggctactcaataccgcatcatcgtgagaagcacccaaggtgttgaacgaactttggtactccccggatcacagacagctttcgacctcgacgatgtgcaggcgggactcagttataccgtccgcgtctccgcgcgagttggacctagagaaggaagcgcgagcgtcctgacggtccgccgcgagccagagacccccctggcagtgccggggttgagggttgtagtgagtgatgctacacgagtgagggttgcatggggtccagtgccaggcgcttcagggttccgcatttcctggtccactggtagcggccctgagtcatcccagaccctgcccccagactccaccgccacggatatcacaggtcttcagccaggcacgacctaccaggtggcagtttctgtgcttcggggccgagaggagggtcccgccgcagtcatagtggcacgcactgacccgcttggacctgtgcgtaccgtgcatgtgacgcaggcaagtagctccagcgtgactatcacttggaccagagtccccggggccactgggtatagagttagttggcatagcgcgcacggaccggaaaagagccagttggtctcaggtgaagcgactgtggcagaactggacgggctggagcccgatacagagtacacagtgcatgttagggcccatgtggccggggtggatgggccgcctgcttcggttgtggtgcggacggcccctgagcctgtggggagagtgagccggcttcagatactgaatgcctcttctgacgtcctacggatcacttgggtgggggtgactggggcaacagcttaccggctggcatggggacgaagtgagggagggccaatgagacaccagatattacccggaaatactgactccgccgagataagggggctggagggtggagtcagctactcggtgcgagtgaccgcgctggtcggagaccgagagggaaccccagtgtctattgtcgtcactaccccccctgaggcccccccagctttaggtacgctgcacgtggttcagcgaggcgagcactctctacgtcttaggtgggaaccagtgcctcgcgcacaaggattcctgctgcattggcagccggagggggggcaggaacagagtcgagtcctcggccccgaattaagcagctaccatctggatggccttgaaccggcaacccaatacagggtccgactatccgtgcttggacccgcaggggagggcccatcagctgaggtgacagcccgcaccgaaagccctcgggttccatcaattgagctccgggtggtggatacatcaatcgatagcgtcacacttgcttggacacccgttagccgggcttcatcttatattctgagctggcggcctctgcggggacctggacaagaggttccgggttctcctcagaccctccccgggatcagcagttctcagcgggtcactggccttgagcccggtgtttcctacattttctcgttgacaccagtgctcgatggcgtgcgaggaccagaggcctctgtcacgcagacccctgtatgtccgcgcggtctggcagatgtcgttttcttgccgcacgcgacccaggacaatgcccacagagccgaggcaacccggcgggtccttgaaaggctggtgctcgcgctagggcctctgggaccccaggcagtccaggtgggtctgcttagttatagtcaccgcccctctccattgttccctctgaacggtagtcatgatttagggataatactgcagcgcatcagggacatgccatacatggatccatctgggaacaacctgggcactgccgttgtgaccgcccaccgctacatgctagctccagacgctcccgggagacggcagcacgttcccggggtcatggtgttgctggtggatgaaccgctgcggggtgacattttttcccccatccgggaggcccaggcctctggactgaacgtcgtcatgcttggaatggcgggtgcagaccccgaacagctgcgtcgtctcgctccaggaatggattcagtccaaacgttcttcgcggtggacgatggcccctctctcgatcaggctgtctctggtctggccaccgctctgtgtcaggctagctttaccacacagccccggccggagccatgtccggtgtactgcccgaagggtcagaagggcgagcctggggagatgggtctgcgggggcaggtcggcccgccaggggacccagggttaccagggaggactggcgcacctggccctcagggtcctccgggtagcgctacagccaaaggtgagagaggttttcccggagccgatgggaggccaggcagccctggccgcgccggcaatcccggaacccctggcgccccaggcctgaagggaagtccaggtctgccgggtccacggggagaccccggcgaaagaggccctcgcggcccgaaaggcgagcctggcgcaccgggccaggtgattggaggcgaggggcctggactgcccgggaggaaaggggaccccggacctagcgggcctcctgggcctagaggaccccttggtgatcctggcccccgggggcctcctggcctcccgggaacggcaatgaagggggataaaggggaccggggggaacgcggacctccaggacccggtgaaggcggaattgcgccaggagagccagggctgccaggactccccgggtcccccggacctcagggcccagtgggcccaccaggaaaaaaaggagaaaagggagatagcgaggacggcgctccaggcttgccaggccagcctggaagtcctggagaacaggggccaaggggtcctccaggagccatcggccccaagggggatcgggggtttcctggacctctgggagaggctggtgaaaaaggagagagaggccctcctggacctgcagggtcaagaggacttcctggcgtcgccgggaggcccggcgccaaaggtcccgaaggtcctccgggcccgactgggcggcagggcgagaaaggcgaaccaggtcgacccggtgatcccgcagtggttggccctgcggtggccgggccaaagggagaaaaaggcgacgtaggacccgccggacccaggggagccaccggcgtacagggagagagggggccccctggtctcgtacttccaggcgatcccgggccaaagggggacccgggggacaggggaccaattggcctgactgggcgagctggccctcctggagattcagggcctcccggggaaaaaggcgacccgggacgcccaggcccgccggggccagtaggccctcgcggacgagacggcgaggtaggcgaaaaaggtgatgaggggcctcctggtgatcctggcctgcccggtaaagcaggggagcgaggactaagaggcgcccctggggttcgcggcccggtgggagagaaaggagatcagggggatcccggagaggacggaaggaacggctctcctggcagtagcggacctaagggtgacaggggagagccaggacccccaggtccgcccggacgtctcgtggataccggacccggtgctagggaaaaaggcgagcctggagacaggggtcaggagggtccacgggggcctaaaggtgacccaggccttccgggtgcccccggggagagggggattgaggggtttcgcggtccacctgggccgcagggagacccgggcgtgcgtggccctgctggcgagaagggcgacagaggcccaccagggttagacgggcggagcggactcgatggcaagcctggggccgccggaccaagcggtcctaatggggccgcgggtaaggcgggtgacccaggtagggacgggctgccaggcctacgcggcgaacaaggacttcccgggccatccggtcctcccggtttaccgggaaaaccaggggaggatggcaagccagggctgaatggaaaaaatggcgaacctggggaccctggagaggacgggcggaagggcgaaaaaggagattcaggggcatccggtagagaagggagggatggccctaagggggagagaggagccccagggatcttagggccgcaggggcctccaggcctgccaggaccagtcggaccaccaggacaggggttcccgggcgttcccggaggcactggccctaagggggatcgaggcgagacgggatcaaaaggagagcaaggcctgcccggagagcggggactgaggggcgagcctggctcggttcccaacgtggatcggctgctggaaactgctggaatcaaagcttctgctttgagagagatagtggagacctgggacgagagcagcggctcctttcttcctgtgccagagaggagaagaggtcccaaaggtgactcaggcgaacagggacccccaggcaaagaagggcctatcggtttccctggcgaaagagggctgaaaggagatcgaggtgaccctggtccccagggcccaccagggctagctctgggagagaggggcccacccggacccagcggcctggcgggtgagccaggtaagccaggcatcccaggcctccctggccgtgctggtggcgttggggaagccggccggcccggcgagaggggggaaagaggcgagaagggcgaaaggggcgagcagggcagggacggacccccaggactgcccggcactccaggccccccgggaccccccggacccaaagtgtcagtcgatgaaccaggtccaggcctcagtggggaacaaggacccccaggtctgaaaggcgctaaaggggaacctggatctaatggcgatcaagggcccaagggagaccgaggcgtccctggaattaaaggggatcgcggtgagcctgggcccaggggccaggatgggaatcctggactccctggagaaagaggaatggcggggccagaggggaagcccggtcttcagggcccaagaggcccaccaggcccagtgggcggtcatggggatccaggaccacctggggcccctggcttagcgggccccgccgggccgcagggccctagcggactgaagggggagcccggagagaccggcccccctgggagaggcctaacgggtcctaccggagccgtgggcttacctggtccaccagggccaagtggactggtgggccctcaaggtagcccagggctcccaggtcaagtgggagagaccgggaaacctggtgcaccaggcagagatggagcttctggaaaggatggggaccgcggaagtcctggggtgccgggctccccaggtctgcccgggccagtcggtccgaagggggagccgggccccaccggcgctcccggacaggcagtggtggggctcccaggggcaaaaggggaaaaaggcgcacctggcgggttggccggcgatctggttggtgagccaggcgccaagggtgatcggggcctgcctgggccgcggggggaaaaaggcgaagcagggcgtgctggtgaacctggcgatccaggcgaggacggacagaaaggcgctcccggacccaaagggttcaaaggcgatccaggggtcggggtgccaggctccccagggccccctggcccgccaggcgttaaaggagacctcggattgccaggcctcccaggcgcccctggagttgtaggctttcctggccagaccgggccgcgcggcgaaatggggcagcccgggccaagtggtgaaagggggcttgctggtcctcccggaagagagggcatccctggccctctgggcccacctggaccacccggctctgtcggaccaccaggagcctcagggctgaagggggataagggagaccccggggtgggactgcccggcccaaggggcgagcgcggtgagcccggaatccggggggaggacgggcgtcctgggcaggaaggaccacggggcttgacgggccccccagggagcaggggcgagcggggtgagaagggcgacgttggatctgcgggcctcaagggcgacaaaggagatagtgccgtgatacttgggccccctggccctagaggagccaaaggagacatgggggaacgggggcctcgcgggctcgacggtgacaagggacccaggggcgataacggagatcccggtgataaaggctctaaaggagagcctggagacaaggggtctgcagggctgccaggcttacgcgggttgttgggaccccagggacaacccggtgcggccggaatccccggagaccccggctcaccggggaaagatggtgtgccaggaatacgcggcgaaaaaggggacgtgggcttcatggggcccaggggcttaaagggcgagcggggcgttaagggggcttgtggcctggatggtgagaaaggagacaagggggaagcaggaccacccggcaggcccggtctcgcagggcataaaggggaaatgggcgaacccggggtgccaggacagtccggggcccccggaaaggagggtctgatcggacctaagggagaccgcggtttcgacggacagccagggccaaagggtgaccagggcgagaagggagagaggggcaccccgggcattggcgggtttcccggcccgtccggcaacgacggatccgctgggccccccggacctccaggcagcgtggggcctagagggccagaaggactgcagggccaaaagggggagagagggccccccggagaacgagtagtaggtgcaccaggggtcccgggagcacccggtgagcggggggaacagggcagacctggccctgcagggccaagaggcgaaaaaggggaggccgcgcttaccgaggatgacattcgcggtttcgtcaggcaggagatgagccagcattgcgcttgccagggtcagtttattgcaagcggatccagacccctgccatcatacgctgcagacacggcaggctcccagttgcatgcggttcctgtgctacgggtgagccatgcagaggaggaagaacgcgtgcctccagaagacgacgagtacagcgagtattccgagtacagcgtggaggaatatcaggacccggaggccccctgggacagtgacgacccttgcagcttgcccctggatgaggggagctgcaccgcatataccctgcgatggtatcatcgggccgtgacgggtagcacggaagcctgtcatccctttgtatacggcggctgcggcggtaacgcaaataggttcggaaccagagaggcctgcgagcgccgttgccctcccagggtggttcagagtcagggcacaggtacagctcaggat

SEQ ID NO: 1512 - DNA, 8832 bp, Artificial Sequence
  derived and/or modified sequence
atgaccctccgtctgctggtggccgcattgtgcgcggggatccttgcagaagccccccgcgtacgcgcccagcacagggagcgggtgacatgtacacggttatatgctgcagacattgtatttctgctcgacgggtcatcttctataggccgtagcaactttagagaggtcagatcgttccttgagggtttggtcctccccttcagcggggctgcctccgcccaaggggtgaggtttgcgaccgtccagtattctgatgacccacgtaccgagtttggattggatgctctcggtagtgggggcgacgtgatccgcgccatcagagaactgtcgtataaaggtggaaacacaagaactggagccgctatactgcacgtggccgatcatgttttcctcccacaactagccaggccgggcgttcccaaggtgtgtattctcataacagacgggaaaagccaggatctagtggacacagccgctcagcgccttaaaggacagggagtgaagctcttcgctgtggggatcaagaacgccgatccggaggaacttaagagagtcgcctcccaacccaccagcgactttttcttcttcgtgaacgatttctcgattcttagaaccctactgccacttgtgtcacggagagtatgtacgacggcaggtggagtaccagtaactcgacccccagatgattccaccagcgcacctcgagacctggtcctgagcgagccctcatcccaaagccttagggttcaatggaccgctgcctcagggcctgtcactgggtataaagttcaatatacacctctgacaggcctgggtcagccactcccatccgagcggcaggaggtgaatgtacccgccggcgaaacaagcgttagactaaggggtttgaggcccctaaccgaataccaggtgaccgttatagcgctgtatgccaatagcattggcgaagctgtgtccgggaccgcacggacaacagcactggaaggccctgagttgactatccagaacaccaccgcccactctctactggtggcctggcgctctgtgccaggagcaacaggttaccgggtaacctggagagttctatccggcggccccactcagcagcaggagctcggccctgggcagggaagtgtgctcctgagggatctggagcccgggacagactacgaagtgacagtgagcaccctgtttggtaggtccgtggggccagccacaagccttatggcccggaccgatgcaagcgtcgagcaaactttgcggcccgtgatactaggcccgactagcatcttgctgtcttggaacctggtcccggaagccagaggctatcggctggagtggcggagagaaaccggccttgagccaccccagaaagttgtgctgccatcggatgtaacacgataccagctggatggattgcagcccggcacagaataccgcttgacactgtataccctgctggaggggcacgaagttgctacccccgctacagtggtgccgaccgggccagagctgccggtctctcctgtaaccgacctacaggcgaccgagctccctggtcagagggtgagggtttcatggagtcctgtgccaggcgcgacgcagtacagaattatcgttaggtcgacacagggtgtcgagcgtactctcgttcttcctgggtcgcaaacagccttcgacctggacgatgttcaggccggcttaagctataccgttagggtgagcgccagagttggccctagggaaggctctgcatcagtgctcactgtgagaagagaacctgaaacaccccttgctgtgcccgggctgcgggtggtggtcagcgatgccacccgggtaagagtggcctggggaccagtgcctggcgcctccggctttcggatctcctggtccaccggctccggcccagaaagcagtcagaccctccccccagacagcactgccaccgatattactggcctgcagccgggaacaacctaccaggtggctgtcagcgttctgcgtggacgggaggagggacccgccgcagttattgtcgctcgcactgaccccttgggccccgttaggactgtacacgttacgcaggctagttcctctagcgtgaccataacatggacccgggtacccggggctaccggctatcgtgtgtcctggcacagcgcacatggacccgagaagtcgcagctcgtgtccggcgaagccactgtcgcagaactggatggacttgagccagacacagagtatactgtgcatgtgagagcacatgtcgcaggcgttgacggcccccccgcatccgtggtggtcagaacagcaccagaaccagtcgggagagtatctagattacagattttgaacgcatcaagcgacgtgcttcgtatcacttgggtgggcgtgacgggcgcaaccgcttatcggcttgcttggggacgatctgagggcgggcccatgcggcaccagattctccccggcaacaccgactccgccgagatcaggggtttagaagggggcgtgtcttacagcgttcgagtgaccgctttagtcggcgatagggaagggactccagtcagtattgttgtgacaacgccacccgaagcgccccctgcattggggacactgcatgtcgttcagcgaggagagcactcattgcgtctgcggtgggagcccgtgcctcgagcccagggctttctcttgcactggcagcctgagggcggacaggaacagagtcgcgtcctaggcccagagctgtcatcttatcacttggacggactggagcctgcaacgcagtacagggtccgcctgagtgtgctcggcccagctggagagggaccgtcagcagaagtcacagcccgtacagagtccccaagggtcccatcaatcgaactgagagtggttgatacaagcattgattcggttactctggcttggactccagtgtcccgtgctagtagttacatcttaagctggaggccacttcggggcccaggacaggaagtcccaggttcaccacaaacactgcccggcatctcatccagccagagagtcactggcctggagccaggcgtgtcctacatttttagtttgacgccggtgctggatggtgtgcgaggccccgaggcaagtgtgacacagacccctgtatgtcctcgcggtctcgctgacgtagtgttccttccacatgccactcaggacaatgcccatcgagcagaggcaactaggagggtcctggaaagactcgtcttagcactgggaccactcggtccacaggccgtacaggtgggcttgcttagttatagccaccgcccctcaccactgttccctcttaacggatcgcatgatctgggaatcatcctgcagagaatcagggacatgccatatatggaccccagtggaaataatctgggaacagcagtggtgaccgcacatagatacatgttagcacccgacgcaccaggcaggcgccagcacgtcccgggagtcatggtgctactggtcgatgaaccgctgcgaggtgacattttttcccccatccgcgaagcacaagcctctggcctcaatgtcgtgatgctcggaatggctggggcagaccctgagcaactgcggaggcttgctccgggcatggatagcgttcaaactttttttgcagtggatgacgggcccagccttgatcaagccgtgtccggcctggccactgcattgtgccaagcaagttttactacccagcctcgccctgagccatgccccgtgtactgtccaaagggccaaaaaggcgagcccggtgagatggggctgagaggacaggtagggcctccaggcgatccggggctgcccgggcgtaccggcgcccccggaccgcagggcccacctggtagcgctaccgccaaaggggaacggggatttcccggcgctgacggtaggcctggctccccagggcgcgcgggaaacccaggcactccaggcgcccccgggctgaaaggatcgcctggactgcccggtccccgtggagacccaggtgaacgagggccgaggggccccaagggtgagccaggcgcgccaggtcaggtcattggtggcgagggccctggattgccaggacgaaagggggaccccgggccctccggtcctccaggccctaggggcccgctcggcgacccaggcccaaggggtccgcccggcctgccaggaactgctatgaaaggcgataagggcgataggggggagagagggcccccagggcccggggaaggcggaatcgcacccggggagcctggacttccaggacttccagggagccccggtccacagggacctgtgggacctcctggtaagaaaggagagaaaggggactccgaggacggggctcccggcctgccgggtcagccggggtcccccggagagcaaggcccacgcgggcctcccggcgcaatcgggccaaagggggatcggggctttcctggaccacttggtgaggcgggtgagaagggggaacgcggaccaccagggcccgctggctctagaggcctgccaggggtcgcaggtagacctggcgcaaaggggcccgagggaccacctgggcctactgggagacagggagagaaaggggaacccggacgtcccggcgatccagcggtggtgggtccagctgttgccggcccaaaaggagaaaaaggggatgtgggtccggccggtccccggggagcgacaggcgtgcagggagagcgagggccccccggcttagtgcttcccggagaccccgggccaaagggagaccccggagaccggggcccaatcggtctgacaggccgggccggtcccccaggcgattcaggtcctcccggcgagaaaggcgaccccgggcgcccgggccctccagggccagtagggccccgtgggcgcgatggtgaagtcggagagaaaggggatgaagggccaccaggggatcctggtcttcctgggaaagcgggagagcgcggtcttcgcggcgcaccgggggtccgaggtcctgttggagagaagggggaccagggcgacccgggtgaagacggaaggaacggcagcccgggctcatccgggcccaaaggcgaccgaggcgaacccggaccaccaggaccccctggacgcttagtggatacaggaccaggggcccgcgaaaagggcgagcctggagatcggggccaagagggccctaggggacctaagggcgaccctggtctacctggggctcctggggaacgggggatcgaaggctttcggggaccccccggcccccagggcgatcccggcgtacggggacctgccggagaaaaaggagacagaggtccccctggcctggatggaagatccgggctggacggaaagccaggcgccgctgggccaagtggaccgaacggggcagctggcaaggctggggacccaggacgggacggtctccccggactgcgaggcgagcagggtttaccaggaccatcggggcctcctggactccctggcaaaccgggggaggatgggaaacccggactcaatggcaagaatggagagccaggcgacccaggagaggatgggcggaagggagaaaagggtgactcaggcgcttctggaagggagggtcgggatgggcccaaaggggagaggggtgcgcctggcattctcggcccccagggaccgcccggtctgcctggccctgtcggaccccctgggcagggcttcccgggcgtgcctggcggtaccgggcctaagggggataggggcgaaacaggctctaagggcgaacagggcctgcccggtgaacggggcctcagaggtgagccgggcagcgtacctaacgtggacaggctgctggagaccgcaggaattaaggccagcgccctgagagaaatcgtggagacctgggatgaaagcagcgggtctttcctccccgttccggagcgcagacgaggtccgaaaggcgactccggcgagcagggaccgcctggcaaagaggggccaatcggtttccctggtgagcggggtctcaagggggatagaggagatcccggtccacagggtccaccagggctcgcacttggtgagcggggcccacccgggccaagcggactggccggagagccagggaaaccagggataccgggtctgcccgggcgcgcagggggcgtgggggaagccggccggcccggggaaagaggggagagaggagagaagggagagcgaggcgaacaggggcgggatggccctccaggcctccctggcacaccagggcctcccggtccacccggacctaaagtttcagtcgatgaacccggtcctggtctgtcaggagagcagggtccccctggccttaagggcgctaagggcgagcccgggagcaacggtgatcaaggaccaaagggggatcggggcgtgccgggcattaaaggagacaggggtgaacccggcccacgggggcaagatgggaatccagggctccccggagagcgaggcatggcaggacctgagggaaagccaggcctgcaaggcccccgtggaccccccggcccagtggggggccatggcgatcctgggccaccgggcgccccagggctggctgggcctgctggccctcaggggccaagtggcctcaagggggaaccaggcgagactggtccgccagggcggggactaacaggccccacaggggccgtaggcctgccaggtccgcctggccccagcggtctcgttggcccacagggcagccccgggctccccggtcaggtcggggaaaccgggaaaccaggagcccctgggcgggacggggcctccggaaaggatggggacagaggatctcctggagttcccggcagccctggacttcccgggcctgttgggcccaagggcgaacccggtcctacaggagctccaggccaggcagttgtgggtctgcccggagcgaagggagaaaagggggcacccggcggactggccggagacctggtaggagagccgggagctaagggcgatagaggtttgccgggccctagaggggagaaaggtgaagctggacgagcgggggagcccggcgatcctggcgaagacgggcagaaaggcgctccagggccaaaaggattcaagggtgaccctggggtgggggtgcccggcagccctggtcctccagggccccccggtgtcaagggagaccttggtctccctggtctgccaggggcccctggagtggtcgggttccctggccagacagggccccgaggggaaatgggccagcccggaccaagcggtgagcgcgggctcgcgggtccgcctggccgtgagggcatccccggacccctgggcccaccaggcccccccgggagcgtggggccacccggcgcgtcgggactaaagggcgacaaaggcgacccgggggtggggctccccgggccccgcggagagcgcggcgagccaggcatccggggagaggacggccgtcccggccaagagggaccgcgggggctgacaggaccaccaggatccagaggagaaagaggcgagaagggggacgttggtagtgccggcttgaagggagataagggagactctgctgttattctcgggcctccgggcccccgcggggctaaaggcgacatgggggagagggggccccgggggctggatggcgataagggcccgagaggggacaatggggatccaggcgataaaggttccaagggggagcctggggataaaggatccgcgggacttcccgggctccggggcctgctcggaccgcagggtcagcccggtgctgccggtattcctggagatcctggatcacctgggaaagacggagtacccggtatccgaggtgagaagggcgatgtcgggttcatgggtccccgagggctgaagggggagcgtggcgtcaaaggcgcctgcggcttggacggagaaaagggcgacaagggggaggccggaccgcccggccgcccggggctggccggtcataagggggaaatgggggaacccggcgtccctgggcagtctggggcgcctggcaaagagggcctgattggcccgaagggagaccggggatttgatggccagccaggccctaaaggtgatcaaggagaaaagggggaacgtgggacgcccggaattggcggatttcccgggccctctgggaacgacgggagtgccggacctccagggcccccaggaagcgtgggaccacgggggcccgagggtcttcaaggccaaaaaggagagcggggcccacccggggagcgggtggtaggagcgcctggagtaccgggcgcgcctggtgagcgaggcgaacaggggcgcccgggacccgcaggtcctagaggagaaaagggcgaggcagcgctgactgaagacgatattcggggcttcgttagacaggaaatgagccagcactgcgcctgccaaggccagttcatcgcctcagggtccagacctctgccttcctatgcagctgatactgctgggagtcagctgcacgcagtgccggtcttgcgcgtgagccacgccgaggaggaagagcgcgtcccccccgaagatgatgagtactctgaatacagtgagtattcagtggaggagtatcaagatccagaagccccctgggacagcgacgatccatgcagcttacccctggatgaaggctcatgcacagcatataccctgaggtggtaccaccgtgctgtcacaggaagtacggaggcctgtcaccctttcgtctacggcggatgtggcggtaatgcaaatcgatttggaacgagagaggcgtgcgagcggcgatgtcccccacgggtggtgcaatctcaaggtactggtactgcacaagat

SEQ ID NO: 1513 - DNA, 8832 bp, Artificial Sequence
  derived and/or modified sequence
atgactctgagactgctggttgcagcactgtgcgccggtatccttgccgaggccccgcgcgtgagggcccagcaccgcgaacgcgtgacctgcacccggctgtacgccgcagatatcgtgttcctcctggatggatcttcctcgatcggccggtcgaactttcgcgaagtccggtccttcctcgaaggactggtcctgccgttctcaggagcggcaagcgcccaaggtgttcgttttgctactgtgcaatactccgacgacccgcgcacggagttcggactggatgcgcttggatccggtggagatgtgatccgggccatccgagagttgagctacaagggaggaaacacgcggactggcgctgcgatccttcacgtcgctgaccatgtgttcctccctcagctggctcgccccggggtgcctaaggtgtgtatcctgatcacggacggaaagtcacaggatctggtggatactgccgcacaacgccttaaggggcaaggggtcaagctgtttgccgtgggaatcaagaatgcggatcccgaagaactcaagagagtcgcatcccaaccaaccagtgacttcttcttttttgttaatgattttagcatccttcggactctcctgccgctcgtgagccgccgggtctgcaccacggcagggggcgtccccgtgactcgtccaccggatgacagcacctcggctccacgggaccttgtgctgtcagaacctagctcgcagtcgctgagggtgcagtggacggcggcctcgggaccggtcaccggatacaaggttcagtatactccgctcaccggcctgggtcagccgctgccgtccgagaggcaggaagtcaacgtcccggccggagaaacgtccgtccgcctgcgggggctccgccccctcactgagtatcaagtgaccgtcatcgccctgtacgccaattccatcggggaggccgtctcgggtactgcgcgcaccactgccctggagggaccggaactgaccatccagaataccaccgcacacagcctgctggtggcctggcgcagcgtcccaggcgccaccggttacagagtgacctggagagtcctgtcggggggacccacccagcagcaagagctgggacctggacagggctcggtgctgctgcgcgacttggaacctggaaccgactacgaagtgacggtgtcgaccctgttcgggagaagcgtcggtcctgctacctcactcatggcgagaactgatgcttccgtggaacaaaccctgcgcccggtgattctggggccgaccagcattctgctctcgtggaacctggtgccggaggcccgaggctaccggctcgagtggcggagagagactggactggaacctccgcaaaaggttgtgctgccgtcggatgtgactcggtaccaactggacggcttgcaacctgggactgagtatcggttgactttgtatactctcctggaagggcatgaagtcgctaccccagccaccgttgtgccgaccggaccagagcttccagtgagcccagtgaccgacctgcaggcaactgagctgcccggccagcgcgtgcgggtgagctggtcccctgtcccaggagcaacccagtaccggatcatagtccggtcgactcaaggtgtggaacggacgctggtgctgcctggctcccagactgccttcgatttggatgacgtgcaagccggcctttcgtatactgtgcgggtgagcgcacgagtgggaccgcgcgagggatcagccagcgtgctgactgtgcgccgcgagccagagactccactggctgtgccaggtttgcgcgtggtggtgagcgacgcgacccgggtgcgggtggcctggggtccggtgccaggagcgtcgggattcagaatctcctggtccaccggatccggaccggaatcgtcccaaaccctgccgccagacagtaccgcaaccgacatcactggacttcaaccggggaccacgtaccaggtcgccgtctctgtcctgagaggtagggaggaagggcctgccgccgtgatcgtggcccgcaccgatcctttgggacctgtgagaactgtccacgtgactcaggcctcctcatcgagcgtgactattacttggaccagagtgccgggagcaaccggttaccgggtttcatggcactccgcgcatggaccagagaagtcgcagcttgtgtccggcgaggccaccgtggccgagctggacggactggagcctgacactgagtacacggtgcacgtgcgggctcacgtggcgggggtggatggacccccagcctccgtggtcgtgagaactgcgccggaacctgtcggaagggtgtcccggctgcaaatcctcaatgcctcctcagacgtgctgcgcatcacgtgggtgggtgtgacgggagcaaccgcataccgcctggcatggggccgctcagagggaggcccgatgcggcatcaaatcctgccgggaaacaccgattcagctgagatccgaggactggagggaggagtgagctacagcgtgcgcgtgaccgctctggtgggggaccgggagggcactccggtgtctatcgtggtcacgactccgcctgaggcgccgccggcgctcggaaccctccatgtcgtgcaacggggagaacactcccttaggctccggtgggagcccgtccctagggcccagggattcctgctgcactggcagccagagggtgggcaagagcagtctagggtcctgggacctgaattgtcctcataccacctggatggactggaaccggccacccagtaccgtgtgaggctgagcgtcctgggaccagcgggggagggaccatcagctgaggtgaccgcacggacggagagcccgcgcgtcccctcaatcgaactgagagtggtagacactagcatcgattccgtgaccctggcgtggaccccggtgtcaagggccagctcttacattctttcgtggcgacctttgcggggccctggtcaggaggtgccaggttccccgcagactctcccaggcatatcaagctcccagcgcgtcaccgggctggaaccgggagtgtcatacatcttctcattgactcctgttctcgatggagtgcgaggccctgaggcttcagtgacccagactcctgtgtgcccccgaggactcgccgacgtcgtgttcctcccacacgcgactcaagacaatgcgcaccgagcagaggcaactaggcgcgtgctggagagactggtgttggcattgggaccgctgggaccgcaggcagtgcaggtgggactgttgtcctacagccaccgtccgtccccactcttcccgctcaatgggtcacacgacctcgggattatcctgcagcggattagagacatgccgtacatggatccgtccggcaacaacctgggaactgcagtggtgaccgcgcatcgctacatgctcgcaccggatgcccccgggaggcggcaacatgtccctggcgtaatggtgctcctcgtggacgaacctctgaggggagacatcttcagcccgattcgggaagcgcaggcgagcggactgaacgtcgtgatgctggggatggctggcgcagaccccgagcagctgcggagacttgcacccggcatggatagcgtccaaacttttttcgcagtcgacgacggaccgtcgcttgaccaagcagtgtcgggtctggccaccgcactgtgtcaagcatccttcactacccagccgcgccctgaaccatgcccggtgtactgcccgaagggccaaaaaggagaaccaggtgagatgggattgcggggacaggtcgggccgccgggagatccgggtctgccaggacggactggtgccccaggaccccagggacctcccggatcagcgactgcaaaaggggaacgcggctttccgggagcagatggccgcccaggatccccaggccgggcaggaaaccctggcaccccaggcgcccctggtctgaagggctcaccaggactgccgggccctcggggtgaccctggcgaaagggggcctagaggacccaagggagaaccgggcgccccgggacaggtgatcgggggcgaaggcccaggcctccctggacgcaagggcgacccaggacccagcggaccgccaggccctagagggcctttgggtgaccccggaccacgcgggccgcctggcctgccaggaaccgccatgaaaggcgacaaaggggaccgcggagagcggggcccgccgggtccgggagaaggtggaatcgccccgggagaacccggcctgccgggactccccggctcgccgggtccgcaaggaccggtgggtcctcccggcaagaaaggcgaaaaaggagactccgaagatggagctcctggattgcctgggcaaccgggttcgccgggggaacaggggccgcggggaccaccgggcgcgattggaccgaaaggtgaccgcggattcccaggaccactgggagaggcgggggagaagggagaaagaggaccgccgggtccggctggatcacgcggcctccctggagtggccggcagacctggagcaaagggacctgaaggaccgccgggaccaaccggccggcagggagaaaagggcgaaccgggaaggccgggagatcccgcggtcgtcggacctgccgtggctggcccaaagggagagaaaggcgatgtgggaccggcgggaccccgcggagcgaccggggtccagggagagcgcggacctccgggactggtgctgccgggagatccgggaccaaagggagatccgggggatcggggcccaatcggattgactggaagagccggcccacctggcgactccggcccgccgggagaaaagggggatcctgggcggcctggaccgccgggccctgtcggaccgcgcggaagagacggagaagtgggagaaaaaggtgacgaagggccaccgggggacccgggccttcctggaaaggcaggagagagaggactgcgcggcgccccaggagtgagaggcccagtgggagaaaagggggatcagggggaccctggagaggacggaagaaacggtagccccgggagctccggtccgaaaggagacagaggcgaaccaggacccccagggccgccgggtagactggtggatacgggacctggtgctagagaaaagggagagcccggtgacagaggccaggaaggaccgcgcggcccaaagggcgacccaggcctcccgggcgcccccggagaaaggggtatcgaaggtttcagaggaccacctggacctcagggagatcccggcgtgagaggaccggctggagagaagggagatcgtggcccgcccgggctcgatggcagatcaggactggacggcaagccgggagcagctgggccaagcggacctaacggagcggccgggaaagctggcgacccaggccgcgatgggctcccaggactgcggggagagcaaggtctgccaggccctagcggaccgcccggactccccggaaagcctggagaggacggcaagcctggactgaacggaaagaatggcgagccgggcgaccctggcgaggatggacggaagggagagaagggagactcgggagcctcgggacgcgaaggacgagacggaccaaaaggggaaagaggagctccaggaatcctgggcccgcaagggccaccaggcctgccgggcccggtggggccaccaggccaggggttccctggcgtccctggaggcaccggaccaaagggagatcgcggagagacgggaagcaagggagaacaggggttgcctggagagcgggggctgaggggagaaccaggcagcgtccccaatgtcgacaggcttctcgaaaccgccggaatcaaggcaagcgccctccgcgaaatcgtcgaaacttgggacgaaagctccggatcattcttgccagtcccggagcggcggagagggcctaagggagattcgggcgagcaaggacctccaggaaaggagggaccgataggatttccgggagaaagaggcctcaaaggagacagaggggacccgggtcctcaaggaccaccgggtctggccctgggagagcgcggcccgcctggaccgtcgggactggcaggcgaacccggaaagcctggaatccccggactgccaggcagagccgggggcgtgggtgaggccggtagaccgggcgaaagaggcgagcgcggcgaaaagggagaacggggtgagcaggggagagatggaccgcccggccttccggggacccccggacccccgggaccgccaggcccgaaagtgtcagtggatgaaccgggacctggactcagcggagaacaagggccccccggcctcaagggagcaaagggcgaaccggggtcgaacggagatcagggacccaagggcgaccgcggagtgcctggcatcaaaggagacaggggtgaaccgggaccgaggggacaagacgggaaccctgggttgcctggggagagagggatggccggccccgaggggaagccaggtctgcagggcccacggggcccaccagggcctgtgggaggacacggagatccaggtcccccgggcgccccaggcttggccgggccggccggaccgcaaggccctagtggactcaagggggagccaggcgaaaccggtccacctggtcgcggtcttaccggaccgactggggctgtgggactgccagggccgccaggaccgtcgggattggtgggccctcaaggatcgccgggacttcctggacaggtgggggagactggcaagcccggcgccccgggacgagacggagcctcgggaaaggacggagatcgcggttcaccgggagtgccaggctcccccggtctgccaggaccggtgggccctaagggagagccgggaccgaccggcgccccgggacaagccgtcgtggggctgccgggagccaaaggagaaaagggcgccccggggggtctggcgggagatttggtcggcgaaccgggagcgaagggtgaccgcggccttccgggaccaaggggagagaagggtgaggcaggtcgcgcgggtgaacccggagatcccggcgaggacggacaaaaaggtgcgcccggaccgaagggtttcaaaggggacccgggagtcggagtgcccggatccccgggaccgccaggtcctccaggagtgaagggagatcttggattgccgggactcccgggcgccccaggagtggtcggcttccctggccaaaccggacctagaggagagatgggacagccaggcccctccggagaaagggggctggcaggtccgcccggtagagaaggtattccgggacccctgggaccgccgggacccccaggctccgtgggacctcccggggcatccggactcaagggtgacaaaggcgatccgggagtgggactgccgggaccacggggcgaacgaggggaacctgggataaggggcgaggatgggcgaccgggccaggagggcccgcgaggactgactggcccgccaggcagccgcggcgaaagaggggagaaaggggacgtcggatccgctggactcaagggtgataagggagactctgctgtcatcctgggccctccagggccgcggggagcaaagggggatatgggcgagcgggggccgcggggcctggacggcgacaaaggacccaggggagacaatggcgatccgggagacaaaggctcgaagggagaaccaggggataaaggttcggctggattgcctggcctgagaggactgctgggcccgcagggacaaccgggagctgcgggaatcccaggggacccgggatcacctggaaaggatggggtgccaggaatccgcggggaaaaaggagacgtcgggtttatgggaccaagaggcctgaagggagagcggggtgtgaagggcgcatgcggtttggatggggaaaaaggagataagggggaagcgggcccccctggacgccctggtctggccggacacaaaggagaaatgggagaaccaggggtgcccggacagtcgggcgcgcctggaaaggaaggcttgatcggaccaaagggagacaggggcttcgatggacaaccgggccctaagggcgatcaaggcgagaagggagaacggggaactccgggaatcggtggattccctggaccttccggtaatgacggatcggccgggccgccaggaccaccgggttcggtcggcccgaggggacctgaaggactgcaaggtcaaaagggtgagagaggacccccaggcgaacgcgtcgtgggagcaccgggagtccctggagcaccaggggaaaggggcgagcaagggcgaccgggcccagcgggccctcgaggcgagaagggtgaggcggcgctgaccgaagatgacatcagaggattcgttcgccaggaaatgtcccaacactgcgcgtgccaggggcaattcatcgcatccggtagcaggcctctgccatcctacgctgctgacaccgccgggagccagctgcatgcagtgccagtgctgcgggtgtcacacgccgaggaagaggagcgcgtgcccccagaggacgacgaatactccgagtactcagagtactcggtggaagaataccaggacccagaggccccgtgggatagcgacgacccatgctcgctgccgctggacgaaggatcgtgcaccgcgtacactctgcggtggtaccatcgcgcggtcactggctccaccgaggcctgtcatccattcgtgtatggagggtgtggcggaaacgccaatcggttcggaaccagagaggcttgtgaacggcggtgcccgccccgagtggtgcagagccagggcactggaactgctcaagac

SEQ ID NO: 1514 - DNA, 8832 bp, Artificial Sequence
  derived and/or modified sequence
atgaccttgcgcctgctcgtagcggcattgtgcgcaggcattctggcagaagctccacgagtaagagcccagcatcgggagcgggtcacttgcacccggctgtacgccgcagatattgtgtttcttctcgatggctcttcttccatcggacgcagcaattttcgcgaggtgaggtcattccttgagggcttggttttgcccttctccggcgcggccagcgcccagggagttcggttcgcaactgtgcagtacagcgacgaccccaggacggagtttggccttgatgccctgggctctggcggtgatgtcatcagagctattagagaactcagctataaaggtggcaatacccggactggagcggcaatcctgcacgtagcagaccacgtgttccttccacagctggcccgaccgggagtccctaaagtatgtattctgataaccgatggcaagtctcaggatctcgtggacacagccgctcaacggctcaagggccagggtgtgaaattgtttgccgtcggtattaagaacgccgatcccgaagagctgaaacgcgttgcatctcagcccaccagcgacttttttttctttgtgaatgacttcagcattctgcggactctcctccctcttgtgtctagacgggtttgcaccactgctggaggcgtgccagtgacccggcccccagatgattctaccagcgctcctcgcgatctggttctgagtgaaccttccagtcagtctctgagggtccagtggactgctgcttctggaccagtgaccggctataaagtgcaatacaccccactgacagggctgggccagcctttgccaagtgagcggcaggaagtgaatgtaccagccggagaaactagcgtgcggctcaggggtcttaggccccttacggagtaccaggtcactgttatagcattgtatgcaaacagcattggcgaggctgtgtcaggaactgctaggactacggctctcgaaggaccagagctcactatccaaaacaccacagctcacagccttctggtggcctggcgcagcgtacccggtgcaactggttaccgagtgacctggagagtgttgagcggcgggcctacccaacagcaggaactcggtccgggacagggaagcgtactccttagggacctggagcctggaactgattatgaagtcaccgtaagtacgctcttcggacgctctgtcggccccgcgaccagcctgatggcccggacggatgcgagcgtggagcagacactccgcccggttatcctgggacccacgagcattcttctgagttggaacctggtccccgaggctagaggctatcggctcgagtggcgcagagaaactgggttggagcctccccagaaagtcgttctgccatctgatgtcaccaggtatcagctggatggcctgcaacccggaacagaataccgcctcaccttgtacaccctgctggaggggcacgaagtagccacccctgctaccgttgtgcctactggacccgaattgcccgtctctcccgtgaccgacctgcaggcaaccgagctgcctgggcagcgagtccgagtgtcctggagtcctgtgcctggtgcaactcaatacaggatcatcgtgcgcagtactcagggcgttgagaggacactcgtgctccccgggagccagacggcctttgatctcgatgatgttcaagccggcctcagctacaccgtgcgcgttagcgcaagagtcgggcctagggagggtagtgcatctgtgttgacagtacgccgagagcccgagactcccctggcggtgcccggacttagagtcgtcgtcagtgacgctacccgcgtgagggtcgcatgggggcccgtgcctggggctagtggcttccgcatctcatggtccacgggaagcggcccagagagttcccaaacgctgcccccagactccactgccactgacatcactgggctccagcccggcacgacataccaggtggccgtttccgttctcaggggcagagaagagggtcccgccgcggtaatcgtcgccagaactgaccccctggggcccgtgagaacagtgcacgtcacacaggcctcaagttcaagcgttactataacatggactcgcgtgcccggcgcaacaggctatagagtgtcttggcacagtgctcacgggccagagaagtcccagctggtttccggagaggccaccgttgcagaactggacggcctggagcctgataccgaatacaccgtccacgtgagagctcatgttgcgggcgtagatggccccccagcatccgttgtcgtgaggactgcaccagagccagtaggccgggtgtcccggctgcagatactgaacgcgagcagcgatgtgttgcgcataacctgggttggcgttaccggtgcaacggcctataggctggcctggggccgcagcgaaggtggccccatgcgccaccagatccttcctggcaacacagacagcgcagagattcggggtctggaggggggcgtgagctactccgttagggtaacagccctcgtgggcgatcgagagggaacccctgtgagtatagtagtcaccacaccgccggaggctccaccagctctgggcaccctgcacgtcgtgcaacggggagaacattcattgagattgcgctgggagccagtaccgagggcccaagggtttctgcttcactggcagcctgaagggggccaggagcagtcccgggtgcttggtcccgagctgtccagttaccacctggacggactggaaccagctacccagtacagagttcggttgtccgtcctcggacccgccggggaaggccccagtgcggaagtcaccgctagaactgagtcaccccgcgtgccgtccatcgagttgcgggtagttgacacttcaatcgattcagtgacactcgcctggactcctgtctctagggcatccagttacatcctgagctggcgccctctgcggggcccaggtcaggaggtgccaggtagtccacaaacgctccctggtatcagttcaagccagcgggtcaccgggctcgagcctggtgtgagttatatcttttctcttacacctgtgctcgacggcgtgaggggccctgaggcgtccgtgacccagacgcctgtgtgtcccagaggcctggcagatgttgtttttctgccgcatgcaacccaggacaacgctcaccgcgctgaggccacccgaagagtgctcgagaggctcgtgctcgcgctgggtcctttgggcccccaggcggtgcaggtgggccttctctcatacagtcacaggccctccccactgttcccactcaatgggtcacacgacctggggatcatcctgcagaggatccgagatatgccgtacatggatccaagcggtaacaatctgggaactgctgtggttacagcccatcggtacatgctggcacctgacgccccggggaggaggcagcacgttccaggcgtgatggtactgttggtcgacgagcccctgagaggtgacatcttctcccccatccgggaggcacaggcctcaggccttaatgtcgtcatgcttggtatggccggggctgacccagaacagctgaggcgcctggctcctggaatggattcagtgcagactttttttgccgtagacgatggtcccagccttgaccaagccgtgagcggactcgccacagctctgtgtcaagcaagctttaccactcagccccgaccagaaccatgcccagtatactgcccaaaagggcagaagggagagcctggcgagatgggcctgagaggccaggttgggccgccaggagatcctggacttcctgggcgcacaggtgcccccgggccgcagggacctccagggagcgcgacagcaaagggcgagagaggctttcccggtgcagatggaagacccgggagcccgggacgcgccggaaaccctggtaccccgggcgcccccggcctcaaaggctccccagggctgcctggccccaggggggacccaggggagcggggtccaagaggtcctaaaggggagcccggggcccccggacaagtaatcggtggcgaggggccaggactgcccggccggaaaggcgacccgggaccctctggcccacccggtccaagagggcctctcggcgatcccggacccaggggaccgcctggactgccaggaactgcaatgaagggggacaagggggatcgcggagagagagggccccccgggcctggagagggaggcatcgcgccaggggagcctggcctccctgggctgcccggctctcccgggccgcaggggccagtgggtcctccaggcaagaaaggcgagaagggcgactccgaagacggagctccaggtctgcccggacagcccgggagccctggcgaacaaggcccgaggggccctcctggtgcgattggtccaaagggcgacagggggttcccaggtccactgggagaggctggtgagaagggcgagaggggcccaccaggcccagcaggctcccgcggtcttcccggtgtcgctgggcggccgggtgccaaaggtcccgaagggcctcccggaccgacaggtagacagggggagaagggggagccaggccggccaggggatcccgctgtggtagggccagccgtggccggaccgaagggggaaaagggggacgtgggacccgctggacctaggggcgcaacgggtgtgcagggggagcgcggcccacccggattggtcctccccggtgatcctggaccgaagggggaccctggggatcgcggtcctatcggtctgacaggccgcgccggaccccctggggattccggccctcccggagagaaaggcgatccaggtcgccctggcccacccggtccagtgggcccccgcgggagggatggtgaggtgggagaaaagggagacgaaggaccccccggcgatcccggtctgcccggtaaggctggtgagagaggtctgagaggggcacctggggtgcgcggacctgtcggggagaagggcgatcagggagaccccggggaggacggcagaaacggttccccaggatcttcaggcccaaagggcgaccgcggcgagcctgggcctccgggtcctcccgggcgccttgtcgataccggcccgggagctcgggagaagggagagccaggcgatagggggcaggaaggacctcggggtcccaagggagatcctggtcttccaggggctcctggggaaagggggatagaggggttccggggaccccctgggcctcagggagaccccggcgttcgcgggcccgcaggtgaaaaaggggaccgcggcccgcctggactcgacggccgctccggccttgacggaaagcctggcgccgcaggaccaagtggccctaacggagctgcaggcaaagcgggcgatccaggacgggacggactccctggactgagaggggaacaggggctgcctggcccatccggcccccctggccttcccggcaaaccgggcgaggacggaaagccaggccttaatggaaaaaatggggaacctggggacccaggagaagacggaaggaaaggtgagaagggggactccggagcaagtgggagagaggggcgggacggtcctaaaggagagaggggcgctccgggcatcctcggtcctcagggcccaccagggctgcctggccccgtggggcctcccggccagggatttccaggtgttcccggcggaacaggtccgaaaggtgacagaggggagactggatctaagggcgaacaaggcttgcccggagaaaggggtcttagaggggagcctggtagcgtcccaaacgtcgaccggctccttgagacagctggaattaaggcatccgccctcagagaaatagtcgagacatgggacgagagctctgggtcctttcttccggttcctgagagaagaagaggacctaagggagattcaggagagcaaggaccacccggaaaagaaggccctatcggatttccaggcgaaagagggctcaagggggataggggtgatcccggccctcaggggccaccgggcctggcacttggagagcgcgggccgcctggaccatccgggcttgccggggagcccggcaaaccgggtatcccaggcttgccaggacgggccgggggcgtgggagaagctggccggcctggggagcggggcgagcggggggagaaaggagagcgaggcgaacagggtcgcgatggacctcctggcctgcccggtacaccaggcccccccggtcccccaggccctaaagttagtgtcgacgaaccaggcccagggctcagtggggagcaaggccccccagggttgaagggtgccaaaggcgaaccaggttccaatggggatcagggacccaagggtgaccgaggcgtgcccggcattaaaggggaccgcggagagccaggacccaggggacaagatgggaatccgggactcccgggcgagaggggtatggccggacccgagggtaagcctggcttgcagggacctagaggtcccccgggccctgtaggcggccacggcgatcccggcccaccaggcgcccctggactggcaggacccgctggaccgcagggcccatcaggactcaaaggcgaaccaggggagacaggtccgccaggaagaggcctcaccggccccacaggagctgtggggctgcccggtccaccgggaccaagcggcctggtggggccacagggatccccgggactgcctgggcaggtaggagagacagggaagccaggtgcgcctggcagggacggagccagcgggaaagacggggatagaggcagccctggagtgcctggcagcccaggactgcctggccccgtcgggccaaaaggggaacccggaccgaccggggccccaggacaggcggtggtgggcctgcctggcgctaagggagagaagggagcacccgggggactggcaggagatctcgttggtgaaccaggtgcaaagggcgaccgcggtctgcccggtcctcggggggagaagggagaggcaggacgagctggggagccaggagatcctggagaggacggtcagaagggcgcgcctgggccaaaaggttttaagggcgacccaggagtgggtgtaccgggatcccctgggccccccggcccccccggagttaagggcgacctgggcctccccggactgcctggcgcaccaggagtggtcggattccccggtcaaacaggcccaaggggagagatgggtcagccaggacccagtggagagcgggggctggcaggcccacctggacgagaaggaatcccggggcccttgggcccccccgggccacccggctccgtgggcccccctggggcctctggtctgaaaggggacaaaggggacccaggtgtcggactgcccggcccccggggggagaggggagagccaggtattcggggagaagatggccgaccaggccaggaaggcccgaggggccttacaggaccccctgggtctcgcggcgagcggggagaaaagggagacgtaggatctgcgggtttgaaaggagacaaaggcgactccgcagtgatcctgggccctccaggccccagaggtgccaagggtgacatgggagagcgagggccacgaggactggatggcgataaaggacccagaggtgacaatggcgatcctggagataaggggtctaagggagagcctggcgataaggggtctgctggactccccggtttgagaggcctgcttggtcctcaaggtcaacccggagccgctgggattccgggggaccccggctccccggggaaggacggtgtcccaggcattagaggagaaaagggcgatgtcgggtttatgggaccaagaggtctcaagggggagcgcggagtgaaaggtgcttgcggacttgacggggagaaaggcgacaagggtgaggccggccctcctggcagaccggggctggcgggacacaaaggagagatgggcgaacccggagtacccggacaatcaggcgcacccggtaaggaggggctgattggcccaaagggcgatcgagggttcgatggacagcctggtccaaagggagaccagggcgagaaaggggagagggggacccccggcattgggggatttcctggtccaagtggcaatgacgggagcgcaggcccccccggtcctcccggaagcgtggggcctagaggcccggaagggctgcaaggacaaaagggtgagcgggggcctccgggtgaacgagtcgtaggcgctccaggcgtcccaggggcccctggcgagcgcggggaacaaggtaggcccggacctgcaggaccccggggagaaaaaggagaagcagccctgacggaggatgatattcgcggcttcgtacgccaggaaatgtcacagcactgtgcatgccagggtcaatttattgcctctggatccagacctctgcccagctacgcggcggatactgctggctctcaacttcacgccgtgcctgtgcttcgcgtgtcccacgcggaggaggaggagcgggtacctccggaagacgatgaatattctgaatacagcgagtatagtgttgaggaatatcaggacccagaggcaccttgggacagcgacgatccctgctcactccccctggacgaaggtagctgtactgcttatacgttgaggtggtatcaccgcgctgtgacgggctcaaccgaagcatgtcatccgttcgtgtacggtgggtgtggaggcaatgcaaatagatttggtacccgggaagcctgtgagagacggtgtccacctcgggtggtgcagtctcagggtaccggcaccgcgcaagat

SEQ ID NO: 1515 - DNA, 8832 bp, Artificial Sequence
  derived and/or modified sequence
atgactctgaggctgctggtggccgcgctgtgtgccgggattctggcggaagccccgagggtgagggctcaacacagagaaagagttacgtgcacccgcctgtacgccgctgacattgtctttctgctggacggctcctcgtccattggacgctccaacttccgggaggtgcgctcgtttctcgagggtctggttctgcctttctctggagccgccagtgcgcagggcgtccgcttcgcaactgtgcaatacagcgacgacccacggaccgaattcgggctggatgccctgggctccggaggggacgtgatccgcgccatcagggaactctcctacaaggggggaaacacgaggactggagccgcgattctgcacgtggctgatcacgtgtttctgccgcaactggcaagaccaggcgtcccaaaggtctgtatcctgattaccgacggaaaatcacaggacctggtcgacactgccgcgcaacggctcaagggacagggcgtgaaactgtttgccgtgggaatcaagaacgcggaccctgaagaactcaagcgggtggccagccaacctacttctgacttcttctttttcgtcaacgatttcagtatcctcaggacgcttctgcccctggtgtctcgccgcgtgtgcactaccgccgggggtgtgccagtcacccgcccgccagatgattccacttccgcacctcgggacctcgtgctgtccgagccatcctcgcagtcgttgcgcgtgcagtggactgcagcctcgggcccagtgaccggctacaaggtgcagtacactccgctgactggcctcggacaacctttgcccagcgaacgccaggaggtgaatgtcccagcaggagaaacctcggtcagactgcggggcctgcgccctctgaccgaatatcaggtgaccgtgatcgctctgtacgcgaactccatcggagaggccgtgtcgggtaccgcgcgcaccactgcgctggaaggacccgagcttactatccagaatactaccgctcattcgctgctggtcgcctggagatcggtcccgggcgctaccgggtatcgcgtcacttggcgcgtgctgtcgggaggaccaacgcagcaacaagaactgggaccaggccagggttcagtgctgctgcgggatctggagccggggaccgactacgaggtcaccgtgtccaccctgttcggtcgcagcgtgggaccggcaacgagcctgatggcgaggaccgacgcatcagtggagcaaactctgcggccagtcatcctcgggccaacttcaattctcctctcctggaatctggtgcctgaagcacgcggctaccggttggagtggcgcagggagactggcctggagcctccgcaaaaggtggtgctcccttcagatgtgacccggtaccaactcgacggactccagccgggcaccgaataccgcctcactctctacaccctcctggagggtcacgaagtggcaactccggccactgtcgtgcccaccggacccgagctgccggtgtcgccggtgaccgacctgcaggctaccgagctgccgggacagcgcgtgcgagtgagctggtcccccgtgccgggtgcgactcagtaccgcattatcgtgcgttcgacgcagggggtggaacggactttggtgttgccgggctcccagaccgcgttcgacctggacgacgtccaagccggactgtcctacaccgtgagagtgtctgcccgagtcggcccacgggaaggatcggcttcggtgctgacggtcaggagagaaccggagacgccgctcgctgtgccaggtttgagagttgtggtgtccgatgccaccagagtgcgcgtcgcctggggacctgtgccgggcgccagcggattcagaatctcgtggtcgactggcagcggaccggaatcttcgcaaacgcttccaccggactcgaccgccaccgacatcactggactccaaccgggaactacgtaccaagttgcggtgtcggtcctgagaggcagagaagaaggtccagcggcagtgatcgtggcacgcacggacccgcttggaccggttcgcaccgtacatgtgacccaagcatcgtcgtcatccgtgacgattacctggacccgggtgccgggcgcaactggctaccgcgtgtcgtggcactcagcgcacggaccagagaagagccagctcgtgtccggcgaagcgaccgtcgccgagctggatggtctggaacctgacaccgaatacactgtgcatgttcgcgcgcatgtggcgggcgtggatggaccaccggcatcagtggtggtccgcaccgctccggaaccagtgggacgggtgtctcgcttgcaaatcttgaacgcaagctcggatgtgctgcgcatcacctgggtcggagtgactggagccactgcataccggctggcatggggacgctcggagggcgggccgatgcggcaccaaatcctgccgggtaacaccgacagcgcagaaatccggggactggagggaggagtctcctacagcgtccgcgtgaccgcccttgtgggtgaccgggaaggaactccagtgtcgatcgtggtcactacgccgccagaagccccgccggccctgggaaccctgcacgtagtccagcggggtgaacatagccttcggctgcggtgggaaccagtgcctcgcgctcagggattcctgctgcattggcagccggaaggtgggcaggaacagtcccgggttctgggcccagaattgtcctcgtaccacctcgacggactcgagccggcaacccaataccgcgtgcgccttagcgtcctcggcccggctggcgagggtccgtcagcggaggtcaccgctagaacggagagcccgcgggtcccgtccatcgaactccgggtggtcgacacgagcatcgactcagtgactttggcgtggactccggtgtcgagagcctcatcttacatactctcttggcgaccgttgcgggggccgggacaggaggtcccaggcagcccgcagactctccctggaatctcatcgtcccagagagttactggactcgaaccgggggtgtcctatatcttcagtcttactccagtgctggacggcgtcagggggcctgaagcctcggtcactcaaaccccggtctgccctaggggactcgcagacgtggtgttcctcccacatgcaacccaggacaacgcgcatcgcgccgaggctacgcggcgcgtcctggagagactggtccttgccctcggcccactcggaccccaggccgtgcaggtcgggctgttgtcctactcccacagaccttccccgctcttcccgctgaacggctcccatgacctcggaatcattctgcagcggatccgtgacatgccctacatggacccaagcgggaataatctgggcaccgctgtcgtgactgcgcacagatacatgctggctccggacgcacctggacggagacagcatgtgccaggagttatggtgctgctggtcgacgaacctcttaggggggatatcttctcgcccatccgcgaggcgcaagctagcggcctgaacgtggtcatgctcgggatggccggcgccgaccctgagcaattgaggcggctcgcgcccggaatggactcggtgcaaactttcttcgcggtcgacgacggaccatcactggatcaggcagtgtccggtcttgcgaccgcactgtgccaggcttccttcaccacccagccacgcccagaaccatgcccggtgtactgcccaaagggacaaaaaggagaaccgggggagatgggactgcgcgggcaggtgggcccgccgggagatccagggcttccggggcggaccggagcccccgggccgcaagggccaccggggtccgcgaccgcgaaaggggagcgaggcttccctggggctgacggcaggccgggttcgcctggtcgcgcaggaaacccgggaaccccaggcgccccaggactgaagggaagtcccggtttgccgggcccacggggcgaccctggagagcgaggaccgcgcgggccgaagggcgagccgggagccccgggtcaggtgatcggtggggaaggcccaggcctccccggacggaagggcgatccaggaccgtccgggccacctggtccccgcggcccgcttggagatccagggccacgcgggcctccaggcctgccgggaaccgccatgaagggcgacaagggagacagaggagagagaggacctccggggccgggagaaggaggaattgcccccggtgagccgggactgcctgggctgccaggatcacccggacctcagggacccgtcggcccgccgggtaagaagggcgaaaaaggggacagcgaggacggcgcgcctggactcccaggccaaccgggatccccgggagagcaaggacctcgcgggccccctggagctatcggcccaaagggagatcgaggatttccgggaccactcggggaagcgggcgagaaaggggagcgaggacctccgggaccagccggctcgagaggcctcccaggtgtggccgggcggcccggagccaaggggccggaaggaccgcccggtcctactggaaggcagggagagaaaggagagccgggccgaccaggagatccagcagtcgtcggtccggctgtggcaggaccgaaaggagagaagggtgatgtggggccggctggaccaagaggagcaaccggtgtgcagggggagcggggcccgcccgggttggtgctcccaggggacccgggacctaagggagatcccggggacagaggcccgatcgggcttaccggacgcgccggtccacccggagactcagggccgcctggggaaaaaggtgatccgggacggccgggaccccctggacctgtggggccacgggggagggacggggaagtgggtgagaaaggagatgaagggccgccgggtgacccagggctcccgggaaaggctggcgaaagagggctccgaggagcacccggcgtgcgcgggcctgtcggagaaaaaggcgaccaaggcgatccgggagaagatggtcgcaacgggtcacccggatcgtcaggcccgaagggggataggggcgagcctggccccccgggacccccgggccggctggtcgacactggaccgggagcccgcgagaagggagaacctggtgatcgcggccaggaaggtccgcgcgggccaaagggagatcctggacttccgggagcgcccggagagcggggaatagagggatttcggggtccgcctggtccgcagggcgacccgggcgtacggggacctgctggcgaaaaaggcgaccggggaccacctgggttggacggtagatctgggctcgatggaaagccgggagccgcggggccgagcggacctaatggggcggccggaaaggcgggagatccgggacgggatggactccctggattgcggggcgagcagggactcccgggcccttccggtccacctggtctgccgggcaagccgggagaggacggtaagcctgggctcaatggcaagaacggcgaacccggagatcccggtgaagatgggagaaagggagaaaaaggagactcgggggcctcgggacgcgagggtcgcgacggcccaaagggggaacgtggagcgcccggcattctgggcccgcagggtcccccgggtttgccaggccctgtaggtccgccgggacagggattcccgggcgttccggggggaaccgggccaaaaggcgatagaggcgagactggaagcaagggagagcaggggctcccaggcgagcgcggattgagaggagagccgggatcggtgccgaacgtggaccgcctgctggaaaccgccggaatcaaggcctccgccttgcgggaaatcgtggaaacttgggacgagagctcaggatcgttcttgcctgtgccggagcgccggaggggtccgaagggcgatagtggagagcagggtccgcccgggaaggaagggccgatcggattccccggagaacgcgggctgaagggggaccgtggggaccctggcccacaggggccgccaggtctggcgctcggtgagaggggcccgcccggtccgagcggactggcgggtgaacctggcaagccgggcatccctggccttcctggtagagctggtggagtcggagaagcaggtcgcccaggagaacgtggcgagcggggagaaaaaggtgagcgcggggaacaaggcagagacggtccgcctggtctgcccgggactcccggaccacccgggccgcctgggccgaaagtctcggtggacgaacctggcccgggcctgtccggagaacaaggacctcctggactgaagggtgcgaaaggcgagcctggatcgaacggcgaccagggccctaagggagatcgcggtgtcccaggaatcaagggcgatcgcggcgagcccggtccacggggacaagacggaaatccgggtttgccgggcgagcgcggaatggcgggaccggaaggaaagcccggacttcaagggccgaggggaccgcccgggcctgttggaggacacggagatccggggcctccaggtgccccgggactggccggaccagccggtccacagggcccttcgggtctgaaaggagaacctggagagacgggcccccctggcagagggctgactggaccgaccggtgccgtgggcctgccaggaccacctggcccgtcgggattggtgggcccccagggatcaccgggactgccagggcaggtgggcgaaaccgggaaaccaggcgcacctggcagagatggagcgagcggaaaggatggtgaccggggcagcccgggagtacccggctcccccgggctgccaggacctgtaggaccaaagggtgaaccgggtccaaccggagcccctgggcaagccgtcgtggggctcccaggagcaaaaggcgaaaagggtgcaccgggcgggctggcgggggatctcgtcggtgaacccggagcgaagggtgaccgcggacttcccggcccacgaggtgaaaagggcgaagcgggacgggctggagagccgggtgacccaggagaggatggacaaaaaggcgccccagggccgaagggattcaagggagatcctggcgtgggagttccaggttcgccgggcccgcccggaccgccaggagttaaaggggatctggggctcccgggtctgcctggagccccgggcgtggtgggctttccgggtcaaaccggaccgcggggagaaatggggcagccgggacccagcggagaacggggtctggcaggaccgccgggaagagaaggcatccccggccctctgggtcctcccggcccacccggatcggttggacctccaggtgcaagcgggctcaaaggtgacaagggtgacccgggagtcggactgccaggaccgagaggagagcggggagaacctgggatccggggtgaagatggtagaccaggtcaggaaggcccaagaggacttactggccccccaggatctaggggagagcgtggagagaagggagatgtgggttcagcaggcctgaagggagataaaggtgactccgccgtgatccttggcccacctgggccgagaggtgctaagggtgatatgggagagcgcggaccgagagggctcgacggagacaagggtccgcgcggggataacggagatccaggcgacaagggcagcaagggtgagccgggcgataagggcagcgccggactgcctgggctcaggggattgctgggcccgcagggacagcccggagccgctggcatcccgggcgacccaggaagtccaggaaaggacggggtccctggcatcagaggtgaaaagggagacgtgggatttatgggcccccgaggactcaagggagaacggggcgtcaaaggggcatgcggactggatggagagaagggggacaagggcgaagccggacctccgggtcgaccgggcctcgctggacacaagggcgagatgggagaaccaggcgtgcccggacaatcgggagccccaggtaaagaaggcctgatcggacccaagggggaccgcgggttcgatggacaaccaggaccaaaaggcgatcaaggagagaagggagaacgtggcactccaggaatcggaggctttcctggcccatccggaaacgacggatccgcagggccaccaggcccaccagggagcgtcgggcctcgcggtccggaaggactgcaggggcagaaaggagagcggggcccacccggagaacgagtggtgggcgctcctggggttcctggtgccccaggggagaggggcgaacagggacgccccggacctgccggaccgaggggtgaaaagggagaggccgcgctgactgaggacgatatcagaggattcgtgagacaggaaatgtcacaacattgcgcctgccagggtcagttcatcgcctccggatcacggccgctgccttcatacgctgctgacactgcgggaagccagctccacgccgtcccggtgctccgtgtcagccacgccgaggaagaggaacgagtgccacctgaagatgacgaatactccgagtatagcgaatactcagtggaagagtaccaggatcctgaggccccgtgggactcagatgatccttgttcactcccgcttgacgagggaagctgcaccgcctacactctgcgctggtaccaccgggcagtgactgggtctaccgaagcgtgccacccgttcgtctacggtggatgtggaggaaatgctaatcgctttggcactcgcgaagcatgtgaaaggagatgccccccacgagtggtccagtcacaggggaccggaaccgcccaggac

SEQ ID NO: 1516 - DNA, 8832 bp, Artificial Sequence
  derived and/or modified sequence
atgactctgaggcttcttgtggctgccctttgtgcagggattcttgcagaagcccctcgcgtgagagcgcaacaccgggaacgcgtgacttgcaccagactgtacgcggcagacatcgtgtttcttctggatggatccagctcaataggcagatcgaattttcgcgaagtccgtagcttcctggaggggcttgttctcccgttttcaggagcagcgtcggcacagggagtgcgatttgcaactgtccaatactccgatgatccacggaccgaattcggactcgacgccctcggttccggcggtgacgtcatcagggccatccgcgaactttcttacaagggaggcaatacccgaactggggctgctatcctgcatgtcgcagaccacgtgttcctgccacagctggcaagacctggagtgccaaaggtgtgtatccttattactgatggcaaaagccaagatcttgtcgatactgcagcacaacgtctgaagggtcaaggtgtgaagctctttgctgtcggtattaagaatgccgatcctgaggaactgaagagagtggcctcccagccaacctctgacttctttttcttcgtgaatgatttttcgattcttaggaccctcctccctcttgtcagcaggcgcgtgtgcactacggcgggcggagtccccgtgactagaccccctgatgattcaacgtcggctcccagagatttggtcctgtcggaaccatcgtctcagagccttcgtgtgcagtggaccgcagcctcaggccctgtcactggctacaaggtgcagtacacccctctgaccggtcttggacaacccctgccatccgaacgccaggaggtgaatgtgccggcaggagaaacttccgtgagattgagaggtctgcgaccccttaccgaataccaagtgactgtgatcgcactgtacgcaaactccattggagaagcagtctcgggcaccgcgcgcactactgcacttgaagggcccgaacttacgattcagaatactactgctcatagcctgctcgtcgcatggcgttcggtcccaggtgcaaccggataccgtgtgacctggcgggtcctctcgggcggaccaacccaacaacaggagctgggacccggacaaggttccgtccttcttagagatttggagcctggaactgattacgaagtcactgtgtcgacccttttcggacgctccgtgggacctgcaaccagcctgatggcaaggactgatgcgtccgtggagcagacgctgcggccagttattcttgggccaacttcgattctgctttcgtggaacctcgtgcctgaggctcgtggatacaggctggagtggcggagagagacgggcctcgaaccaccacagaaggttgtcctgccttctgacgtgacgagataccaacttgatgggcttcaaccaggaacggagtacagactgaccctttacacccttctcgagggccatgaagttgcgactccagcaacggtggtgcctacgggcccggagctgccagtctcccccgtgactgaccttcaagcaaccgagctcccaggacagagggtcagagtgtcgtggtcacccgtccccggggcgacgcaataccgtatcatagtccgatctactcagggcgtggagaggaccctcgtccttccagggtcccagaccgctttcgacctggatgacgtgcaggcaggactgtcctacaccgttagagtttccgcgagagtggggcctagagaggggagcgcctcggtgttgaccgtgcgacgggaaccagagactccacttgcagtgccaggactgagagtcgtggtgtccgatgccaccagggtccgggtggcatgggggccagtccctggagcttcaggatttcgtatcagctggtcgaccggttcgggaccagagtcctcacaaacgctccctccggactccaccgctacggacattaccggactgcaaccgggtactacttaccaagtggcggtgtcagtcctgcgaggtagggaagaaggtccagccgccgtgatagtggcccgtactgatcctttgggcccagtcaggaccgttcatgtgacccaggcatccagctccagcgtcactatcacgtggacgagagtgccgggtgctactggttaccgagtgtcatggcatagtgcccatggaccagaaaagtcccagctcgtgtcgggtgaagccaccgtggcggagcttgacgggcttgaacccgataccgagtacaccgtccatgtgcgggcacatgtcgcgggtgtggatggtccaccagcctcggttgtggtgagaactgctcccgaaccagtgggaagggtttcgcgcctccaaattctgaacgcgtcatcagatgtgctgcgtatcacttgggtgggagtgaccggagccactgcctaccggctggcatgggggcggtcagaggggggtcccatgcgacatcaaatactcccaggcaatactgacagcgccgaaattcgtggacttgaaggtggagtgtcgtactcggtgcgggtgactgcacttgtcggggatcgggaaggcactcccgtctcgattgtggtgaccacgcctcccgaagcacctccagcgttgggaactcttcacgtggtgcaacggggagaacactcgttgagactcaggtgggagcctgtgcccagagcacaggggtttcttctccattggcaacctgaaggagggcaggaacagtcacgggtcctcggtccagagcttagctcatatcacctggacggacttgaacctgctacccagtacagagtcaggctctctgtccttggacctgcaggggagggaccctcggcagaggtgacggcaagaactgaatcgcccagagtgcccagcatcgaactgagagtcgtggatacctcgattgattcggtgaccttggcctggactcccgtctcgcgcgcatcaagctatatcctgtcgtggcgcccacttagaggcccaggacaagaggtccctggatcacctcaaaccctccctggaatttcttcgtcccaacgtgtgaccggtttggagccgggagtgtcgtacatcttttccctcactcctgtgctggacggagtgagaggacctgaagcgtcagtgacgcaaaccccggtgtgtcctagggggctcgcagatgtggtgtttctgccccacgctacccaagataatgctcaccgtgccgaagccactagacgcgttcttgagagactggtgctggctcttggacctctcggtcctcaagcagtgcaggtaggactgctttcatactcgcataggccatcgccactgtttccactgaacggtagccacgatcttggtatcattctgcaacgcatccgagatatgccatacatggatccgtccggtaataacctgggtaccgccgtggtgactgcccacaggtatatgctggcacctgacgcacccggacgtcgtcaacatgtgcccggagtgatggtgcttcttgtcgatgagcctttgcggggtgacattttctctccaatacgggaagctcaggcctcgggtctgaatgtggtgatgcttggaatggcaggtgctgaccctgaacagcttagacgtctggctccaggaatggattcagtccagacgttttttgcggtggacgacggcccttccttggatcaagccgtatccggattggcaaccgcactttgtcaagcatcctttactacccagcctaggcctgagccttgccccgtctactgccccaaagggcagaagggtgaacctggggagatgggccttagaggtcaggtggggccacccggagatccaggacttccaggaaggactggtgcaccaggacctcaaggtcctcctggttcggccaccgccaagggagagcgaggattccctggtgccgatggcagacccggttcgccaggtcgcgcaggaaaccccggcactccaggagctcctggactcaagggttccccgggcctgcctggccctcgtggtgaccctggagaacgcggaccaaggggtccaaagggcgaacccggagcaccaggacaagtcattgggggagaaggacctggactgcccgggcgtaagggtgacccaggtccctccggcccacctggcccacgaggtcccctgggcgaccctggcccacgaggtcctcctgggctgccaggaaccgcaatgaagggagacaagggcgaccggggagagcgcggtccaccagggccaggtgaggggggaatagcaccgggagaaccgggactccccggattgcctgggtcgcccggccctcaaggtccagtgggaccaccaggaaaaaagggtgaaaagggcgatagcgaagatggtgcacctggactgccaggtcagcctggttcccctggggaacaaggtccccgaggcccgcctggggctattggtcctaagggtgataggggttttcctggaccccttggtgaagccggcgaaaagggagagagaggacccccaggaccagcaggttcacgcggcctgcctggtgtggctggtcggcccggagcaaagggaccggagggaccacctggacccaccggtcgtcaaggagaaaagggagaacctggacggcctggcgaccctgcggtggtcgggccagcagtcgcaggacctaagggtgaaaagggagacgtcggaccagcaggtcctcgtggtgcaactggggtgcagggcgaaagggggccaccgggcctcgtgctcccaggagatcctggtccaaaaggagatccgggcgatcggggcccaatcggtctgacggggagagcaggtcctcctggagattccggaccccctggggaaaaaggagatccaggtaggcccggtcctcccggtcctgtgggccccagagggcgtgatggagaggtgggtgaaaagggagacgaaggtccgccaggagatccaggacttcccggaaaggcgggagaacgcggcctgagaggggcacctggggtgcggggtcctgtgggtgaaaagggtgaccagggagatccgggggaggatggaaggaatggaagccctggttcatccggacccaaaggggatcggggagaacccggtccaccaggaccaccgggacgactcgtggataccggtccgggggcccgtgaaaaaggagaaccgggagatcgcggacaagagggaccccgcggaccgaagggcgatccaggactgcctggagcacccggagaacgcgggatcgaggggttcagaggccctccaggaccacaaggagatccaggtgtccgagggcccgcaggggagaagggtgatagagggcccccgggcctggatggccgctcgggactcgacggtaagcccggagcggcaggaccatcgggaccgaacggcgctgcaggcaaggccggtgatccagggagggatggactccccgggcttcgcggagaacagggccttcctggtcctagcggtccaccaggtctgcctggaaaaccgggagaggacgggaagccgggtcttaacggtaagaacggggagcctggggatccaggagaagatggacgaaagggcgagaagggagactccggtgcttcagggagggaaggtcgtgatggaccaaaaggagaacgcggagcaccaggcatcctcggaccacagggccctcccggacttcctgggccagtgggccccccgggccaagggtttcccggtgtccctggaggtaccgggccaaagggagatcgcggagagactggttccaagggagaacaaggactgcctggtgagagaggcctccgcggcgaaccaggctcggtgcctaacgttgatcggctgcttgaaaccgcaggaataaaggcctcggcactgagagaaattgtggagacttgggacgaatcctcaggttcatttctgccggtgcccgaacggagaagagggccaaagggagactccggagagcagggaccccctggaaaggagggacccataggtttcccaggtgaacgcggtcttaagggggatcgcggagatcctggtccgcagggacccccaggactggcactcggagaacgaggacccccgggcccctcgggccttgccggagaacctggaaagcctggtattcctggtttgcccggtcgggcaggtggggtcggggaggcaggtcgccccggcgaaaggggagaaaggggtgaaaaaggcgaaagaggagaacaaggacgggatgggcctcctggcctccctggaaccccaggaccgccaggccctcccggccctaaggtgagcgtggacgagcctggccctggactttccggtgaacagggtccacctggtctgaagggagcaaagggcgaacctggatcaaacggagatcaggggcctaaaggggacaggggagtgcctggaattaagggtgatagaggtgaacctgggcctcggggacaagacggtaaccctgggctccctggcgagcggggaatggcgggaccagaggggaagcctggtctgcagggaccgagaggcccacctggccctgtggggggacacggggaccctggacctccgggtgcccctggactggcaggacctgcagggccccaagggccatcgggactcaagggtgaacctggggagactgggcctccaggacgtggcctgacgggcccaaccggcgcagtcggcttgcccggtcctcctggcccctcgggactcgtgggccctcaagggtcaccaggacttccgggtcaagtcggagaaactggtaagcctggcgcaccaggcagagacggggcatcaggaaaggatggagacagaggatcaccaggggtccctggatcacctgggctcccgggccctgtggggccaaagggggagcctggacctactggtgcccctggccaggccgtggtgggactccctggggcgaaaggcgaaaagggcgcacccggaggactggcgggagatttggtgggtgaaccgggagcaaagggcgatagaggactccctgggccaagaggtgaaaaaggtgaagccggacgtgccggagaaccaggcgatcctggagaggacggccagaagggcgcacccggtcccaaggggtttaagggggaccctggtgtcggtgttcctggatcccctggaccccctgggccccctggtgtgaaaggggaccttggtctgcctggactccctggtgcacctggagtcgtgggcttccctggacaaactggtccacgtggtgaaatgggccaacccggaccgtcgggcgagcgaggtcttgcgggtcccccaggaagagagggaattcccggaccacttggtcctccaggaccacctggatcggtggggcctccaggagcatccggactcaaaggcgataagggcgatccaggggtcggattgcctggtccaagaggagaacggggcgagccaggcatccgcggcgaagatggacggcccggccaagaaggtcctaggggacttaccggacctcccggatcgaggggagaacgcggtgaaaaaggagatgtgggatcagcagggcttaaaggggataagggcgattcggcagtcattcttggacctccaggaccacggggtgcaaaaggtgacatgggcgagaggggcccaaggggcctggatggtgacaaaggaccacgaggggataacggggatcctggtgacaagggctccaaaggagaacctggtgataagggctcagctgggctgcctggtctgcgaggactccttggccctcaaggacaacctggtgcggcaggcattcctggagatccaggctcgccaggtaaggatggagtgcctggaataagaggagaaaagggcgatgtcggcttcatgggtcctagagggctgaagggagagagaggagtcaagggggcctgtggtttggacggagaaaagggagacaaaggggaggcaggaccccctggccgcccaggacttgcaggtcataagggggagatgggtgagcctggagtgccgggtcaatcaggagcacctggtaaagagggactgattggtcctaagggcgatagaggttttgacggacagccgggaccaaagggggaccagggggagaagggggagagaggtaccccaggcatcggtggatttccggggccctcgggtaacgatggaagcgcaggtccaccgggtcccccagggtccgtgggtccccggggtcccgaggggctccagggacaaaagggagaaaggggaccgcccggagaacgcgtcgttggtgcacccggggtccccggagctccaggagaacgcggcgagcagggacgacctggaccggcagggccgagaggagagaaaggagaggctgcacttactgaggacgacattcgaggtttcgtgagacaagaaatgagccagcattgcgcatgtcaggggcaattcattgcaagcggatctcggcccttgccttcatacgcagccgatactgcgggttcccagctccatgcagtgcccgtgctgagagttagccatgcagaagaagaagagagagtccctccagaggacgatgaatactcggaatacagcgaatacagcgtggaagaataccaggaccccgaggcaccatgggattcggatgatccctgctcccttcccttggatgaaggatcgtgcactgcatacactctgcggtggtaccaccgggccgtgacgggatccactgaagcatgtcaccctttcgtgtacggaggatgcggcggaaacgcgaatcgattcggcacgagggaggcctgtgaacggagatgtccccccagagttgttcaatcgcaaggcactggcaccgcacaagac

SEQ ID NO: 1517 - DNA, 8832 bp, Artificial Sequence
  derived and/or modified sequence
atgaccctgaggctactggtagccgcactctgcgctgggattctggccgaggcccctagggtaagagcacaacatagggagcgagtgacctgcaccaggttgtacgccgctgacatcgtttttctgctggatgggagttcgagtatcgggcggagcaatttccgtgaggtacggagcttcctggagggtctggttctcccgttctccggtgctgccagtgcccagggagtccggtttgccaccgtccagtactcagatgatccacgaacggaattcggcttggacgctctcggctcggggggggatgttataagggcaatccgggagctgtcatacaaaggcggaaatacacgtactggagcggcaatcctgcacgttgcggatcatgtgtttttaccacagctggccagacctggggtgccgaaagtgtgtattctgataacagacggcaaatcccaggaccttgttgatactgctgcacagaggttgaagggccagggcgtcaagctgttcgccgtggggataaaaaatgccgacccagaggaactgaagcgtgttgcgagtcagcccacctctgatttcttttttttcgtcaatgatttcagcatcttgaggactctgctgcccttggtgtctcggcgggtgtgcacaaccgcaggcggcgtgccagtgacaagacctccggatgatagcacctctgcccctcgggaccttgtactcagtgaaccatcgtcacagtctcttagggtgcagtggactgccgcaagcgggccagttactggctataaggtccagtacacacctttaactgggctcggccaacctttgccctccgaacgacaggaggtcaacgttccggccggcgagacctctgttcggctgagggggctgagacccctgacggagtaccaggtcaccgtgatcgcactgtacgccaattctattggcgaggccgttagcgggacagcccgcaccactgcgctagagggcccggagttgacaattcaaaataccacagcccactcccttctggtcgcttggcgctctgtccctggcgctaccggatatcgcgtcacctggcgagtgctctcagggggcccaacccagcagcaagaactgggcccaggacaggggtctgtcctgctgagagatttggaacccggaacagactacgaggtaacagtgagcacactgttcggcaggtccgtcggtcccgcgacaagcttaatggcccgcaccgacgcaagcgtcgagcagactctacggcctgtcatccttggaccaacatctatcctcctaagctggaatcttgtgccagaggcccggggctaccggctggaatggcgccgcgagaccggtctggaacctcctcagaaagtcgttctaccatccgatgtgacacggtaccagctggatgggctacagcctggaacagaataccgactgaccctgtacaccctgttggaaggacatgaagtggccactccagccactgtcgtacctaccggcccagaacttcctgtgagtcctgtgaccgacctgcaggccaccgaacttcccggccaacgagttagagtgagttggagtcccgtccctggcgccacacagtacaggattatcgtcaggagcacgcagggtgtcgagaggaccctggtcctgccaggctctcagactgccttcgacctggacgatgtccaggctggtctgtcatacaccgtgagggtatccgcgcgcgttggacctcgagaaggaagcgcttccgttctaaccgtccgccgtgaaccggagacgccattggcggtgcctgggctgagagtggtggtgtcagacgcgacccgcgtgcgggttgcatggggcccagtgccaggagcgtcaggattcaggatatcatggagcactggcagcgggccagaaagttcccagaccctaccacccgactccactgccacagatatcacaggtcttcagcccggtaccacgtaccaagtcgcagtttctgtgctgcgaggtcgagaggaaggccccgctgccgtcatagtggcgcgcacagaccccctggggcctgtacgcactgttcatgtaacccaggcatcatcgtccagtgttacaatcacatggacacgggtgcccggtgcaacaggatatagagtgtcatggcactccgcccacggccctgaaaagagccaactcgtgtcaggagaggcaacggtggcagagctcgacggtctggaaccagacacagaatacacagtacacgtcagggcacatgtcgcaggcgttgacgggcccccagcgtctgtggttgttcggactgccccagagcctgtcggccgggtatcccggttgcagattttgaatgcaagctcagacgttctgaggattacttgggttggagtgaccggcgccacagcctataggctggcttggggacgcagcgaaggaggtccaatgcgccaccagatcctgcctggcaatactgacagtgcagaaattaggggtctcgaggggggcgtgtcatatagcgtgagagtgaccgcccttgtaggtgaccgggaggggactcctgtgagtatagtggtcacaactccccctgaggccccgccagcactgggaacactgcacgtcgtccagcggggcgaacactcactacgtctgcggtgggagccagtgccacgagcccagggctttctgctgcactggcaacctgaaggcggtcaagagcagagcagggtattagggcccgagctgtctagttatcaccttgacgggcttgaaccagcaacccaataccgtgtccggttaagcgtattaggcccagctggcgaggggccttcagcagaagtgacggccagaacagaaagcccacgagtcccttctatcgagctgcgagtcgtggatacctccatcgactccgttacactggcgtggactcctgtctcacgcgccagcagttacatactgtcatggcgccccttaaggggtccggggcaggaagttcctgggagccctcagacactgcctggaatctcatcgtcacagcgggtcacaggactggagccaggagtcagctacatattctctttaacaccagtacttgacggagttagagggccagaagcctccgtcacccagactccagtctgtccgcgcggactggctgacgtggtgtttctacctcatgcaactcaggacaacgctcaccgcgcagaggccaccaggagagtcctggaaagacttgttctggccctcggacctctggggccacaggccgtacaggtcggcttgctgagctatagccatagacctagccctctgttccccttaaatgggtctcacgacctaggaatcattcttcaaaggatcagggacatgccctacatggatccgagcggaaacaatctcgggaccgcggtggtgactgctcacaggtacatgctcgctcctgacgctcctggacggcggcaacatgtgcccggtgtgatggtactgctcgtggatgagccacttcggggagatatcttcagtcccatccgggaggctcaggcaagtgggttaaacgtcgttatgctgggcatggcaggagccgacccagagcagctgagacgcttagcacccgggatggactccgtgcaaaccttctttgccgtcgatgatgggccctcactcgaccaggccgtttctggcctggcgaccgctttgtgtcaagccagctttaccactcagccccgccccgagccatgtcctgtctactgccctaaagggcagaagggagagccgggtgagatgggcctgaggggtcaggtcgggcctccaggtgaccccggattgccagggaggacaggagcccccggaccacagggcccccccgggtccgccaccgctaaaggtgaacgagggttcccgggtgccgacgggcggccaggatctccaggtcgggcgggcaatccgggcacgcctggcgcccctgggctgaagggttctccgggcctgcccggcccccggggagacccgggcgagcgcggcccccgcggcccaaagggggagcccggtgcacccggccaggtgattggaggggagggtcccgggttaccagggagaaagggcgatcccggcccatctgggcctccgggacccagggggccactgggagaccccggacccagaggccctccgggcttgccaggtactgcaatgaaaggcgataaaggcgaccgcggcgaaaggggccccccaggcccgggcgaagggggaattgctcccggagaaccaggcctgccgggcctgcccggctcccctggaccgcagggccctgttggaccacccgggaagaagggtgaaaagggcgacagcgaagacggcgccccaggtctaccaggccagccaggtagcccaggagagcagggccccaggggcccaccgggagctatcgggccgaagggggaccgcggattccctgggcctttgggcgaggcgggcgaaaagggggaacgcgggccaccaggccccgctggaagccgcggcctgcctggggtcgcaggacgacccggcgctaaaggtcctgaagggcccccaggtcccacaggacgccagggcgagaagggagagcccggtagaccaggagatcctgctgtggttggacctgcggtcgcaggtcccaagggtgagaaaggtgatgtcggtcccgcaggcccacgaggagcgacaggtgtccagggcgagcggggtccccctggcctcgtgctgcccggcgatcctgggcccaagggcgacccaggcgaccgaggccctatcggcctcacggggcgcgcgggcccccccggcgacagcggccctccaggtgaaaaaggggaccctgggaggcctgggcctccagggcccgtggggccacgcgggcgcgacggcgaggtgggagagaaaggagacgaggggcctccaggggatccgggtcttcccggaaaagcaggtgagaggggtttgcgtggggctcctggcgtgagaggccctgtcggggaaaagggggatcaaggagatccaggtgaggatggacgcaacggatcccctggtagtagtggacctaagggcgacaggggcgagcctggtccccctggccccccaggcaggcttgtggacacagggcctggcgcaagagagaaaggcgaacctggagaccggggccaagagggccctcggggacctaaaggcgacccaggacttcccggggcgcctggcgaaagaggaatcgagggcttccggggcccgcctgggccacagggcgatccaggcgtgcgcgggccagctggcgagaagggagacaggggccccccagggctagacgggagaagtggtctggatggcaagcccggggctgccggcccgtcaggaccgaacggcgctgcagggaaagctggcgaccctggccgtgacggtctgcctgggctgcggggtgaacaggggctcccaggcccttcaggccctccagggttgcccggtaagcctggcgaagacggcaaaccgggccttaacggcaaaaacggggagccaggcgacccaggagaggatggcagaaagggtgagaaaggagatagtggcgctagcgggcgggagggccgggatgggcctaagggagaacgcggcgccccaggaatcttaggtccacaagggccacccggcctgccaggacccgttggccctcccggccagggtttccctggggtcccaggcggcactggcccaaagggcgataggggcgagaccgggtctaagggcgaacagggcttgcccggggagaggggcttgcgtggcgagcctggaagtgtaccgaacgtggacaggctcctggagaccgctgggatcaaagcaagcgcgctacgtgagatagtagaaacgtgggacgaatccagcggatcatttcttccagtccccgagaggcgccgaggccccaagggagactctggcgaacaagggccccccggaaaggaaggaccaatcggttttccgggagagcgtggcctgaagggagacagaggcgatcctggacctcaaggacctccgggccttgcgctgggggaacgtgggccccccggaccaagcgggctggcaggcgagcccggaaagccaggaatacccgggctgcccggacgggctggcggagtgggcgaagccggacggcctggtgagcgtggggagcggggcgagaagggagaacgcggcgaacaggggcgggatgggcctccaggtcttccgggaactcctggccccccaggaccccccggacccaaggtgtcggtggacgagccaggccctggcctgagcggcgaacagggaccaccaggtctgaagggggctaagggtgagcccggcagcaatggggaccagggcccaaaaggggaccgcggcgtgcctggaatcaagggcgatcgcggcgagccaggtccgaggggtcaggacggtaatcccgggctcccaggagaacgcggcatggccggacccgaaggcaagcccggcttgcaggggccaagggggcccccaggaccagtgggaggccacggtgaccctggcccccccggcgcccccggccttgcaggacctgccggaccacagggaccatccggcctcaaaggtgagcccggggaaacagggccccccggtagggggttgaccggtccaactggcgccgttggcttgcctggccccccaggaccatcaggtctggtggggccgcaggggagtcccggactgccagggcaggttggcgagactggtaagcctggagctcctgggagggacggcgcctcagggaaggatggggataggggcagtccgggtgtgcctggatcaccaggactgccgggacctgtcggtccgaagggtgaaccagggccaacaggagcccctggccaggctgttgttggcctaccaggcgcaaaaggcgagaagggggctccagggggcctcgcaggtgatctggtcggggagcctggtgctaaaggtgaccggggacttcccggcccccgtggcgaaaagggcgaagccggaagggctggcgaacctggggatcccggagaggacgggcaaaagggcgcaccaggaccaaagggcttcaaaggagatccgggcgtcggagtgcccggctctccaggccccccgggaccacctggagtcaaaggcgatcttgggctcccgggcttgccaggagccccgggtgtcgtcgggttccctggccagactgggccaaggggagagatggggcagcctggccccagcggcgagagagggttagctgggcctcctggcagagagggaattcctggccctctgggcccacccggcccccctggatccgtgggccctccaggtgcctccggcctcaaaggtgataagggagaccccggggtcggtctacccggcccaaggggcgagcggggagaaccaggaattcgtggcgaagacggtagaccaggccaagagggcccccgcggcctcacaggcccaccaggcagtaggggggagcgcggcgaaaagggcgatgtaggatccgcaggactcaaaggcgataagggggatagcgccgtgatcctcggaccaccaggaccccggggcgctaagggcgacatgggcgagaggggccccaggggcttagacggcgataaaggtcctagaggcgacaacggagaccctggagataagggtagcaaaggggagcccggtgataaagggtcagccggcttgcctggtctgcgcggcctgttgggtcctcaaggacagccgggcgccgctgggattccgggagaccctggttcccctggaaaagatggtgtccctggaatccggggtgagaaaggcgacgtagggttcatgggaccgagagggctcaaaggagaaaggggagtgaaaggtgcctgtggcttagacggtgaaaagggcgacaaaggggaagctggacctcctggaagacctggcctggcgggccacaaaggcgagatgggggagccgggcgtgcccggccagtcaggggcgccaggcaaggagggactgataggtcctaagggcgatagggggttcgacggccagcctggcccgaagggcgatcaaggcgagaaaggcgaaaggggcacccccggcatcggcggctttccgggtccttctgggaatgacgggtctgcaggacctcccgggcctccagggtccgtgggcccacgggggccagaagggttacaggggcagaagggcgaacggggaccacctggggagcgcgtcgtgggagctcccggagtgcccggagctcctggggaaaggggagagcagggtagacctggacccgccgggccccgcggtgaaaagggcgaagctgctctcactgaggacgacattcgcggctttgtgaggcaggagatgtctcaacactgtgcctgccagggtcagttcatagcttccggatctaggccattgccgagctacgccgcagacacagccgggagccagctccacgccgtcccagttttaagagtctcccacgcagaggaggaggagcgagtcccaccagaggatgacgagtattccgagtactcggagtatagtgtggaagaataccaggacccggaagccccttgggattcagatgacccatgctctcttcccctcgatgagggttcctgtacggcttacacccttcggtggtatcatagagcagtgacaggctctacagaggcatgccatccattcgtgtatggcggatgcggcggcaatgccaatcgctttgggacccgggaagcctgcgagagacgatgccccccccgcgtcgtccaaagccaagggacaggtaccgcccaggac

SEQ ID NO: 1518 - DNA, 8832 bp, Artificial Sequence
  derived and/or modified sequence
atgactttacggttgctggttgccgccctctgcgccggaatcttggctgaggcaccgcgcgttcgcgcgcagcatcgagaaagggttacttgcactagattatacgcagcagacatcgtcttccttttggatgggtcctcatccataggtcgcagtaatttcagagaggtcagatcctttttggaaggcctagtgttacctttctccggagccgcctccgcccagggggtcagatttgccaccgtacagtatagtgatgacccaagaacagagttcggcctcgatgctctcggtagtggaggagatgtgatccgagcaatcagggagttatcatataagggaggtaacacccgcacaggcgccgccatcctacacgtggctgaccacgtttttctacctcagttggccaggcctggcgtacctaaggtctgcattctgattaccgacgggaagagccaggacctggtggacaccgcagcccagaggctgaaaggacagggggtcaagctgtttgctgttggtatcaaaaacgcggatcccgaagagctgaagagggtagcatctcagccaacaagtgatttcttcttcttcgtcaatgactttagtatactccgcaccctcctcccgctggtgtctaggcgggtttgcactactgctggtggtgtgccagtcacacggccaccagacgattctactagtgccccccgggatctggtgctcagtgaaccttcctctcagtcactgcgggtgcagtggacagccgccagcggccctgttacagggtacaaggtccagtatacacctctgaccggactcggacagcccctgcccagcgaaaggcaggaggtgaacgtgcctgccggcgagaccagtgtgcggcttcggggtctgaggcccctgactgagtatcaggtgacagtgatcgccctctacgccaactctattggcgaggcggtgtcaggcacggctagaaccaccgcactcgaagggcccgagctcacaattcagaatacaactgcgcattctttgctcgtagcctggagatctgtccccggggccaccgggtaccgcgtgacttggcgcgtgctctctggggggcccacccagcagcaggaactgggaccgggtcagggcagcgtacttctcagagatcttgagccaggcacggactacgaggtgacagtgtctacactttttggacgtagcgtaggacccgctacaagcctgatggcacggaccgatgctagtgttgagcagactctccgacccgtaatactcggcccgacgagcatactcttgtcgtggaatctggtgcctgaagctcgcggatataggctggaatggcgcagggagactggccttgagccgccacagaaggttgtgctcccttctgacgtaactcggtatcagcttgacggcctgcaacccgggactgagtacaggctaactctttacactctattggagggccacgaggtggctacacctgccaccgtggtacccaccggtccagaactgccggtgagcccagtgaccgaccttcaggcgactgagctgcccgggcagcgggtgagagtgtcatggtcacctgtgcccggggccacccaatatcgcattatagtgagatcaactcagggagtggagaggaccctggtcctccccggctcccagacagccttcgatttagatgacgtgcaagccggcttatcatatacggtgagggtctccgcccgggttgggcccagggaaggatcagcttccgtactgactgtgaggcgtgagccagaaacacccttggcagtgccaggcctgcgggtcgtggtgtccgatgccacaagggttcgggtggcatggggcccagtacccggtgcaagcggctttaggatctcatggagcaccggatcagggccagagtccagccaaactttgccccccgactcgactgcgaccgatatcaccggcctgcaacccgggactacctaccaagtagccgtgtccgtgctgaggggtcgagaagagggaccagcagccgtgatcgtagctcgtaccgatccactgggcccggtgcggaccgtacacgtgacccaggcctcctctagctcagtgaccattacgtggacaagggttccaggcgcaacaggatatagagttagctggcatagtgcacatggaccggaaaagtcccagctggtatcaggcgaagctactgtagcggaactagatggactggaacctgacactgaatacacggttcatgttcgcgcccatgtcgcaggcgttgacgggcccccagctagtgtcgtcgtgcgcaccgccccagaacccgtcggacgcgtgtccagactgcagatcctgaacgcctcctccgatgttctgcgaatcacatgggttggagttacaggcgccacagcctaccgtctcgcctgggggcggtcagagggagggccaatgaggcaccaaattttgcccggcaacacagatagcgctgagatccggggcctcgaagggggagtgtcgtattctgttagggtgaccgcattggtcggtgatcgtgaaggaaccccagtttccattgtcgtcacaacacccccggaggcacctcccgctctcggtaccctacatgttgtccagaggggcgaacatagtctgcgccttcggtgggagcctgtgcctagagctcagggctttctgttgcattggcagcccgagggcggtcaggaacagtccagagtgttaggccccgagctgagctcctatcacctcgatggattggagcctgccacacagtaccgcgtaaggttgagcgttctcggccctgcaggcgagggccccagcgcagaggtgaccgctcggacagagtccccacgagtgccatcaatcgagcttcgagtggtggatacatctattgattcggtgaccctggcttggacaccagtgagcagggcctccagttacatcctatcatggaggccactgcgcggacctggccaggaagtgcctgggagcccacagaccctgcccggtatttccagctcccagagggtaaccgggctagagcctggcgtgtcttacatattcagcctcacacctgtgcttgacggggttagaggccccgaagcctccgtcacacagacccctgtgtgtccgcggggcctggctgatgttgtatttctacctcatgcgacccaggataacgcccatcgagcggaagccaccaggcgcgtgctggagcgacttgtgctagcactcgggcccttaggaccacaggccgtgcaggttggactcctgtcatattctcaccggccatctccactgtttcccctgaatggaagccatgaccttggtattatcttacagcgcatccgcgacatgccctacatggatcctagcgggaacaatttaggcaccgctgtggtcaccgcccaccggtacatgctggctcccgatgcccctggacgcaggcagcacgtgccgggcgtcatggtgctcctggtcgacgaaccacttaggggtgatattttctcccccattagggaagcccaggcgtctgggttaaacgttgtgatgttagggatggccggagcagaccctgagcagctacggcgcttagcacccgggatggactcggtgcagacattctttgccgtcgacgacggacccagcttggaccaggctgtgtccggtctggctaccgctctgtgtcaggcatcttttaccacccagcctcggccagaaccctgcccagtgtactgtcccaaggggcagaagggcgagccaggagaaatgggccttcgggggcaggtggggccccctggtgaccctggactccccgggaggaccggagcacccggacctcagggaccccctggatccgccactgctaagggcgaacgaggcttccctggcgccgacggacgcccggggagcccaggccgggctggcaaccccgggacccctggcgcgcccggactgaagggatctcccgggctgcctgggccaaggggggacccgggcgagcgggggcctagaggaccgaaaggagagcctggcgcccccgggcaagtgattggaggggagggccccgggttgccaggcagaaagggtgatcccggcccaagtgggccaccagggccgcggggccctctaggggatcctggacctcggggacctcccggccttccaggcacagccatgaagggcgataagggggatcgaggcgagcgggggcccccaggtcctggcgagggcggcattgcccctggagaacccggcctccctgggctgccaggctccccggggcctcaggggccagtaggaccccccggaaagaagggtgagaaaggagattctgaggacggagcccccggacttccagggcagcctgggtccccgggggagcagggacccagggggccccctggagcaataggccccaagggtgacaggggtttcccaggccccctgggagaggcaggtgagaagggtgagcgcggtcccccgggccctgcgggctctcgtggattgccgggcgttgccgggcgccctggcgctaagggccccgaagggcctcctgggccaacagggcgccaaggcgagaaaggcgaacctgggcgccccggagaccccgcggtggtaggcccagcagtggcagggcccaagggcgagaagggagatgttgggcccgcgggacctcgtggggctacaggcgtccagggcgagcgaggccccccaggactggttctgcccggagatcccggtccgaaaggagatcctggtgatagagggcctatcggattgaccggacgcgccgggccaccaggcgactcaggccctccgggcgagaaaggcgaccccggaaggcccggtccacctgggcctgtcggacccagaggcagggacggcgaagtcggagagaagggtgatgaaggtcctccaggcgatccgggcctgcccgggaaggctggcgagaggggcctgagaggggcgcccggagtgagaggccccgtaggagaaaaaggagatcagggcgatccgggcgaggatgggaggaacggaagcccaggcagtagtggccccaaaggcgacaggggcgagcccggacctccagggcctccagggcggctggtggacaccgggccgggtgctagagagaaaggagagccgggcgatagagggcaggaaggaccacgcggcccaaaaggcgacccagggctgcctggagctcctggagagaggggaatagaggggttccggggaccacccgggccacagggggatcccggcgtgcgggggcctgccggcgagaagggagatagaggtccgccagggctggacggcaggagcgggctggatggcaaacccggggctgcagggccaagcggccccaatggtgccgccggaaaggccggcgaccccggacgggatggtctgccgggtttaagaggggagcagggtctgccaggccccagtggccctcctgggctaccagggaagccgggtgaagacgggaaacctggtctcaatggtaagaatggcgagcccggcgatccgggtgaagatggcaggaaaggagagaagggagactccggagcatccggcagggagggaagggacggaccaaagggagaacggggagccccaggaatcctgggacctcagggaccaccaggtctgcctggcccagtgggaccccctggacagggctttcccggggtaccaggcggcaccggacccaaaggcgaccgtggcgaaaccggctccaaaggagaacagggccttccgggtgaaagaggactcaggggggaacccggctccgtccctaacgttgataggctgctggagactgcgggaatcaaggcctctgctcttagggagattgtggaaacatgggacgaatccagtggcagcttccttccagtcccagaaaggcggcgggggccgaaaggggatagtggagaacagggccctccgggcaaggagggtccgataggctttcccggtgaacggggtcttaagggggatcgcggggatcccggtccccagggcccacctggtctggccctgggtgagcgaggacccccgggaccctctgggttagctggcgagccgggtaagcccgggataccaggacttccgggccgtgctggcggcgtcggggaagccggtcgtccgggagagcgcggggagagaggggaaaaaggggaacgcggagagcaaggccgagacggcccccccggattaccgggtacaccaggaccccctggcccgcccggtcccaaggtcagcgtcgacgagcccgggccaggcttgtcaggcgagcagggcccgcccggtctgaaaggcgctaaaggcgagcctgggtctaacggagatcaggggccaaaaggcgacagaggggtgccaggcattaaaggcgatagaggggagcccggaccgagaggccaagacggaaaccctgggctcccaggcgagcggggcatggccggccctgagggcaagccaggactgcagggccctcgggggccaccaggcccggtcggcgggcacggggaccccggacctcccggagcccccgggctggccgggccagcgggcccccagggccccagcgggttgaagggcgagcctggggaaactggaccaccgggccggggattgacaggccctaccggggcagttggactgcccggcccacccggaccttccggactagttggcccccagggaagccctgggttgcctggtcaggtgggcgaaacagggaaacctggagcgcccggccgggatggagcgagcggaaaggacggtgaccgtgggagtccaggggtacctgggtccccaggattgcccggccctgtaggacccaagggagagcccgggcctaccggcgcacccggacaggcagtggtcggcttaccaggggctaaaggagagaagggcgccccaggtggactggcaggggaccttgtgggggagccaggcgcaaaaggcgatcgaggcttaccaggcccaaggggcgagaaaggcgaggcaggacgggcaggtgagcctggagaccccggtgaggacggccagaaaggagctccgggacccaaggggttcaagggagacccaggggtaggcgtacctggaagcccaggaccccctggacccccgggagtgaagggcgacttaggtcttcccgggctgcctggagccccgggggtggttgggttccctggacaaacgggccccagaggcgagatggggcagccaggtccttctggcgagaggggactggccggcccacctggtagagaagggatccctgggccgttaggccccccaggaccccccggaagcgtgggaccgcccggagcgtctgggctcaaaggcgacaagggtgatccgggtgtggggctccccggccccaggggcgaaagaggggagcctggaattcggggggaggacgggcgcccaggacaagagggccctagggggttaacgggacctcctggaagccgaggcgaacgaggagagaagggcgacgtgggctccgccggactgaaaggagacaagggtgatagcgcggtgattcttggcccaccgggtccccgcggtgcaaagggcgacatgggcgaacgaggcccgaggggcttggatggagataagggtcccaggggtgacaatggcgatcccggggacaaaggatctaagggagagccgggggataaaggaagtgcaggactgcccgggctccggggattgttgggcccccagggtcagccaggcgcagccggaatacccggagacccaggctctcctggcaaagatggtgttcccggcatcaggggagagaagggcgacgtgggatttatgggccctaggggcttaaaaggtgaacgcggggtaaagggggcctgtggcttggatggtgaaaaaggggataagggtgaggcaggaccccctggcagacccggccttgccggccacaaaggggaaatgggagagccaggggtccctgggcagtccggagcaccaggcaaagaaggattgatcggacccaagggggatcgcggctttgacggtcagcccggccccaagggcgatcaaggcgagaaaggggagcgtggaacaccggggatcggtgggttccctggaccgagtggcaatgatggatcggctggtccccctggcccccctggtagtgtaggcccgcgggggcctgagggtctccaggggcaaaagggcgaacggggacctcccggcgagcgtgttgtgggggcacccggagtacccggagcacctggagagcgtggggaacagggacgtcctgggcctgccggccctaggggggagaaaggagaggctgcgctgacagaggatgacatccgtggatttgtacgccaggaaatgtcacagcactgcgcttgtcagggccagtttatcgcttctggaagcagacctctgcccagctacgcagccgacaccgcaggatcgcagttacacgccgtcccagtgcttagagtgtcccatgctgaagaagaggaacgggttccacccgaggacgacgagtacagtgaatattctgagtattctgtggaggagtaccaggatcccgaggcaccttgggattctgatgacccttgtagtctaccactggacgagggatcctgcacagcctatacattacgctggtatcacagagctgtaactggaagtaccgaggcgtgtcacccattcgtctatggtggctgcggagggaacgcaaataggtttgggaccagagaggcgtgtgagaggaggtgccccccaagagtggtccagagtcagggtactggcacagcccaggac

SEQ ID NO: 1519 - DNA, 8832 bp, Artificial Sequence
  derived and/or modified sequence
atgaccctgcgactccttgtcgctgccctgtgcgctggaattctcgccgaagctccgcgggtgcgggcccagcatcgggagagggtcacttgcacccgtctgtacgcagccgacattgtctttctgctcgatgggtcgtcaagcatcggtaggtcaaatttccgcgaagtgcgctccttcctggaaggcctggtgctgccattttccggagctgcctccgcccaaggcgtccgcttcgcaaccgtccaatactcagacgacccgagaactgaattcggcctggatgccctcggctccggaggcgacgtgatccgggctatccgcgagctctcatacaagggcggaaacactagaaccggagcggcaatcctccacgtggccgaccacgtgttccttccacaactcgcgaggccgggggtgccaaaagtctgcattctgatcactgatggaaaatcacaggatctcgtcgacaccgctgcgcagaggctgaagggtcagggagtgaagctctttgctgtcggcatcaagaacgctgatcctgaggagctgaaacgagttgcttcacaaccgacgagcgactttttcttctttgtgaacgacttcagcatcctgcgcaccctcttgcccctggtgtcacgccgcgtgtgcacgaccgcaggaggagtgccggtcaccagaccgcctgacgactccacgtccgcgccgcgggatctggttctcagcgaaccctcttctcagtccctgcgcgtacagtggaccgccgcgtccggtcctgtcactggttacaaagttcagtacacccctctgacgggactgggacaacctttgccatccgaacgacaagaggtcaacgtgccagctggtgaaacttccgttcggctccgcggcctgaggccgcttaccgagtaccaggtgactgtgatcgccttgtacgccaactcaatcggcgaggctgtgagcggaaccgcgaggaccaccgcacttgagggcccggaactgactattcagaacaccaccgcacactcactcctggtagcgtggcgctccgtgccaggggccactggatacagggtcacgtggcgcgtgttgtccggaggaccgacccagcagcaggagcttggtccaggccaggggtcggtgctcttgagagacttggaaccgggcacggattacgaggtcaccgtgtcgactcttttcgggcgatccgttgggcctgcgacttccctcatggcgagaaccgatgcctctgtggagcagactctccgacccgtgattctgggtccgacctcgatcttgctgtcgtggaaccttgtgcctgaggcgcgcggctaccggctggagtggagacgggaaacggggttggagccgcctcagaaggtggtgttgccgtccgatgtgaccagatatcaattggatgggctccagccgggaacggaatacagactcaccctgtacaccctgctcgaaggacacgaagtggccaccccggccaccgtggtgcccaccggcccggagcttccggtgtcgcccgtcaccgacctgcaagccactgagttgcctggacaaagagtgagagtcagctggagcccagtgccaggagcaacccagtaccgcattatcgtccgctcaactcagggcgtcgagcgtaccctggtgctccctggcagtcaaactgccttcgatctcgacgacgtccaggcgggtctttcgtacactgtgcgggtcagcgctcgggtgggacctcgcgagggctcggcttccgtcctgaccgtgcggcgggaacccgagactccgctggcagtgcctggattgcgcgtggtggtgagcgacgcaacccgcgtgcgcgtcgcatggggccctgtgccaggagcgtccggcttccggatctcatggtccactggatcgggcccggagtcgtcgcaaacgttgcctccggattccactgccaccgacattacgggactccagccgggcactacttaccaggtggcggtgtccgtgctgcgcggacgcgaagaagggcccgcggccgtcatcgtggcccggactgatcctcttggcccggttcggactgtgcacgtcactcaagcctcatcatcgtccgtcactattacttggactcgcgtcccaggggccaccggataccgcgtgagctggcactccgcgcacggcccggagaagtcccagctcgtgtcaggtgaagccactgtggccgagctggacggcctggagcccgacactgagtacacggtgcacgtgagagcccatgtggcgggagtcgacggaccgccggcgtcggtggtggtgaggaccgccccggagccggttggacgtgtctctcgcctccagatcctgaatgcaagctcggacgtgctcagaatcacctgggtgggagtgactggagctactgcttaccggctcgcctggggccgctcggagggtgggcctatgcggcaccaaatcctgccgggcaatactgactctgctgaaatcaggggccttgaaggaggggtgtcctactcggtgagggtcactgcactggttggcgaccgagaaggtactcccgtctccatcgtggtgaccacgccgccggaggccccacctgccctgggtactctccacgtggtccagagaggtgaacactcgctgcgactcagatgggagccggtgccgagagctcagggattccttctccactggcagccagagggcggccaggagcagagcagagtcttggggccagaactctccagctaccacctcgatggattggagccggcaactcagtatagagtgagactgtcggtcttgggaccggcaggcgaggggccctcggccgaggtcaccgcacgcactgaaagcccgcgcgtgccttcaattgaactccgagtggtggatactagcatcgactcagtgacgctggcttggacccctgtttcacgcgcgtcatcgtacatcttgtcgtggcgccccctgagagggcccgggcaggaagtgccgggatcacctcagaccctgcctggaatcagctcctcacaacgggtgactggacttgagccgggagtgagctatatcttttcgctgacccctgtgcttgacggagtccggggccccgaggcatcagtgacccaaactccggtgtgccctcgggggctggcggacgtggtgttcctcccccacgctacccaagacaacgcgcacagagccgaggcgactcggcgggtcctggaaagactcgtcctggccctggggccgctcgggccgcaagcggtgcaggtgggattgctttcctactcacacaggccctccccactttttcccctgaatggtagccacgacctgggtatcatcctccagcggattagagacatgccgtacatggatccgtccggcaataatctgggcactgcggtggtgaccgctcaccgttacatgctggcgccggacgcaccgggcagacgccagcatgtgcctggggtgatggtgttgctcgttgacgagcccctgagaggcgatatcttctcgccgatccgcgaagcccaggcatcgggtttgaatgtcgtgatgctgggcatggcaggagccgacccggagcagctgcggcgcctcgcgccgggaatggattcggtgcaaaccttcttcgcagtcgatgacggcccgtctctcgaccaggccgtgagcggactggccaccgctttgtgccaggcctcgttcactacgcagccccgccctgagccgtgtcctgtgtactgcccgaaagggcagaaaggagaaccaggtgaaatgggtctgcggggtcaggtcggaccacctggggatccaggcctcccgggtcgaacgggagcacctggaccgcaaggacctcctggatcagcgactgcgaagggtgaacggggatttccgggcgcagacggccggccggggtcgccgggtcgggctgggaaccctggaactccaggcgcccctggactgaaaggcagccccggactcccggggcctcggggagatcctggagaacgcggcccgcgaggtcctaaaggagaacccggtgcgcccggacaggtcatcggcggagaaggtcccgggttgcctggacggaagggcgatccgggccccagcggacctccgggaccccggggaccactgggagatccaggcccgcggggaccacctggacttccggggaccgccatgaagggggacaagggagacaggggtgagcgcggcccccctggaccgggggagggcggaattgcgccaggagaaccagggctcccgggtctgccgggctcgccgggaccccaggggccagtgggaccgcctggaaagaagggcgagaagggggattccgaagatggggcgcccggactgccgggccagccgggatccccgggcgagcagggccctcgcggaccgccgggagctattggacctaagggtgatcggggtttccctggcccgctgggagaggcgggagaaaagggggagcgtggaccccccggacctgcgggcagcaggggcctcccaggagtggcaggccggcccggcgcgaaaggcccagagggaccaccgggaccaaccggacgccagggagaaaaaggagaaccaggtcgccctggcgacccagccgttgtgggccccgctgttgcaggacctaagggagaaaagggtgacgtgggcccggccggacctcggggtgcgaccggagtccaaggggaacgcggtcctccgggactggtcctcccaggagatcctgggccaaagggcgaccctggagataggggacctatcggactgacggggagggccggcccgccaggagattcaggacccccgggagagaagggagatccaggtagaccgggacctccaggcccagtgggcccgagaggacgggacggagaggttggcgagaagggagatgagggaccccctggggaccccggactgcctggtaaggccggtgagagaggtctgcggggcgcacccggagtcagaggcccggtcggcgagaagggggatcagggtgatccgggcgaggatggaagaaacggctcccccggatcgtcagggcctaaaggagatcggggagaaccgggccctcccgggccgcctggacggctggtggacaccggaccgggagcgcgggaaaagggtgaaccaggggacagaggacaagaagggccacgggggccaaagggagatcccgggcttccgggggccccgggggagagaggaattgagggatttcgcggacctcctggtccgcaaggagatccaggagtgcgggggccggcgggggaaaagggcgataggggaccgcctgggctggatggacggtcgggcctggacggaaaacccggagcagccggaccttcggggccaaacggcgcggccggaaaggccggggacccaggacgcgacggactgccgggcctccgcggcgaacagggattgcctggaccttcgggcccacccgggctgccaggcaagccgggagaggatggtaagccggggctcaatggcaaaaacggagagcccggcgatccgggcgaggatgggcggaagggagagaaaggagattccggagcttccgggcgcgagggacgggacggaccgaagggcgaaagaggcgctccgggaatcctgggaccgcaaggacctccaggcctgcctggccctgtgggtccgccgggtcaaggattcccgggagtgccgggcggaaccggaccaaaaggcgaccggggcgagacgggaagcaagggtgaacaaggactgccgggtgagaggggattgcgcggagaaccgggatccgtgccaaacgtggaccggttgctggaaaccgcaggaatcaaggcatcagcgctgcgcgagatcgtggaaacctgggacgaaagctccggctcattcctgccagtgccagaacgcagacgcggaccgaagggagactcgggtgaacaaggccctccaggcaaggagggcccgatcggcttcccgggagaacgcggactgaagggagataggggggatccgggcccgcaggggccacccgggcttgcgttgggagagcggggaccgccggggccttccggactggccggagaaccgggcaagccgggcattcctggtctgcccggtagggccggaggagtcggggaggccggtagacccggtgagcggggagaaagaggcgagaagggggaacgcggtgagcaaggtagagacggacccccaggcctgccgggaacccctggaccgccggggccgccgggaccaaaggtttcagtcgatgaaccgggaccaggactgagcggggaacagggacctccgggcttgaagggggcgaaaggagaacccggatcgaatggtgaccagggccccaaaggggaccggggagtccctggaatcaagggcgaccggggagagccaggacctagaggccaggacggcaacccagggcttccaggtgagcgcggaatggccggaccagaaggtaaaccgggactccaagggccgaggggtccgccaggccctgtgggagggcacggggacccgggtccgcctggagcaccgggcctggcaggacctgcaggtccgcagggaccctcggggttgaagggagaaccaggagaaaccggccccccgggaagaggactgaccggtcccactggagccgtaggactcccgggtccgccgggaccgtcgggactggtcggaccgcaaggatcgccggggctgccaggacaggtgggagagactggtaagccgggagccccaggtcgcgatggcgcctcaggaaaggatggagatcgaggatcgccaggcgttccaggaagcccggggctgccgggaccagtcggtccaaagggagagccggggccaactggagccccgggacaagctgtggtcggcctgcctggagctaagggggagaagggggcccccgggggactggccggagatctggtcggagaacctggagcaaaaggagacaggggcctgccgggtcctaggggagaaaagggggaggcgggtcgcgccggggaaccgggagatccgggggaggacggacagaagggggccccgggcccaaagggattcaagggtgatccgggggtgggcgtcccaggatcccccggaccacctgggccccccggtgtgaaaggtgacctgggcctgcccgggctcccgggagccccaggagtggtggggttcccgggacagacggggcccagaggagaaatgggccagcctggtccgtcaggcgagaggggtcttgccggaccgccaggtagagaggggatcccagggccgctgggaccacctggaccgcctggttcggtgggacctcccggagccagcgggctgaaaggagataaaggggacccgggggtgggacttccaggcccgcgcggagaacgtggagaaccgggcatccgcggagaggacggacgcccgggacaggaggggccacgcggactgaccggacccccgggctcgaggggagagcgcggggagaaaggagacgtgggctcagccggcctcaagggagacaagggcgacagcgctgtcatcctgggacctcctggaccgaggggagctaaaggcgatatgggagaacggggtccaagaggtctggatggagataagggccctcggggtgataacggtgacccgggcgacaagggctccaagggtgagcctggggacaagggcagcgcgggcctccccgggctgcggggacttctgggaccacagggacagccgggcgccgccggaatcccaggggatccaggatcgccagggaaggacggggtcccgggtatccggggagaaaaaggcgatgtcgggttcatgggacctcggggcctcaaaggagagcgcggggtcaaaggagcctgcggactcgacggagaaaaaggcgacaagggcgaggcaggaccaccaggtcgccccggacttgcgggacataagggcgaaatgggagagccaggggtgccagggcagtccggtgcccctgggaaggaaggtctgatcgggccgaagggcgatcggggctttgatgggcagccgggtcccaagggcgaccaaggtgaaaagggagaacggggaacgcctggaatcggcgggttcccggggccgagcggtaacgacggtagcgccgggccgccaggaccaccaggatccgtgggaccacggggaccggaaggactgcaagggcaaaagggcgaacggggacccccgggcgaaagagtggtgggagccccaggcgtgccaggagcccctggagagagaggggagcaaggacgacccggacctgcaggcccgcgcggagagaaaggtgaggccgcgctgactgaagatgacatccgcggattcgtgcgccaggagatgtcacagcactgcgcctgccagggtcagttcatcgcaagcgggtcgcggcctctgccttcttacgccgctgacactgccggcagccaactgcatgccgtgcctgtgctgcgcgtctcccacgccgaagaggaagaacgggtgccaccggaagatgacgaatactccgaatattcggagtactcagtggaggagtaccaagacccagaagcaccgtgggactcagacgacccttgctcactcccgctggacgagggttcatgcactgcctacaccctgagatggtaccaccgggcagtcaccggaagcaccgaggcctgccacccatttgtgtacggcggctgcggcggcaatgctaaccgcttcggtactcgcgaagcctgcgagcgccgctgccccccgcgcgtcgtccagtcccagggaactgggaccgcgcaggat

SEQ ID NO: 1520 - RNA, 9003 nt, Artificial Sequence
  derived and/or modified sequence
gggaaauaagagagaaaagaagaguaagaagaaauauaagagccaccaugacgcuucgguuguugguagcagcccucugcgcgggaauucucgcugaggcaccucgggugagagcgcagcauagagagcgaguaacauguacucgacuguacgcggcagauaucguguuuuuguuggacgguucguccucgauuggucggucgaacuuucgggaagugaggucguucuuggaaggacucguacuucccuuuuccggggcugccucggcgcagggggugcgcuuugcgaccguccaguauucagacgaucccagaaccgaguuuggucuggacgcgcugggaucagguggugacguaauccgagccauucgcgagcugucauacaaaggcggaaauacgagaaccggugcggcgauccuucacgucgcugaccacguauuccugccgcagcucgcaagacccggaguaccgaaaguguguauccugaucacggaugggaaaucccaggaccuuguggacacggcugcacagcgguugaaaggccagggugugaagcucuucgcggucgguaucaaaaacgcagacccagaagagcuuaagcggguggcaucccaaccgacaucggacuucuucuuuuucgucaacgacuucucgauucuucggacucugcucccgcuugugagccgaaggguauguacgacagccgguggugucccugugacacgaccgccugaugacagcacgagcgccccuagggaccuggugcuuucggaacccucaucacagucacugagaguccaauggacugcggcaucggguccgguaaccggguauaagguacaguacacuccguugaccggucuggggcagccccuuccgucggaacgccaagaagucaacgugccagcaggcgaaacuucagugaggcugcgagggcuccgaccucucacggaauaucaggugaccgugaucgcgcuguaugcaaacuccaucggagaggccguaucagggacagcucggacgaccgcucuugaaggacccgaacucacgauccagaauacaacagcgcacucacuucuuguggcauggcgcucgguccccggagccacaggguacagagugacauggagaguacugucgggagguccgacgcagcaacaggagcucgguccagggcagggaucaguauugcuucgcgauuuggagcccgguacggacuaugagguaacgguaucaacacuuuucggaagauccguaggacccgccacgucauugauggcgcgaacggacgccagcgucgagcagacuuugcgcccaguaaucuugggaccaaccucaauccugcucagcuggaaucuugugccggaagcucgaggguaucggcucgaauggcgaagagagacuggauuggaaccgccacaaaaggucguauugcccucggacgugacaagguaccaguuggauggacuucagccugggacugaguaccggcugacccucuacacacuguuggaagggcacgaaguagccacucccgcgacgguggugcccaccggaccggagcugccggugagcccagucacagaucuccaggcgacggaacucccuggucagagagugcgagucucauggucaccggugccgggagccacgcaguacagaaucauuguccgaucgacccaaggcgucgagcgaacccuugugcuucccggaucgcagacugccuucgaucuggacgacgugcaagcaggacugagcuauacggucagagugucagcgagagucggaccccgcgagggaucagcguccgugcugacugucagaagggagcccgaaacgccgcucgcggugccuggccuuagagucguagugucggaugcgacgagggugcgagucgcgugggguccagugccuggggcgucggguuuucggaucucguggucgacggggagcggucccgaauccucgcagacucucccacccgauagcacagcgacagauaucacagggcuccaacccggaacgacguaucaagucgcagucagcguguugagagguagagaggaaggcccugcagcggucaucguagcgcgcacggacccacuuggaccagucagaacaguacacguaacucaagcaucguccucguccguaacuaucacguggacaaggguaccaggugcgacaggauacagagugucguggcacucggcacacgguccagagaaaucgcagcucguguccggagaagcuacggucgcggaacuggacggccuugaacccgauaccgaguacacagugcaugucagagcucacguggccggagucgaugggccaccggcgucgguggucgugcgcacagcaccagagccggugggacgcgugucccggcugcagauucuuaaugccagcucggaugucuugcgcaucacaugggucggcguaacgggugcgacggcguaucgguuggcguggggaaggucagagggcggaccgaugcggcaccaaauucucccuggaaacacagauucggccgaaaucagaggacucgagggaggcguaagcuacuccguccgcguaacagcuuuggugggggauagagaagguacucccgugucaaucgucgugacuacacccccugaagcuccgccugcguugggaacuuugcaugucguacaacgcggggagcacagccuucggcugcgaugggagcccgugccaagagcccagggguuucucuugcauuggcagccggagggaggacaagaacagucaagaguccucggcccagagcucagcuccuaucauuuggacggacucgagccggcgacgcaauaccgcguaagguuguccgucuuggggccugccggggaaggaccguccgcggaggucacagccagaacggaaucgccgagaguacccucgauugagcugcgaguaguggacacguccauugauucggucacuuuggccuggacaccgguaucacgcgccucaagcuacauccugucauggcgaccgcuucgcggacccggacaggaagugccaggaucaccucagacgcuccccggaaucagcucgucgcagcgcgucacgggucuggagccuggagucucauacaucuuuagccucacacccguacuugauggcgucagaggacccgaggcaucggugacccagacaccagugugcccuagaggacuggcggacgugguguuucugccacacgcgacacaagacaaugcgcaccgggcugaagcuacgcgaagggugcucgaaagacuggugcuugcgcucggaccucuuggaccccaggcaguacaagugggguugcucucauacucccacagaccuucgccguuguucccgcuuaaugggucgcaugaucucggaaucaucuugcagagaauccgcgauaugcccuauauggauccaagcggaaacaaccucgggacagcgguagucacggcgcaccgguacauguuggcgccugaugcuccaggccgaaggcagcaugugccgggugucauggugcugcuggucgacgagccgcugaggggagacauuuucucacccauuagagaggcccaagccagcggguugaauguggucaugcucgguauggcuggagcagaucccgagcagcuccgacgacuggcacccggaauggauucggugcagacguuuuucgccgucgacgauggacccucauuggaccaggccgugagcggacucgcaacggcauugugucaggcgucguucacgacgcaaccuagaccggaaccguguccgguguauugucccaagggacagaagggggaaccuggcgagaugggucugagaggucagguggguccgccuggcgacccggguuugccuggccgcacgggagcgccugggccacaaggaccgccuggguccgcaacagccaaaggggaaagaggcuuucccggagcggauggacggccagggucgcccggaagggcggguaaccccgguacacccggugcacccgggcucaaaggcucgcccggacuuccuggucccagaggcgauccaggcgaacgcgguccgagaggaccgaagggugagccaggagcgccaggacaggucaucgggggugaagggccugggcugccaggacgcaagggcgacccggguccgucagguccgccugggcccagagggccucucggugaucccgguccucggggaccaccgggguugcccggaacggcgaugaaaggcgacaagggagauaggggcgaaagggggccgcccggaccaggagaggguggaaucgcgccaggggaacccggacugccgggacugccuggaucccccggaccgcagggaccagucggaccgccugggaagaaaggggagaaaggugauagcgaggacggugcuccugguuugcccggacagccggguucaccgggagaacagggucccagagguccaccgggagccauugggcccaagggggacagggguuuucccggacccuugggcgaggcaggggagaagggcgagcgaggaccacccggccccgccggaucccgaggucugccaggggucgcgggaaggccuggugcgaaggggccugaaggaccaccgggacccacgggaaggcagggcgagaagggcgaaccaggucgaccgggggacccagcugucguagggccugcgguagcgggaccaaaaggcgagaaaggggacguagguccagcaggaccacgaggcgcuacggggguacagggagagcgaggcccucccggucuggucuugccaggcgaccccggacccaagggagauccgggugacaggggaccaauuggacuuacggguagagcggguccacccggcgacucaggcccuccaggggaaaagggggaucccgggaggccuggucccccugggccgguaggaccccgagggagagauggagaggugggugagaagggagaugaagguccaccuggugauccggggcuccccgguaaagcuggggagagggggcugcgcggagcaccuggcguacgcggucccgugggggaaaagggggaucagggcgaccccggugaggacgggagaaacgggucacccgguucaucagggccgaagggcgacaggggugagccgggaccgccagguccaccggggagguugguagauacaggcccuggagcgagagagaaaggcgagccgggagaccgagggcaggaagguccgagagggccuaaaggggauccugggcuuccuggugccccuggagaaagagggauugaggguuuccgcggaccgccgggaccccagggugauccgggagugcggggaccggcuggagaaaaaggcgauagaggcccacccggucuugaugguaggucggguuuggaugggaagccgggagcggcaggaccgucgggaccgaacggugcggcugggaaggcgggagauccuggucgcgacggguugccugggcucagaggcgagcagggacucccgggaccauccggaccaccuggucugcccggaaaacccggagaagauggaaaaccgggacuuaauggaaagaauggugaaccaggggacccuggugaagacgguaggaaaggggagaaaggugacuccggugcaagcggacgagagggacgcgaugguccgaaaggggaacgcggagcccccgguauucuggguccucaaggucccccuggguugccggguccaguggguccaccugggcaggguuucccuggcgucccgggugggacagggcccaagggcgaccgcggugaaacuggaagcaagggagaacaagggcugccgggagagagaggacuucggggagagccgggaucgguacccaauguagaccggcugcuggaaacggcagggauuaaggcuagcgcccuuagagagaucguagaaacuugggacgagucaagcggaucguuuuugccaguacccgagcgcagacggggucccaagggugacucaggcgaacagggaccaccaggaaaagaagggcccauuggguuuccgggggagcgaggucugaagggcgaucgaggugaccccgguccucagggaccgccaggacuugcgcugggugagcgcggucccccuggaccgucagggcuggcaggugaaccaggaaagcccggaaucccuggccugcccggucgagcggguggugucggugaagcggggagaccuggugagcggggugagaggggcgaaaaaggagagcgcggugagcaaggacgggacggaccaccgggauugcccggcacgccagggccacccggaccuccgggaccuaagguguccguggaugagccuggaccgggacucucgggagagcagggcccaccuggcuugaagggggccaaaggugaaccgggaucgaacggagaccaaggucccaaaggcgaccggggugugcccggcauuaagggagauaggggcgaaccugggccucgaggucaggacgguaacccagggcugcccggagagagagggauggcagggccggaagggaagccuggcuugcaaggacccagggguccucccggaccggucggaggucauggagauccugguccuccgggugcgccaggcuuggcuggaccugccggaccccaagggcccucgggacugaaaggugagcccggagaaacaggcccacccggucggggauugacagguccgacuggcgcagucggacugccagggccaccagguccguccggacuggugggaccacaggggagcccaggacuuccuggccaggucggggaaacugguaagccuggggcuccaggacgcgacggcgcaucgggcaaagauggagaucgcggcucacccggugucccggguucaccaggacugcccggacccgugggaccgaagggugagccugggccuacgggggcgccgggacaggcuguggugggucuuccgggagcgaagggggagaagggggcacccggugggcucgcgggugaucuugugggugagcccggagcaaagggagacagaggauugccgggaccacggggugaaaagggagaagcaggucgcgcuggggagccuggugaccccggagaggacggacagaaaggggcaccugguccuaagggcuucaagggagacccgggagugggggucccuggaucacccggucccccuggaccaccaggggucaaaggagaucuuggacucccuggacucccuggagcaccgggaguaguaggauuccccggacagaccggaccacgcggagaaaugggacagccugguccgucgggggaaaggggcuuggccggaccgccaggcagagaaggcauccccgguccacugggacccccugguccgccaggaucggucggaccaccaggcgcuagcggccuuaagggugauaaaggagaccccgguguaggauugccaggcccuagaggcgaaagaggggagccgggaaucaggggcgaggaugggcgaccgggucaagaaggcccuagggggcugaccgguccgccugguucgaggggagaacgcggagagaagggugacguggggucggcaggacuuaagggggauaagggggacuccgcggugauucuggggccaccuggccccaggggagcaaaaggggauaugggcgagagagguccccgaggucuggauggagacaagggaccucgcggagauaacggagaucccggagauaaggggucgaaaggagaaccgggagauaaaggguccgcgggacugccuggacucagggggcuucucgggccucaggggcagccaggugcggcagguaucccaggggaccccggaagcccugguaaggaugggguacccgguauccgaggugaaaaaggggacgugggcuucaugggaccacgagggcugaagggugaaaggggugucaaaggggcgugcggauuggacggggaaaagggggacaagggggaagcggguccgccaggaaggccgggauuggcgggacacaagggugagaugggggagcccggagucccgggucagucaggagccccuggaaaggaaggauugauugguccaaagggagacaggggcuucgauggacaaccaggacccaaaggcgaccaaggagagaaaggagagaggggaacgccugguauuggaggauucccgggucccucgggaaacgauggaagcgcagggccacccggacccccugguagcguggggccucggggacccgaaggccuucaaggucaaaaaggugaaagaggacccccuggugagagaguggugggagcgccuggggugcccggagcucccggagaacggggagaacaaggacgcccuggcccagcggguccucgaggggaaaaaggugaagcggcacucacggaggaugacaucaggggguuugugaggcaggagaugucccaacacugcgcgugucaaggacaguucaucgcuagcgguuccaggccacuucccucguacgccgcagacacggcagggucacaacuccaugccgucccugucuugcgggucagccaugcugaagaagaagaaagaguaccacccgaagacgacgaguacagcgaguauuccgaguauucggucgaagaguaucaagaucccgaagcgccuugggacuccgacgaucccuguucgcuccccuuggacgaaggaucgugcacggcuuauacacuuaggugguaccacagagcggugaccggaucgacagaggcgugccaccccuucgucuacggugguugcggugguaacgcgaacagauuuggaacgcgcgaagcgugugagcgcagauguccgccucgaguggugcagucgcaggggacggguaccgcccaggauugauaagcugccuucugcggggcuugccuucuggccaugcccuucuucucucccuugcaccuguaccucuuggucuuugaauaaagccugaguaggaaggcggccgcucgagcaugcaucuaga

SEQ ID NO: 1521 - RNA, 8835 nt, Artificial Sequence
  derived and/or modified sequence
augacauugcgucuccugguugcugcucugugugccggaauccuggcagaagccccacgugugcgcgcccagcacagggaacggguuacuugcacccggcuauacgcagcagauauagucuucuugcuggacggcaguuccagcaucggccgcaguaauuuccgggaggucagaagcuuccuggaaggccucgugcucccguuuagcggggcggcuagcgcgcaaggcgugagauucgccacaguccaauauucagacgaccccaggacugaguucggccucgacgcccugggaucgggcggggacgugauuagagcaauacgagaacugucuuacaagggugggaauacacggaccggagcagcuauccuucaugucgccgaucauguuuuucucccccagcuugcccggcccgggguaccaaaaguuugcauacugaucacagacggaaaaagccaggaccucgucgauacagcugcgcagaggcugaagggccaaggagugaaacuguucgccguugguauuaaaaaugcagacccagaggagcugaagcggguggcaucucagcccacuucagacuucuucuuuuuugugaaugauuucucaaucuuaagaacuuuauugccccuggugagucggcgggucugcacaaccgcgggcggggugcccgugacuagaccgccugacgacucaacauccgcaccaagagauuuaguucuuagugagcccagcagucaaagucugcggguccaauggacggcagccuccggaccaguuacuggguauaaggugcaguauaccccccugacuggacucggucagccccucccuucugaacggcaagagguuaauguaccggccggcgagacaucaguucgccuuagaggacuucggccccucacagaguaccagguaacagugaucgcucuguacgcaaacagcaucggagaggccgugucugguacagcaagaacaacugcccucgagggcccagagcucacuauccagaauacuacggcacacagucugcucguagcguggcggagcgugccuggugcuacuggauaccgagugacguggagagugcuuagcgguggccccacccagcaacaagaacuuggaccuggucaggguagcguacuguuaagggaccuggaaccaggaaccgauuacgaggucaccgugucaacgcucuucggccggucugugggacccgcuacuucuuugauggcacgaacagaugcguccguggaacagacucugagaccuguuauucuagggccaacauccauucuccugucuuggaaucugguuccagaggcgagggguuaucguuuggaguggaggagggagaccggucuggagccaccacagaagguggucuuacccuccgacgugacgcgcuaucagcuggacggauuacagcccgguacugaauauagacugacucuauacacgcugcucgagggucacgaagucgccaccccagcuacaguaguuccgaccggacccgagcugcccgucuccccgguaaccgauuugcaggcaacugaacuucccggacaacgcgucagagugucauggucccccguaccaggagccacacaguacaggaucauagugaggucgacucaggggguggaacgcacccuggugcugccugggucucaaacagccuuugaccuggacgacguccaggcgggccugucuuauacugugagggugagugcuagaguuggaccgagggaagggagcgccuccgugcugacugucaggagggagccggagacaccacuugccgugccaggcuuaaggguugugguuagcgacgcaacacgggucagagucgcauggggacccgugccaggcgccaguggcuuucggaucaguugguccacgggcagcggcccugagagcucccagacuuuaccccccgacuccacagcuacagacaucacagggcuccagcccggaacaaccuaccaggucgcagugaguguacucagagggcgugaagagggacccgccgccgugauagucgcccguaccgauccacuggggccaguuaggacaguucaugugacgcaggcuucuaguucuucuguuacuaucaccuggacuagaguucccggggccacuggcuaucgcgugucuuggcacagcgcgcacggccccgaaaaaagccagcuggugaguggggaggcaacuguugcugaacucgacggacucgagccugauaccgaauacaccguacacgugcgagcacacguggcugggguggacggaccccccgccaguguggucgugagaacagcaccugagccaguuggacgagugucccgguuacagauacugaaugccagcuccgauguccugaggaucacuugggugggcguaaccggcgcuacugccuaccgacuggccuggggucgcucagaaggcgggccaaugaggcaccaaauucugccugggaauacugacagcgccgagaucagggggcucgaaggcggaguaucauacagcgugcgcgugaccgccuugguaggggaccgggaggguacuccggucucuaucguggucaccacucccccggaagcgcccccagcauuaggaacacugcacgugguccagaggggggagcacucucuccgauugcggugggagcccguucccagagcccagggauuccugcuccacuggcaaccugaaggcggccaggaacaaucccgcguguuagggccugaauuauccucuuaccaucucgacggcuuagaaccggccacgcaguaucgaguacggcuuaguguccugggucccgcuggagagggcccuuccgcugaaguuaccgcgcggacugagucuccccgcgugcccuccaucgaauugagggucguggacacgucuaucgauaguguuacguuagcauggacccccgugucuagagccucuuccuacauccugagcuggagaccauugcguggaccuggccaggaagugccgggaaguccacagacacuaccuggaauuucaagcucucaaagaguuacuggacuggagccuggcguuuccuacaucuuuucacugacacccgugcuagauggagugcgcggaccagaggccuccguuacccaaacuccaguguguccccggggccuggcggacguuguauuucucccacacgccacgcaggacaaugcucauagagcagaggcaacuaggcggguacuggagcgccuggugcucgcucuuggcccacugggaccccaggccguacaggugggacuccugagcuacucucaucggccuucaccccucuuuccacucaaugggucucaugaucuaggcauuauacugcagaggauccgggauaugcccuauauggacccuagcgggaauaaucuugggaccgcaguugugaccgcucaucgauacauguuggcgcccgaugcuccuggcagaaggcagcauguccccggugugaugguccuguuggucgaugagccauuaagaggggauauuuucuccccgauccgagaagcccaggcuucaggccugaacgucgucaugcuggggauggccggcgcggacccugaacagcuucgccgacuggcgcccggaauggauuccguucagaccuuuuucgcuguggacgauggucccucucuggaucaagcgguuaguggguuggcuaccgcacugugucaagcauccuucacuacacagccucgcccugagcccugccccguguacuguccaaagggucagaagggcgagccaggggagaugggauugagaggccagguagggccaccaggagacccagguuuacccgggaggacaggggcucccggcccccaagggccuccggggagcgcaaccgccaagggcgagagaggguuccccggcgccgacgguagacccggauccccagggagggcuggcaaucccggaacccccggugcuccuggucugaaaggcucaccaggccucccugggccucgaggugaucccggugagcgagguccucgcggcccaaagggagagccuggcgcucccgggcaggugaucggaggcgagggccccggccuccccgggcgcaaaggagacccgggaccuucuggcccuccugggccccggggaccuuuaggggauccagggccaaggggaccuccaggacuuccaggcacagcaaugaagggagauaagggcgauagaggagaaaggggcccccccgggccuggcgaggggggcauugccccuggggagccaggccugccgggcuuacccggaucaccggggccucaagguccaguaggucccccuggcaagaaaggagagaaaggugauuccgaagacggugcccccggauugccaggacagcccggaagccccggcgagcagggcccucggggcccucccggcgccauaggcccgaaaggcgauaggggguucccagguccacugggcgaggcuggcgaaaagggcgagcgcgguccaccuggcccagcuggaagccgaggcuugcccggaguugcugguagacccggagcuaaaggccccgaggggccccccggaccgacuggcaggcaaggggaaaaaggagagcccggaagaccgggggacccugcagugguagggccagcugucgccggaccuaaaggcgaaaagggagaugugggcccugcaggaccucgcggcgccacuggugugcagggagagagagguccaccuggccuagucuugccuggcgaccccgggccaaaaggugauccgggagacagggggcccaucggacucacaggccgcgccgggcccccuggagauagcggucccccaggggagaaaggcgacccggggcgaccugggccucccgggccugugggaccgaggggccgagauggcgaagucggagagaaaggugaugaaggccccccaggcgacccuggccugccuggcaaagccggugaaagaggccuuagaggagcucccgggguuagaggcccggugggggaaaagggagaccagggagauccaggcgaagaugguagaaaugguucuccagggaguagcggaccuaagggggauaggggcgagcccggccccccggggcccccuggccggcucguugacaccgguccuggcgccagggagaagggcgaaccaggugaccguggacaggagggacccagagggccaaaaggugaccccggucuuccaggcgcgccaggcgaacggggcauugagggcuuuagaggaccgccagguccccagggagacccuggaguccgcgggcccgcaggggagaaaggcgaccgagggcccccuggcuuagacggaaggagcggcuuagauggaaaaccuggagcggccgguccgucugggccuaacggagccgcagguaaagcuggggauccaggccgugauggccugccaggucucaggggggagcaagggcugccuggcccaucuggcccaccaggccuuccgggcaagccuggggaggacgguaaacccggguugaauggcaagaacggcgaaccaggagauccgggcgaggacggcagaaaaggggagaaaggagacaguggagcgagcgggcgggagggacgggacggccccaaaggagaacgaggcgcucccggaauuuuggggccucagggucccccgggguugccaggcccaguggguccuccuggccagggguuccccggcgugcccgguggaacgggaccgaagggcgacagaggagagaccggguccaagggugagcagggucuuccaggggaaagggggcugaggggggagccgggaucugugcccaacgucgacagauugcuggagaccgccgggauuaaagcgucggcucuaagggaaaucguggaaaccugggacgagucuuccggcagcuuccucccugugcccgaacgccgcaggggaccuaaaggcgauuccggugagcaggggcccccuggcaaagaaggcccaaucggauucccaggcgaaagaggacucaaaggggaccggggcgacccagggccgcagggaccacccggacuggcccuuggcgaacgcggucccccuggucccuccggccucgcaggggaaccuggcaaaccgggaauccccggacugccagguagagccggggggguuggagaggccggucgucccggagagagaggggagcgaggcgaaaagggcgagcggggggaacaagggcgcgaugguccuccugggcugccuggcacuccuggcccuccugguccacccgggccaaagguuucagucgaugagccaggaccaggacugagcggagaacaggggccaccuggguugaagggggcuaagggagagccuggaagcaacggggaccaaggcccaaagggagacaggggaguacccggaaucaagggcgaucguggggaaccuggaccucgcgggcaggaugggaauccaggguuacccggggagaggggaauggcugggccagaaggaaagccuggccuucagggcccucgggggccacccggcccaguggguggucacggugaucccggaccaccaggggcaccgggucucgcuggaccugcuggaccccaaggcccaucaggccuuaaaggagagcccggagagaccggucccccaggcagaggccuuaccgggccuacuggggccguuggacuuccugguccucccggacccagcggacuggucggcccacaggggaguccaggauugccaggccagguuggagagacaggcaagccaggagcaccugggagggacggggcuaguggaaaggacggagauaggggcucacccggcgugcccggcucucccggccugccaggaccuguggggccgaaaggagagccugggccgacuggcgcucccgggcaagcugucgugggguuaccaggugcaaagggcgaaaagggcgcaccugguggacuagccggugaccuggugggcgagccaggggccaagggcgauaggggcuugccugguccccguggggaaaagggggaggcgggaagagcuggcgagccuggggacccuggcgaggacgggcaaaaaggcgcuccaggccccaagggcuuuaaaggggaccccggggugggcgugccagggucaccaggcccccccggaccucccggaguuaagggcgaucucggauugccagguuuaccgggagcucccggaguugugggauuucccggacagacagguccuaggggcgagaugggacagccuggccccagcggugagagaggacuugcaggcccccccgggcgggaagguauaccuggcccacugggacccccuggucccccuggaagcguggguccaccuggagccucaggucuaaagggcgacaaaggcgacccuggaguugggcucccggggccuaggggugagcgaggugagccuggcauacggggugaagacgggcggccuggccaggagggcccuagaggacugacggggccgcccgguucccgcggagaacgcggggaaaagggagacguggguuccgccggccucaagggcgauaaaggagacagcgcugucauucugggaccuccuggcccuaggggugccaaaggugacaugggggagcgggguccacgcggccucgacggcgauaaagggccacgaggugacaacggcgacccuggggauaagggcuccaagggugagcccggggauaaaggcucggcuggguuacccggacuccgcggacugcugggaccccagggucagccuggagcugcuggcauccccggcgacccaggcuccccuggcaaagacggugugcccgggauucggggggaaaagggcgacgugggcuuuaugggaccaagagggcugaagggugagagaggagucaagggugccuguggcuuagacggggagaaaggagacaaaggugaggccgggccucccgggagacccggauuggccggacauaagggggagaugggagaaccaggaguucccggccaaagcggcgcuccaggcaaggaaggccugauugggccaaagggagaccgcggcuuugacggccagccugguccgaaaggagaccagggugagaaaggugaaagagguacacccggcauuggaggcuuuccaggaccaucagguaaugacggcuccgccggcccuccggggccccccggcuccgugggcccccgcgggccagaagggcuucagggccaaaagggggaacgaggcccaccuggugaaagaguagucggggccccggggguccccggcgcuccuggggagaggggcgagcaagggcgcccagggcccgcaggaccacggggcgagaagggggaagccgcucugacagaggacgauaucagaggguuuguacgacaggaaaugucucagcauugugcuugccagggucaguuuauugccucaggaucgcguccucucccauccuacgccgcugauacggcagggucacaacugcaugcggugccagucuuacgagucucccaugcugaggaagaggaaaggguuccucccgaggacgaugaauacagugaguauagcgaauacucuguggaggaauaccaggaccccgaggcgccaugggacucugacgacccaugcagccucccccuggacgaggggagcugcacagccuauacccuacggugguaucaccgagcaguaaccgggaguacugaggcgugucauccuuucguguacgggggaugcggaggcaaugccaacagauucgguaccagggaggccugugagcggaggugcccuccccgcguaguccaaucucagggcacugguacugcccaggacuag

SEQ ID NO: 1522 - RNA, 8739 nt, Artificial Sequence
  derived and/or modified sequence
augacacugcgccuacugguggcugcccugugugcugguauuuuagccgaggcuccuagggugagggcccagcaccgugaaagaguuacauguacccggcuguacgccgcagauaucguauuccucuuggacgguucuuccucuaucggcaggucaaauuuucgugagguuaggagcuuucucgagggucuugugcugccuuuuucuggggcugcguccgcccaggggguuagauucgcaaccgugcaauauuccgacgacccacggaccgaauuugggcuugacgcccucgggucaggcggcgacgugauccgcgccaucagagagcugucuuauaaaggcggcaauacacggacaggcgcggccaucuuacaugucgccgaccacgucuuucuuccccaacuggccagaccuggugucccuaagguaugcauucucauuacagauggaaaaucucaagaucuggucgauaccgccgcccagagacugaaggggcaaggcgugaaacuguuugcgguggguaucaaaaacgcugaucccgaagaacucaaacguguugccucccaaccuacgucggacuucuucuucuucgugaaugacuuuagcauccugagaacucugcucccucugguguccaggcguguuugcacuaccgcagguggcgugccagugacucgccccccugaugacuccacaucagccccucgugaccuuguucucagcgaacccucaucucaaucacuucgcguucaguggacagcagcaucugggccgguuacgggauacaagguccaguacacaccacugacaggccugggccagccccuuccuuccgaaagacaggagguuaacgugccugcuggugagacguccgugcguuuaagaggucuucggccgcugacugaauaucagguuacggugauugcucuguaugccaauagcaucggggaggcggugucuggcacugcucggaccaccgcauuggaaggccccgaacugacaauucaaaauacuaccgcccacucucuauuaguugccuggagaucggugccuggggccacugguuaccgcgugacguggcgcgugcuuucggguggcccuacgcagcaacaggaacucgggccugggcagggcagcguccugcugagagaccuggaacccgguaccgauuacgaagugacaguuucuacucucuuugggaggucagucggccccgcuacuagccuaauggcgcgaaccgaugcuagcguggaacagacucugcggccugucauucugggacccaccaguauccugcuaagcuggaaccuagucccugaagcacgcggcuauaggcucgaguggaggcgugaaacuggguuggagcccccacagaaaguggugcugccaucugauguuacccgcuaccagcuggacggacugcagccagggacugaauaccgauugacauuguacaccuugcucgagggucacgagguggcuacaccugcaacggugguuccuaccggccccgaacugccuguaucccccgugacugauuugcaagcgacggagcuuccuggacagcgcgucaggguaucauggucuccugucccuggggccacccaguacagaaucauagugagaucgacucaaggcgucgagagaacccuggugcuucccgggagccagaccgccuuugaccuggaugaugugcaggcaggcuugaguuauaccgucagggugagcgccagaguuggaccaagggagggcagcgcuuccguucucacugugcggagagagccagagacuccccuggcagucccuggucugcggguggugguguccgacgccacccgugugcgcguggcauggggcccagugccuggagcaagugguuuccgcaucucguggucuacaggauccggcccugaguccucacagacucuaccuccagauucaacggccaccgauaucacuggucuccaaccuggaaccacguaucaaguagcgguaucaguucugcguggaagggaggagggaccugcggccgugauaguagccagaaccgauccauuggggcccguaaggaccgugcacguaacucaggcauccuccagcucuguuacaauaacauggaccagagugcccggcgcaacuggguaccgcguguccuggcauucugcccacggcccagaaaagucgcagcucguuagcggggaggccaccgucgccgagcuugauggccuggagccagauacagaauauacagugcaugucagggcucacguugccggcguagaugggccccccgcaucuguuguggugcggaccgccccagagcccguuggccgggucagcaggcuacagauucugaacgcuucguccgacgugcugcgcaucacaugggugggagugacaggagcgacugcuuaucggcuggcauggggacgcagcgaaggcggccccaugaggcaucaaauucugcccgggaacacugacucagccgaaauccggggacuugaaggcggagucuccuauagcgugcgcguuaccgcucuggucggcgaucgggaggguacuccagugaguauugucgugaccacaccuccugaggcuccaccagcccugggaacauugcaugucguacaaagaggcgagcauucccugcgccuccgcugggaacccgugccccgagcucaggguuuccugcugcauuggcagccugagggcgggcaggagcagagccgagugcuggggcccgaacuuucuaguuaccaccucgacggguuagagccugcaacccaguauagggugcggcuaucaguccugggaccggcaggggaaggucccagcgcagaggucacagcacgcaccgagucuccacgcguaccaucuaucgagcugagggugguugacacaucuaucgauucaguuacucuggccuggacacccgugucacgagccuccagcuacauucugaguuggaggccauuacgcggaccagggcaggagguaccaggaucaccacaaacgcugcccgggaucaguuccucacagcgcgugaccggacuugaaccaggcgugucuuauauauuuucccugacaccggugcuggacggcguccgcggcccagaggcaagugugacccaaacucccgugugcccacgaggccuugccgauguaguguuccugccgcaugccacccaagauaaugcacaucgggccgaggcuacaagacggguccucgagagacucgugcuugcacuggguccgcuugggccucaggccgugcagguuggcuugcugagcuauagccaccggccuaguccucuguucccacucaacgggucacacgauuugggaaucaucuuacagaggauccgggauaugccauacauggacccaucugguaacaaucugggaacagcaguugucaccgcgcaccguuacaugcuggcccccgacgcacccggccggcggcaacaugugccuggagugaugguguuacucguagaugagccacuucggggcgacauuuuuucuccaauccgcgaagcucaagccucuggccuaaaugucgucaugcugggcauggccggugccgacccggagcaacuccguaggcuggcaccugggauggacagcgugcagacuuucuucgcaguugaugaugggccuucucucgaccaagcagugagcggccuggccaccgcacugugccaggccucauucacaacgcagccaagaccggagccuuguccaguguacugcccaaagggccagaagggugaacccggcgagaugggacugcgcggucaggugggaccuccaggggauccuggauugcccgggaggacuggggcaccagguccccaggggccaccuggaucugcaaccgccaagggcgaacguggguucccuggggcugauggcaggcccgguucuccuggaagagcggggaauccgggcacuccuggagccccaggacugaaggguagucccggucugccaggaccccgcggcgauccgggcgaacguggaccaagaggcccgaagggugagccaggcgcacccggacaggugauagguggagaaggucccggcuuaccugguaggaagggggauccuggaccuaguggcccuccugguccccgggggccuuugggcgacccgggacccagaggaccccccgggcugccuggcaccgccaugaagggugauaaaggagauagaggcgagaggggcccacccggccccggagaagguggaaucgcacccggcgagccaggucugcccggccuccccgguagcccagggccccagggacccguagggcccccaggcaaaaagggagaaaaaggcgacucugaggauggagccccuggauugccugggcagccugggagcccuggcgaacaggggccacguggaccgccgggggccaucggcccuaaaggcgaccgcgguuucccggggccccugggcgaagccggggaaaagggggagcggggcccgccuggcccugcgggaucucgcggccugcccgggguggccggacggcccggcgccaaggggccugaagguccuccuggcccaacaggcaggcagggugagaagggcgaaccgggaaggccaggugacccagcuguagucggcccugccguggccggccccaaaggcgaaaagggcgauguggguccagccggcccuagaggggcgacagggguucaaggcgagagggggcccccugggcucguacugcccggagauccugggccgaaaggagaucccggcgacaggggcccgauuggacugaccggcagagcgggcccccccggugacagcgggccacccggcgagaaaggggauccaggccgaccaggaccuccagguccuguggggccuaggggucgugauggagaggucggagaaaagggggacgaggggccaccuggggauccagggcuuccuggaaaggcaggugagcgcggucucaggggagcacccggaguccgcggcccuguaggggagaaaggugaccagggggauccaggugaggauggacgaaauggcaguccugggagcucuggacccaagggagaccgaggcgaaccagguccuccaggccccccuggccgccucguggauaccggccccggagcaagagaaaaaggcgagccaggagauagaggacaggagggcccucgcggcccaaagggggaucccggccuucccggagcccccggagaacgcggcaucgaaggauucaggggcccaccugguccgcaaggggacccaggggugcguggcccugcuggugaaaagggagaucgcggacccccugggcuggaugggcgcuccggccuggauggcaagccgggagccgccggaccauccggccccaacggggcugcugguaaagcaggggacccgggccgagacggacucccagggcugagaggcgagcaggguuugccagggcccuccggaccaccuggacuuccagggaaacccggggaggauggaaaaccgggccucaauggcaaaaacggcgaaccuggcgaccccggugaggauggaagaaagggcgagaaaggagacagcggcgcuucagggagagagggguucccaggagugccugggggcaccgggccuaagggugaucgcggggagacuggaucuaaaggcgagcaaggucuaccgggugaaagggggcugcgcggcgaaccuggaucugugcccaauguggaucgcuugcuggaaacugccggaauaaaagcuuccgcgcuucgggagauuguggaaacuugggaugaaucaagcggcucauuuuuacccgucccugaaaggagaagagguccaaagggugauaguggagaacagggcccuccaggcaaagaaggcccaaucggguucccaggagagcguggacuaaagggugauagaggagauccggguccucaggggccgccaggacuggcccuuggagagcgggggccucccggacccagugggcuggccggagagccgggcaagcccggcauuccgggccucccuggccgggcagguggcguuggugaggccggcagacccggggaaaggggugagcgcggggaaaagggggagcggggugaacaggguagggaugggcccccuggguuaccuggaacgccuggcccgccagguccuccugguccuaagguuucagucgacgaaccaggucccggacuguccggagagcagggccccccuggccugaaaggugcuaaaggggagcccgguagcaacggggaucagggaccuaaaggggacagaggggugccagguauaaaaggggauaggggggagccugggccacggggccaggacgguaaucccggucugccuggcgaaagaggcauggccggaccugaggggaaaccgggacugcaggguccucgcggaccaccagguccggugggggggcacggggauccuggcccgccuggcgcaccgggguuagcaggaccugcaggcccgcaagggccuagcggucucaaaggcgaaccuggagaaaccggcccgccaggccgcggccucacuggucccacuggugcggugggccugccugguccuccaggccccagcggguugguugggccucagggcagucccgguuuaccagggcaaguaggcgagacaggaaaacccggagccccugggagagauggugcuucuggcaaagauggcgaucgcggaaguccaggagugccuggaagcccugguuuacccggaccugugggcccuaaaggggaaccuggaccuaccggagcccccggccaagcaguagucggucuacccggagccaaaggcgaaaagggagcccccgguggucucgccggggaccuggugggagaaccaggagcuaagggugauaggggccuccccggaccacguggagagaagggagaggcuggcagagccggcgagcccggcgacccaggcgaagauggacaaaagggcgcacccggacccaaaggguuuaagggggauccaggagugggcgugccuggaucuccagggcccccagggcccccugggguuaaaggugaccuugggcugccagggcuuccuggggcucccgggguggugggcuucccuggccaaacuggcccaaggggggagauggggcaaccuggacccucaggagagcgcggccuggccggaccccccggucgugaggggaucccaggcccccugggccccccaggcccccccggcucaguuggcccacccggagcuucuggguugaaaggagacaagggcgaucccggugucggucuuccagguccgcggggagaaagaggugaacccggaauucgaggcgaggacggccgccccggccaagagggcccccggggucucacaggcccccccggguccagaggggaacggggcgagaagggggauguagguucagccgggcugaaaggggauaagggugacagugcagucauucugggcccaccaggaccgcgcggcgccaagggugauaugggugagcgagguccacgcggacuugacggugauaagggaccucguggcgacaauggcgaucccggcgacaagggcaguaaaggagagcccggagauaaaggcucagcaggauugccuggguugagaggauuacugggaccacagggacagccuggcgccgccgguauccccggugauccaggaaguccaggcaaagacggcgugccggggauccggggcgaaaaaggggacguuggguuuauggguccgcgcggauuaaagggggaaaggggcgugaaaggggccugcgggcuggacggagaaaaaggcgacaagggugaggcaggaccuccuggcaggcccggccucgcgggacauaagggggagaugggggagcccggcguccccggccagucuggcgcgccaggcaaagaaggacuuauugguccuaagggugaccggggauucgacggccaacccgguccuaaaggcgaucaaggagagaaaggcgagagggguaccccaggcauuggcggcuuuccagggcccucgggaaacgauggaucagccggacccccuggcccaccaggcagcguggguccaagaggacccgaggggcuucaaggccagaaaggagaaaggggaccaccuggugaaagagugguuggggcccccggcgugccuggagcucccggggaacggggagagcagggccgcccaggaccugccgggcccaggggugagaagggagaggcugcguugaccgaggaugacaucagaggcuucguccgccaagagaugucccagcacugcgccugccaggggcaguucaucgccucagguagucguccucugccgaguuaugcagcggacacugccgggucccaacugcacgcugugccugugcugagagucucccacgcagaggaggaagagcgggugcccccagaggacgaugaguacucugaauacagugaguauucuguggaagaauaucaggauccggaagccccaugggacagcgaugaucccugcucgcugccucucgaugagggcagcuguacugcuuauacucuccggugguaccaccgugccgugacuggcaguacugaagcuugucaucccuuuguuuacggcggauguggcgguaacgccaaucgcuucggcacacgcgaggcaugugaaagaagaugcccacccagaguuguccagucccaaggaaccggaaccgcccaagacuag

SEQ ID NO: 1523 - RNA, 8835 nt, Artificial Sequence
  derived and/or modified sequence
augacacuuaggcuccugguagcugcccuuugcgcaggcauucucgcagaagcuccucgggugcgagcccagcaccgcgaacgcgugacauguacccggcuauacgccgcggauauuguuuuuuugcucgauggaagcuccucaaucggaagauccaacuuucgagagguccgcucauucuuagaggguuugguccugcccuucucaggggccgccucggcccagggagugcgcuuugcuacuguacaauacuccgaugacccccguacugaauucggacuugacgcgcugggauccggcggcgauguaauuagagcuauacgagagcuguccuauaagggcggaaacacccgaacaggugcugccauccugcauguggcagaucaugucuuccugccccagcuugcccguccuggagugcccaaaguauguauccuaaucacagaugggaagucucaggaccuuguugauaccgcagcccaaagguuaaagggucagggcgugaaguuauucgcuguaggaauuaagaacgccgacccugaagagcugaagagagucgcuagucaaccuaccucagauuucuuuuucuucgugaaugauuuuucuauucugcggaccuugcugccacucgugucacgaagggucuguacaacagcugggggcgucccggugacccgaccuccugaugacucaaccucagccccucgagaccuuguucuguccgaaccgagcagccaaucacugcgagugcaguggacagccgccucaggucccguuacugguuacaagguccaauauaccccacugaccggacugggccagccauuaccuucagaacgccaggaagugaacgugcccgcuggcgaaaccucugugcgauuacguggacugaggcccuugacggaguaucaggugacaguuauugcgcuauacgccaacucaauuggggaggcaguauccggcaccgccagaacuaccgcccucgaaggucccgaguugaccauccaaaacacuaccgcccacucacuacuugucgccuggcgcucagucccuggagcaacaggguaucgggugacuuggcgcgugcucuccggcggcccaacacagcagcaagagcuuggaccggggcagggcucagugcuucugagagaccuggagccuggaacagauuacgagguaacaguguccacacucuucggucgcucugugggccccgcuacuagucuuauggcacgaaccgaugccagcguggaacagacgcucagacccgugauacugggaccaacaagcauucugcuaagcuggaaccucgugccugaagcccgaggcuaccgccuggaauggaggagagaaaccgggcuugaacccccucaaaaaguugugcugccuuccgacgugacuagguaucaacuggacgggcuucagccaggaacugaauacaggcucacacuauacacccuucuggaaggccaugaagucgcuacuccagccaccguggugcccacuggaccugagcugcccguuucacccgugaccgaucuccaggccacugaguuaccuggacaacgggugcgugugucuuggucccccguuccuggugcuacccaguaccgcauuaucguuagaucuacacagggcgucgaaaggacccucguuuugccgggcucucaaacugccuucgaccuggaugaugugcaggcaggacucuccuacaccgugagggugucggcacgagugggcccaagagaagggagcgcuaguguuuugacugugagacgcgagccugagaccccccucgccguuccagggcuccgggucguuguaucggaugccacccguguucgaguggcuuggggaccugugccaggcgcauccggcuuucgcaucagcuggaguacaggcaguggaccagaaaguagucagacuuuaccgccagauucaacggccaccgacaucacagggcuccagcccggcacaacuuaucaaguggcagugaguguguuaagaggaagagaagagggccccgcugcuguuauaguugcccguaccgacccucuaggcccggucagaacaguacauguaacucaggccucaucuuccucuguuacuauuacauggacccgagugccuggcgcuaccgguuaccgggugagcuggcauagugcccacggaccugagaagagccaguuagucucuggcgaagccacaguagcugagcuggacggucucgaacccgacacagaguacacaguccacgugagggcucacguugcuggcguagauggaccacccgcgaguguagucguucguacagcuccggagccugugggaagggugagcagauugcagauacuuaacgcuucaagcgaugucuuaagaaucacaugggugggcgucacuggugcuaccgcauauagauuggcuuggggcaggucugaggggggccccaugagacaccagauauugccaggaaauaccgacuccgccgaaauccguggacuggaaggaggggucagcuacucagucagggucaccgcacugguuggagauagagaggggacuccaguuuccauagucgucacgacgcccccugaggcgccgcccgcacugggaacacuucacguaguccagagaggagaacauagccugagguugcguugggaaccagugccgagggcacaggguuuuuuguugcacuggcaaccugaaggcggccaggaacaaucccgcguguuagggccugaauuauccucuuaccaucucgacggcuuagaaccggccacgcaguaucgaguacggcuuaguguccugggucccgcuggagagggcccuuccgcugaaguuaccgcgcggacugagucuccccgcgugcccuccaucgaauugagggucguggacacgucuaucgauaguguuacguuagcauggacccccgugucuagagccucuuccuacauccugagcuggagaccauugcguggaccuggccaggaagugccgggcucaccacaaacucugccgggcaucaguagcucacagagagugacgggacucgaaccggggguguccuauauuuucagucugacacccgugcuggauggugugcgcgguccagaagcguccgucacccaaaccccuguguguccccgaggccuagcugacgucgucuuucucccccacgcaacucaggacaaugcucaccgugccgaagccacacgcagaguguuagaaagguugguucuggcucucgguccccuggggccccaagccgugcaggugggacuucugucauacucucauaggccguccccccuguuuccucucaacgguagccacgauuuagguaucauauuacaaagaauucgagacaugccauauauggacccauccggcaauaaccugggcaccgcugucguuacugcacacagguauaugcuagcccccgaugcucccggccgcagacagcacguuccaggaguaaugguguuacugguggacgaaccccuucgaggcgauauauuuucaccaauuagagaagcccaagcauccggucucaacguagucaugcuaggcauggcaggcgccgaucccgagcaacuccggcguuuggcaccuggcauggauucuguucagacuuuuuuugcagucgacgauggaccaucucuggaucaggcagucagcggguuggccacugcccugugucaggcuagcuuuacuacucaaccacgacccgagccuuguccugucuacuguccaaaaggccaaaaaggugagccuggugagaugggauugaggggccagguaggcccccccggugaccccggucuuccuggccgcacaggagccccagggccacagggucccccgggaagugccaccgcuaaaggagaaagaggauuuccuggagcugacggccgcccugguuccccaggacgagcaggcaacccagguacccccggcgcaccagggcugaagggaagcccaggauugccgggcccaagaggagaucccggcgagcgcggcccaagaggccccaagggcgagccaggcgccccugggcaagucauuggcggggagggcccuggcuuaccagggaggaagggcgacccuggaccuucuggaccccccggccccagaggcccgcucggugacccugguccacgcggaccccccggauuaccaggaacagcuaugaagggggauaagggugacaggggugagcggggaccaccaggaccuggagaaggcggcauagcucccggagaaccaggucugccuggccugccgggguccccaggaccacagggccccguugguccuccugggaagaagggugaaaaaggugacuccgaggacggugccccagguuugccuggacagccaggaagccccggugagcaggguccuagaggucccccuggagcgauugggccuaagggugaccgaggguuucccggcccccugggugaagcuggagagaagggcgaaagagguccuccgggcccagcuggaagccgaggcuugcccggaguugcugguagacccggagcuaaaggccccgaggggccccccggaccgacuggcaggcaaggggaaaaaggagagcccggaagaccgggggacccugcagugguagggccagcugucgccggaccuaaaggcgaaaagggagaugugggcccugcaggaccucgcggcgccacuggugugcagggagagagagguccaccuggccuagucuugccuggcgaccccgggccaaaaggugauccgggagacagggggcccaucggacucacagguagagccggaccaccaggcgauagcggcccacccggggaaaaaggcgacccagggcgccccgggccuccagggcccguuggaccacgcgggagggacggcgaaguaggcgaaaaaggagaugagggacccccaggggauccaggccugccagggaaggcaggugagcgaggacuaagaggcgcgccaggagugagagggcccgucggcgagaagggagaucagggagauccuggcgaggacggcagaaacggcucgcccgggagcagcggaccuaagggagauaggggggagccuggcccaccaggccccccuggucguuugguggacacaggcccuggagcuagggagaagggcgaacccggggacagaggucaggagggcccacguggaccuaaaggagacccuggacuuccaggcgcccccggcgaacgcggcaucgaagguuuucgaggacccccaggaccgcagggagaccccgggguaagaggaccagccggcgagaaaggagaccgaggcccuccaggucuugacgguagaagcggcuuggacggcaaacccggcgcagcugguccaagcgggccaaauggcgcagccgguaaggcgggcgacccagggagagauggacugccaggccuccgcggugagcagggacugcccggaccaaguggaccuccagggcugccugguaaaccuggcgaagaugguaaacccggccugaacgggaaaaauggagaacccggcgauccuggcgaagauggaaggaagggggagaagggcgacaguggcgccucuggaagggaaggcagggauggccccaagggcgaacgcggugcaccugggauccuuggcccucaggggccucccggucucccuggccccgucggaccaccaggacaggguuucccuggcguccccggcgguacaggcccaaagggagauagaggagagacagguucuaaaggggaacaaggucugccaggcgagagaggucuaaggggggaacccggcagugucccuaacguggacagguuacuugaaacagcugggaucaaggcaucagcccugcgggaaauuguggagaccugggacgaaucauccggauccuuccuaccugucccugaacguaggcgcggacccaaaggugacagcggagaacagggcccacccggaaaggagggcccuauaggcuucccaggggaaagagggcugaaaggagaucgcggugauccgggaccucagggaccgcccggccuugcauugggcgagagaggaccaccagggccaucggggcuggcuggcgaaccagggaagccagggauacccggccugccagggagggcgggcggcguaggcgaagcagguagaccaggggagaggggcgagagaggcgagaagggagagagaggcgaacagggcagagacggucccccuggccucccaggaacccccggacccccgggcccccccgggcccaaggugucgguggaugaacccggccccggccugucgggcgaacagggacccccagguuuaaagggcgccaaaggugaaccgggaucaaacggcgaucaaggacccaagggcgaccgaggugugccaggaaucaaaggagacagaggugaaccggggccaagaggacaagauggaaacccuggccucccgggggaaagaggcauggccgguccugaaggcaaaccagggcugcaggggcccagaggcccaccuggaccgguuggaggucacggggacccaggcccccccggcgcucccggccuugccggaccugcuggcccucagggccccucuggacugaaaggggaacccggugagacugggccccccggaagaggauuaacaggcccuaccggagccgucggacugccagggccuccuggcccaagcggacucguugggccgcaggggucucccgggcugcccggacaaguaggagagacgggcaagccgggcgcaccagggagagauggggcaucagggaaagauggggaccggggaucuccaggcgugcccgggucgccaggcuuaccgggaccugugggcccaaaaggagagccaggaccuaccggagcaccgggacaagcagucgugggucuuccaggagcuaagggugagaagggcgcgccaggcgggcucgccggagacuuggugggggaaccuggggccaagggcgauagggggcuuccuggacccagaggcgaaaaaggugaagccggaagggcuggggaaccuggcgacccgggcgaagauggccagaaaggggcaccagguccuaaaggauucaaaggugaucccggcguaggcguucccgggucuccugggccccccggaccacccggugugaaaggagauuuggguuuaccaggacugccaggagcacccggcguagucggguuuccaggacaaacaggaccccgcggggagauggggcaaccaggaccuuccggggaacgaggccuagcuggucccccuggaagggaaggcauuccgggaccacugggaccucccggcccuccaggcucuguggggccaccgggugcgucaggccugaaaggugacaagggggauccagguguugggcugccuggaccacggggggaacgaggcgagccuggcauuagaggggaggauggaagaccaggucaggagggaccaaggggauuaacgggucccccgggaagucgaggagagcguggugagaaaggagauguggggagcgccgggcucaagggggacaaaggugauucugccgugauccucgguccuccaggaccuaggggcgcgaagggugauaugggcgaaagaggaccacggggauuggacggagauaaagggccucgaggcgauaauggcgauccaggcgauaagggcucaaaaggcgaaccuggcgacaaaggguccgcuggacucccuggacugagaggguuacugggaccacaaggccagccuggagcggcuggcauuccaggugauccagguagccccggaaaggauggagugccgggcauuaggggugaaaagggggaugugggcuuuauggggcccagaggguugaagggggaacgcggagugaaaggggccuguggacuagacggagagaagggggauaagggugaggcuggaccuccaggacggccgggcuuagcuggacauaagggggaaaugggagaaccaggagugccaggucagagcggggcuccagguaaagaaggccugauuggaccaaagggcgacagaggguuugauggccaaccuggaccaaaaggcgaccagggcgagaagggagagcgaggaacgccaggaauaggggguuucccagguccaagugggaacgacggaagcgcagggccaccaggcccacccggcuccgugggaccuaggggucccgaaggguuacagggccagaagggagaaaggggaccccccggagaaagagucgugggugcgcccggaguucccggcgcuccuggcgagaggggagaacagggccgacccggacccgccggaccccguggcgaaaaaggcgaagcugcgcugacagaggaugauauccggggcuucguaaggcaagagaugucucagcauugugcuugucagggucaguucauugcaucagguagucguccucuuccuagcuacgcagccgauaccgcuggaucucaacuucaugccgucccagugcugaggguuucacaugcugaggaagaagagcgugugccuccugaagaugaugaauauucagaauacagcgaguacaguguggaggaauaucaggaucccgaggcacccugggacuccgacgacccaugcagccucccccuugaugaagguucauguaccgcauauacacugaggugguaucauagggcugugacaggaaguaccgaggcaugccauccuuuuguguauggggggugcggagguaaugccaacagauuugggacacgggaagcaugugaacgaagguguccgccucgcgucguccagagccaaggcacaggaacugcacaggacuag

SEQ ID NO: 1524 - RNA, 8739 nt, Artificial Sequence
  derived and/or modified sequence
augacucugcgacuuuuggucgcugcccuuugugcuggcauauuagccgaggccccccgcguucgcgcacaacaucgcgaaagaguuaccugcacuaggcuuuacgccgccgacaucguguuucugcuggauggaagcagcaguaucggaaggucuaacuuccgugaagugagaagcuuucuugaaggucuggucuugcccuucuccggagcugcuagcgcucaaggcgucagauucgcuacugugcaguauagugacgauccucggacugaauuuggcuuggacgcacucggcucagggggagacguuauccgugcaauucgggaguugucauacaaagggggcaacacuagaaccggcgccgcgaucuugcauguugccgaucacgucuuccuaccacaguuagccagaccuggagugccaaaggucugcauccucauaaccgauggcaagagucaggaccucgucgauaccgccgcacagagacucaaaggccaaggagugaagcuuuucgccgugggcaucaaaaacgcugauccagaggaauugaaaagaguggcaucucagccgacuucugacuuuuuuuucuucguuaacgauuuuaguauucugcguacgcuuuuacccuuaguguccaggagagucuguacgaccgccggaggcguacccguuacccgcccgccagacgacucgacaucagccccacgcgaccuggucuugagcgaaccgagcucccaaucccugagggugcaauggaccgccgcaagcggcccagugacagguuacaaagugcaguauacaccucugacagggcucggucagccucuucccagcgaaagacaagaagugaacguucccgccggcgagaccucaguacgacuuagaggacugcgcccauuaaccgaauaccaggucaccgucauugcucuuuaugcuaauagcauuggagaggccgucuccggcaccgcgcggacgacagcucuggaaggaccugaacucacaauccagaacacgacagcucacucucucuuaguugccuggcggucaguuccaggcgccacaggcuaccgggugacauggcgaguacucagugggggcccuacucagcaacaagaauuaggcccuggccaggguagcguccugcuucgagaucuagaacccggcaccgauuaugagguuaccguuucaacucuuuucggacggagcguggguccagccacaucuuugauggcccgcacagaugccagcguagaacagacauuacgacccguaauucucgguccaaccagcauucuguugucauggaaucucgugcccgaagcccgcgguuaucgccucgaguggcggcgcgaaacuggacuggaaccuccccaaaagguuguguuaccgucggacgucacccgcuaccaauuggauggucugcagccaggaacagaauacagacugacccuguacacacuuuuggagggacacgaaguagccacuccugcgaccguggugcccacugggccugaacugccugucucuccugugaccgaccuccaagcuacugagcuaccaggccagagaguucgcguaucuuggagcccagucccgggcgcuacucaguaucguauaauagucagaucaacacagggaguggagcgcacgcuggugcucccugguucacaaacugcauucgaccuagaugacgugcaggccgguuugaguuacaccgugaggguuuccgcuagggucggcccucgagaagguuccgcuucuguucucacggucagacgugaaccugagacuccucucgcagugcccggacuucgcguuguggugagugaugcuacuagggugaggguggcaugggggcccguaccaggggcguccggcuuuagaauaagcuggaguacuggcuccggcccagaaagcucucagacacugccaccagacaguacugccacugauauaacaggguugcagcccggcacaacguaccaaguggcuguaucuguucuuagaggaagagaggaagguccugccgccgucaucguugcccggacagauccuuuaggacccgugcggacagugcauguaacucaggcuagcucuagcagcguuaccaucacuuggacgcgugucccaggagcuacugguuaccgcgugucauggcacucggcccacggcccugaaaaaucgcaacugguuuccggcgaggcaacaguggcggaacuugacggucucgaaccagauacagaauacaccgugcaugucagagcucauguggccggcgucgauggcccccccgcuuccgugguaguucggacagcuccagaaccugucggcagagucucccguuugcagauucugaaugcuuccagugaugucuuacgcauuacaugggucggagugaccggcgcuacugccuauagacuagccuggggcagaagcgaaggaggaccuaugaggcaccaaauacuacccggaaauacagauagcgccgaaauuagaggccuugaaggcggggucucuuacucgguccgagugacugcgcuugucggugaccgugaggggacccccgugaguauagucgugacuacacccccagaagcccccccugcccucggcacccugcacguugugcaaaggggcgaacauucucuaaggcuacggugggagccagugccacgggcucagggcuuuuuacugcauuggcagcccgaaggcggucaggaacaaagucgagugcugggcccugagcuuagcuccuaucacuuagaugggcuugaaccagcaacacaguacagagucagacuguccgucuugggaccugcgggggaaggacccucugcugagguuacggccagaacugagucuccccgaguaccuagcauugagcuccgcguaguugacacuagcaucgauagugugacccuggccuggacuccugugucuagagcaucuucuuauauucugaguuggaggccucucagaggaccgggccaagaagucccaggcaguccacagaccuugccugggauaucaaguucccagagggugacuggucuagagcccggcgugucauauaucuucucucuuaccccaguuuuagauggcgugcguggcccagaagcauccgugacacagaccccagucugcccuagaggccuugcugacgucguguuccugccccaugcaacucaagacaaugcccaccgugccgaggcuacaagacggguccuugaaagguuagugcucgcccuggguccgcugggaccacaagccgugcaggugggucuauuaagcuacagucacagaccgucgccguuauucccccucaauggaucacaugaccugggcauuauucuacaacguauucgcgacaugcccuacauggacccauccggcaauaaccuuggaaccgccguagugacagcacacagguacaugcuggcuccagaugccccugguaggcgucagcacgucccugggguuauggugcuguugguugaugaaccccucagaggagacaucuuuucgccgauucgugaagcacaggcauccgguuuaaaugucguuaugcucggcauggcaggagccgacccagaacagcuuaggagacuggccccaggcauggauucugugcaaaccuuuuuugccgucgacgacggaccuucacucgaucaggcagugucugggcuggcaaccgcuuugugccaagcaucuuucacaacacagccucggcccgaaccuugucccguuuacuguccaaaaggccagaaaggcgagccaggagaaaugggacugcgcggacaaguggggccaccgggagaucccgggcuuccuggacggacaggugcgccaggcccgcagggacccccaggaucggcaaccgccaagggggagcgcggguucccaggugcagaugguagaccagguucuccuggaagagccggaaaccccgguacuccuggugcacccggcuugaaggggaguccaggccucccaggaccaagaggggauccaggggagcgaggaccaagagguccuaaaggugaaccuggggcaccaggacaggugaucgguggugaaggaccuggguugcccggucgcaagggagauccuggaccuucuggaccacccggcccccguggcccuuuaggggaccccgggccucgagguccaccuggccucccaggaaccgccaugaagggggacaagggcgauaggggcgagcgcggcccucccgggcccggagaaggcgggauugcucccggcgagccaggacugcccggauuaccagggucaccugggccccagggccccgucggcccgccagggaaaaaaggcgaaaagggagauagugaggacggcgccccaggauugccugggcaacccggcucaccgggcgaacaagggcccagaggaccucccggagcaaucgggccaaaaggagauaggggguucccaggaccguugggagaggcuggagagaagggcgagagaggcccaccgggcccggcagguucccguggccucccggggguggcuggacggcccggcgccaaaggccccgaaggaccccccggcccuaccgggcgacaaggcgaaaagggagaaccuggacgcccuggagauccugcaguggucgggccagcaguggccggacccaaaggggagaaaggcgacgugggaccugcagguccuagaggagcuacaggggugcagggagaaagagguccaccaggccucguuuuaccaggagauccaggaccaaaaggggaucccggggauaggggaccaauuggacugacuggucgagcgggacccccaggcgauucagggccuccaggcgagaaaggcgauccaggcagaccugguccaccaggaccaguuggccccagggggcgggauggugaggucggugaaaaaggcgaugagggaccaccaggagauccaggcuugccugguaaggcuggcgagcgcggacugcguggcgcuccugggguucgaggucccgugggugagaagggggaucagggagaccccggagaagauggacggaacggcucuccaggaagcaguggaccuaagggcgauagaggcgaaccuggccccccgggcccaccuggacggcucguagacacugggccgggcgcaagagagaaaggggaaccuggagauagagggcaggagggcccccgaggcccaaaaggagauccuggccucccuggagcucccggagaacgagguaucgaaggguuuaggggcccacccggaccacaaggagacccgggcguacgcgggccagcuggagagaaaggagauagagggccaccagggcuagauggccgguccgggcuggacggcaaaccaggcgcagcaggucccucaggcccaaauggcgcugccggaaaagccggcgaccccgggcgugauggacugcccggccuaaggggagaacagggccuuccaggucccagcggucccccaggucugccaggaaagcccggcgaggauggcaaaccuggucugaauggcaagaacggcgaaccaggcgauccaggugaagacgggaggaaaggugagaaaggggauuccggugccucgggucgcgaaggauuccccgguguacccggugggacuggccccaaaggagacagaggcgagaccggaucaaagggcgagcagggacucccaggagagagaggccuccgcggcgaaccuggaucugugcccaauguggaucgcuugcuggaaacugccggaauaaaagcuuccgcgcuucgggagauuguggaaacuugggaugaaucaagcggcucauuuuuacccgucccugaaaggagaagagguccaaagggugauaguggagaacagggcccuccaggcaaagaaggcccaaucggguucccaggagagcguggacuaaagggugauagaggagauccggguccucaggggccgccaggacuggcccuuggagagcgggggccucccggacccagugggcuggcgggugaacccgggaagccggggauuccagggcugccggggagggcgggcgggguuggggaggcaggcagacccggcgaacgcggggagagaggagaaaaaggggaaagaggcgaacaggggagagauggacccccaggacuuccugggacacccggcccacccggacccccaggucccaaaguuucgguggacgagccggggcccgggcugagcggcgaacaggggcccccagguuugaagggggccaaaggagaaccaggaagcaacggcgaccagggacccaaaggugauagggguguuccaggaauuaagggagaucguggagagcccggaccucggggacaggauggaaacccgggucugccuggugagagggguauggccggaccagaggguaagcccggacugcaagggccccgcggcccacccggcccagucggcggacacggcgacccuggccccccgggcgccccuggcuuagccggucccgccggaccucaaggcccuaguggauuaaaaggcgaaccaggagaaaccgggccccccggaagagggcugacagggccuacaggcgcuguagggcuucccggaccaccgggccccagcggguugguugggccucagggcagucccgguuuaccagggcaaguaggcgagacaggaaaacccggagccccugggagagauggugcuucuggcaaagauggcgaucgcggaaguccaggagugccuggaagcccugguuuacccggaccugugggcccuaaaggggaaccuggaccuaccggagcccccggccaagcaguagucggucuacccggagccaaaggcgaaaagggagcccccgguggucucgccggggaccuggugggagaaccaggagcuaagggugauaggggacucccgggcccacgcggagagaaaggagaagcaggccgagccggcgaaccgggcgauccaggggaagauggccaaaagggcgcacccgggcccaaaggcuucaaaggugaucccgguguuggcgugcccggaaguccuggcccuccaggcccaccuggugugaagggggaucuggguuuaccuggccugcccggagcuccaggcgucgucggauuuccgggccagacuggaccucgcggcgagaugggacaaccgggacccaguggggaaagagggcuggccggcccuccugggcgugagggaaucccgggcccucugggaccuccaggaccgcccggaucuguaggccccccuggcgcuucggggcuuaagggcgacaagggcgauccagguguaggacugccugguccgcgcggcgaacggggcgagcccgggauucggggggaagacgggcgaccaggacaggaagggccacguggacugacagggccgcccgggaguagaggagagcgaggagagaaaggugacgucggcagcgcuggcuugaaaggagacaaaggcgauagugccguuauucuuggacccccuggaccaaggggugccaaaggagacaugggcgagcguggaccaagaggauuagauggcgauaaagggcccagaggugacaauggcgacccuggcgauaaagggaguaagggggagccuggagauaaaggaagugcaggucugccuggcuugcgcgguuugcucggcccccagggacagccuggcgcagccggaaucccgggcgauccuggaagccccggcaaagauggagugccagguauuagaggcgagaaaggcgauguuggauucaugggaccaagaggccugaagggcgagcgcgggguuaaaggcgccugcggcuuggauggagagaagggcgauaagggcgaagcuggaccaccuggcagaccuggccuggccgggcacaaaggcgagaugggcgaaccuggcguaccuggacagucuggggccccgggaaaggaaggucucaucggccccaagggugacagagguuuugacggacagccuggccccaagggagaucaaggagagaaaggggaaaggggcacaccugguaucggcggauuccccggcccgucaggcaaugacggaagugcugguccacccggccccccuggcagugucggacccagaggcccagagggacugcagggacagaaaggagaacguggacccccuggcgaaaggguuguuggggcucccggagucccuggggcuccuggggagcgaggcgaacagggcagaccagggccugcuggaccacgcggagagaaaggggaggcugcccugacugaagacgauaucaggggguuugugagacaagaaaugagucagcacugugcuugucagggucaauuuaucgcauccggaagccgcccccugccaagcuacgcagcagauaccgccgggucacaacuccacgccguaccagugcugcgagugucucaugccgaagaggaagaacgaguuccccccgaagaugacgaauauuccgaauacucugaguauagcguggaagaguaccaggaccccgaagcaccuugggauagugacgauccguguagccucccgcuagacgagggcucuugcacugcuuacacacugcgcugguaccaucgggccgugacgggguccacagaagccugccauccguucguguacggcgguugugguggcaacgcuaacagauucggaacaagagaagcaugcgaacggaggugccccccaagggucguucaaucucagggcacagguacagcucaagacuag

SEQ ID NO: 1525 - protein, 757 aa, Artificial Sequence
  derived and/or modified sequence
MVPDTACVLLLTLAALGASGQGQSPLGSDLGPQMLRELQETNAALQDVRELLRQQVREITFLKNTVMECDACGMQQSVRTGLPSVRPLLHCAPGFCFPGVACIQTESGARCGPCPAGFTGNGSHCTDVNECNAHPCFPRVRCINTSPGFRCEACPPGYSGPTHQGVGLAFAKANKQVCTDINECETGQHNCVPNSVCINTRGSFQCGPCQPGFVGDQASGCQRRAQRFCPDGSPSECHEHADCVLERDGSRSCVCAVGWAGNGILCGRDTDLDGFPDEKLRCPERQCRKDNCVTVPNSGQEDVDRDGIGDACDPDADGDGVPNEKDNCPLVRNPDQRNTDEDKWGDACDNCRSQKNDDQKDTDQDGRGDACDDDIDGDRIRNQADNCPRVPNSDQKDSDGDGIGDACDNCPQKSNPDQADVDHDFVGDACDSDQDQDGDGHQDSRDNCPTVPNSAQEDSDHDGQGDACDDDDDNDGVPDSRDNCRLVPNPGQEDADRDGVGDVCQDDFDADKVVDKIDVCPENAEVTLTDFRAFQTVVLDPEGDAQIDPNWVVLNQGREIVQTMNSDPGLAVGYTAFNGVDFEGTFHVNTVTDDDYAGFIFGYQDSSSFYVVMWKQMEQTYWQANPFRAVAEPGIQLKAVKSSTGPGEQLRNALWHTGDTESQVRLLWKDPRNVGWKDKKSYRWFLQHRPQVGYIRVRFYEGPELVADSNVVLDTTMRGGRLGVFCFSQENIIWANLRYRCNDTIPEDYETHQLRQA

SEQ ID NO: 1526 - protein, 704 aa, Artificial Sequence
  derived and/or modified sequence
MVPDTACVLLLTLAALGASGQGQSPLGSDLGPQMLRELQETNAALQDVRELLRQQVREITFLKNTVMECDACGMQQSVRTGLPSVRPLLHCAPGFCFPGVACIQTESGARCGPCPAGFTGNGSHCTDVNECETGQHNCVPNSVCINTRGSFQCGPCQPGFVGDQASGCQRRAQRFCPDGSPSECHEHADCVLERDGSRSCVCAVGWAGNGILCGRDTDLDGFPDEKLRCPERQCRKDNCVTVPNSGQEDVDRDGIGDACDPDADGDGVPNEKDNCPLVRNPDQRNTDEDKWGDACDNCRSQKNDDQKDTDQDGRGDACDDDIDGDRIRNQADNCPRVPNSDQKDSDGDGIGDACDNCPQKSNPDQADVDHDFVGDACDSDQDQDGDGHQDSRDNCPTVPNSAQEDSDHDGQGDACDDDDDNDGVPDSRDNCRLVPNPGQEDADRDGVGDVCQDDFDADKVVDKIDVCPENAEVTLTDFRAFQTVVLDPEGDAQIDPNWVVLNQGREIVQTMNSDPGLAVGYTAFNGVDFEGTFHVNTVTDDDYAGFIFGYQDSSSFYVVMWKQMEQTYWQANPFRAVAEPGIQLKAVKSSTGPGEQLRNALWHTGDTESQVRLLWKDPRNVGWKDKKSYRWFLQHRPQVGYIRVRFYEGPELVADSNVVLDTTMRGGRLGVFCFSQENIIWANLRYRCNDTIPEDYETHQLRQA

SEQ ID NO: 1527 - protein, 744 aa, Artificial Sequence
  derived and/or modified sequence
MVPDTACVLLLTLAALGASGQGQSPLGSDLGPQMLRELQETNAALQDVRELLRQQVREITFLKNTVMECDACGMQQSVRTGLPSVRPLLHCAPGFCFPGPCPAGFTGNGSHCTDVNECNAHPCFPRVRCINTSPGFRCEACPPGYSGPTHQGVGLAFAKANKQVCTDINECETGQHNCVPNSVCINTRGSFQCGPCQPGFVGDQASGCQRRAQRFCPDGSPSECHEHADCVLERDGSRSCVCAVGWAGNGILCGRDTDLDGFPDEKLRCPERQCRKDNCVTVPNSGQEDVDRDGIGDACDPDADGDGVPNEKDNCPLVRNPDQRNTDEDKWGDACDNCRSQKNDDQKDTDQDGRGDACDDDIDGDRIRNQADNCPRVPNSDQKDSDGDGIGDACDNCPQKSNPDQADVDHDFVGDACDSDQDQDGDGHQDSRDNCPTVPNSAQEDSDHDGQGDACDDDDDNDGVPDSRDNCRLVPNPGQEDADRDGVGDVCQDDFDADKVVDKIDVCPENAEVTLTDFRAFQTVVLDPEGDAQIDPNWVVLNQGREIVQTMNSDPGLAVGYTAFNGVDFEGTFHVNTVTDDDYAGFIFGYQDSSSFYVVMWKQMEQTYWQANPFRAVAEPGIQLKAVKSSTGPGEQLRNALWHTGDTESQVRLLWKDPRNVGWKDKKSYRWFLQHRPQVGYIRVRFYEGPELVADSNVVLDTTMRGGRLGVFCFSQENIIWANLRYRCNDTIPEDYETHQLRQA

SEQ ID NO: 1528 - DNA, 2274 bp, Artificial Sequence
  derived and/or modified sequence
atggtgcccgacaccgcctgcgtgctgctgctgaccctggccgccctgggcgccagcggccagggccagagccccctgggcagcgacctgggcccccagatgctgagagagctgcaggagaccaacgccgccctgcaggacgtgagagagctgctgagacagcaggtgagagagatcaccttcctgaagaacaccgtgatggagtgcgacgcctgcggcatgcagcagagcgtgagaaccggcctgcccagcgtgagacccctgctgcactgcgcccccggcttctgcttccccggcgtggcctgcatccagaccgagagcggcgccagatgcggcccctgccccgccggcttcaccggcaacggcagccactgcaccgacgtgaacgagtgcaacgcccacccctgcttccccagagtgagatgcatcaacaccagccccggcttcagatgcgaggcctgcccccccggctacagcggccccacccaccagggcgtgggcctggccttcgccaaggccaacaagcaggtgtgcaccgacatcaacgagtgcgagaccggccagcacaactgcgtgcccaacagcgtgtgcatcaacaccagaggcagcttccagtgcggcccctgccagcccggcttcgtgggcgaccaggccagcggctgccagagaagagcccagagattctgccccgacggcagccccagcgagtgccacgagcacgccgactgcgtgctggagagagacggcagcagaagctgcgtgtgcgccgtgggctgggccggcaacggcatcctgtgcggcagagacaccgacctggacggcttccccgacgagaagctgagatgccccgagagacagtgcagaaaggacaactgcgtgaccgtgcccaacagcggccaggaggacgtggacagagacggcatcggcgacgcctgcgaccccgacgccgacggcgacggcgtgcccaacgagaaggacaactgccccctggtgagaaaccccgaccagagaaacaccgacgaggacaagtggggcgacgcctgcgacaactgcagaagccagaagaacgacgaccagaaggacaccgaccaggacggcagaggcgacgcctgcgacgacgacatcgacggcgacagaatcagaaaccaggccgacaactgccccagagtgcccaacagcgaccagaaggacagcgacggcgacggcatcggcgacgcctgcgacaactgcccccagaagagcaaccccgaccaggccgacgtggaccacgacttcgtgggcgacgcctgcgacagcgaccaggaccaggacggcgacggccaccaggacagcagagacaactgccccaccgtgcccaacagcgcccaggaggacagcgaccacgacggccagggcgacgcctgcgacgacgacgacgacaacgacggcgtgcccgacagcagagacaactgcagactggtgcccaaccccggccaggaggacgccgacagagacggcgtgggcgacgtgtgccaggacgacttcgacgccgacaaggtggtggacaagatcgacgtgtgccccgagaacgccgaggtgaccctgaccgacttcagagccttccagaccgtggtgctggaccccgagggcgacgcccagatcgaccccaactgggtggtgctgaaccagggcagagagatcgtgcagaccatgaacagcgaccccggcctggccgtgggctacaccgccttcaacggcgtggacttcgagggcaccttccacgtgaacaccgtgaccgacgacgactacgccggcttcatcttcggctaccaggacagcagcagcttctacgtggtgatgtggaagcagatggagcagacctactggcaggccaaccccttcagagccgtggccgagcccggcatccagctgaaggccgtgaagagcagcaccggccccggcgagcagctgagaaacgccctgtggcacaccggcgacaccgagagccaggtgagactgctgtggaaggaccccagaaacgtgggctggaaggacaagaagagctacagatggttcctgcagcacagaccccaggtgggctacatcagagtgagattctacgagggccccgagctggtggccgacagcaacgtggtgctggacaccaccatgagaggcggcagactgggcgtgttctgcttcagccaggagaacatcatctgggccaacctgagatacagatgcaacgacaccatccccgaggactacgagacccaccagctgagacaggcctag

SEQ ID NO: 1529 - DNA, 2115 bp, Artificial Sequence
  derived and/or modified sequence
atggtgcccgatacagcttgcgttctgctgttgactctggccgcgctcggagcgtctggccagggccagagccctctgggatctgaccttggacctcaaatgttgcgagagctgcaggaaactaatgcagctctgcaggacgtgcgcgaactcttgaggcagcaggttagagaaattactttcctgaagaacaccgttatggaatgcgatgcttgtggtatgcagcagtcagtccgaaccggtctgccgagtgtccgcccgctcttgcactgtgcccccggcttttgctttccaggggtggcatgtattcagaccgagagcggcgccaggtgtggaccctgtccggcaggattcactggcaacggatctcactgcactgatgtaaacgagtgcgaaacagggcagcataactgcgtgcccaattcagtgtgtatcaacacgcggggatccttccagtgcgggccctgccagccaggctttgtcggggaccaggcctcgggttgccagcgacgcgcacaacgattctgcccagacggtagcccatctgaatgtcatgagcacgccgattgtgtgctggagagggatgggagtaggagctgtgtctgcgccgttggctgggctggcaatggcatcctttgtggtagggacacggatctcgatggtttccctgacgaaaaacttaggtgcccagagcgccagtgtcggaaagataattgcgtgacagttccgaactccggacaggaggatgtagatcgggatggtattggcgatgcttgcgaccccgatgcggacggtgacggggtgccaaatgaaaaagataattgcccgcttgtcagaaacccggaccaaagaaatactgatgaggataaatggggtgatgcttgcgataattgcaggtcgcagaagaatgacgaccaaaaagatacagatcaagacgggcggggcgacgcttgcgacgacgatatagatggtgatcgtatccgcaaccaggcagataattgcccaagggtgccaaactctgatcagaaagactccgacggggatgggatcggggatgcctgcgataactgtcctcagaagtctaaccctgaccaggctgacgtggaccacgatttcgtcggtgatgcctgcgacagcgatcaggatcaggatggtgacggacaccaagattcacgggataattgccctacggtacccaattcggctcaagaggattccgaccacgacggtcagggtgacgcatgtgacgacgacgacgataacgatggcgtgcctgacagcagggataattgccggttggtgcccaacccgggtcaggaggacgcggaccgcgacggagtcggggatgtttgccaggacgactttgacgctgacaaggtcgtggacaagatcgacgtttgtccggaaaacgcagaggtgacactcaccgattttagagcatttcaaacagtggttctcgaccctgaaggtgatgctcagatcgatcctaattgggttgttttaaaccagggccgggaaatagtgcagactatgaatagtgatcctggcctggccgtaggctatactgcattcaacggcgttgattttgaagggacgtttcacgtgaacaccgtgaccgacgacgactatgctggtttcatttttggctatcaggatagctcgagtttctatgtagttatgtggaagcagatggagcagacgtactggcaggccaacccatttagagccgtcgccgaacctggtatacaactgaaagctgtaaagtcgtcaaccggccctggagaacagttgagaaatgctctgtggcatacaggagacacagaatcacaggtccggctgctctggaaggatccacggaacgtcggctggaaggacaagaagtcctacagatggttcttgcagcatcgcccccaagtcggctatatacgtgtgagattctacgaggggcctgaattagtcgccgatagtaacgtcgtcctcgacaccactatgcgtgggggccggctcggtgtgttttgtttctcacaggagaacatcatttgggccaatctgaggtaccgctgcaacgacactatcccagaggactacgaaacccatcagttacgtcaggcatag

SEQ ID NO: 1530 - DNA, 2235 bp, Artificial Sequence
  derived and/or modified sequence
atggtcccagatacggcatgcgtcctgctccttaccttagccgcactgggagcttcgggccaagggcagtctcctctcggatccgacctggggcctcagatgcttagagagctccaggagacgaacgcagcgctgcaagatgtcagggagctgctgaggcagcaagttcgcgagataaccttcttaaaaaacacggtgatggagtgcgacgcctgtgggatgcagcagtcagtaagaaccggcctaccaagtgtgcggcctctgctccactgcgcacccggattctgtttccccggtccctgtcccgccggattcactgggaatggctcacattgcaccgacgtcaatgagtgtaatgcccacccttgcttcccacgagttcggtgcataaacacctctcccgggttccgctgtgaagcctgccctcccggctattccggccccacccaccagggagtgggactcgcctttgctaaggccaacaagcaggtatgtaccgatataaatgagtgtgaaacaggacaacataactgcgtcccgaatagtgtgtgtatcaacactcggggaagcttccagtgtggaccatgccagccagggttcgtcggagatcaggcctcggggtgtcagaggcgtgcccagaggttctgccctgatgggagtccctcggagtgtcatgaacacgcagactgcgtcctcgagagagatgggtcaaggtcttgtgtctgtgccgtaggctgggctgggaatggtattctctgtgggagggacaccgatctcgatggtttccctgacgagaaacttaggtgcccagaacggcaatgtagaaaggataactgtgtaactgtgcccaattccgggcaggaggacgttgatagagacggtatcggggacgcctgtgatcctgatgctgacggggacggggttccgaacgagaaagacaactgcccgcttgtgcgaaacccggaccaacggaatactgacgaggacaagtggggggacgcctgcgacaactgtagaagtcagaagaatgatgatcagaaggatactgaccaggacggcaggggtgacgcctgcgacgatgacatcgacggggacaggatccggaaccaggccgacaactgtcctagggttccgaatagcgaccagaaggactctgatggggacggtattggcgatgcatgcgacaactgtccacaaaaatccaaccctgaccaggccgacgttgatcacgattttgtgggtgacgcatgtgactctgatcaagaccaggacggggacggccaccaggactcccgggataactgtccaaccgtcccaaactctgcccaagaagattcagaccacgatgggcagggagacgcgtgcgacgatgacgatgacaacgacggtgtacctgacagcagggataactgcagattggtccctaacccggggcaagaggatgcggatcgcgacggcgtgggcgatgtgtgccaggacgattttgatgccgataaggtggttgacaaaattgatgtgtgtcccgagaatgccgaagttactctcaccgactttagggcgttccagacagtggtgctggatcctgagggggacgcccagattgacccaaactgggtcgttctgaatcagggaagggaaattgtccaaacaatgaactctgatccgggcttagctgtgggttacacagcctttaacggcgtggacttcgaggggactttccacgtgaatacagtgacggatgatgactacgccgggttcatattcgggtaccaggattcaagcagcttctacgtcgttatgtggaaacagatggagcagacttattggcaggcaaacccctttcgagctgtggccgagcccggcatacagttgaaggctgttaagtcctctaccggtccaggtgaacagctgcgtaatgccctgtggcacactggagatacagagtctcaggtcaggcttctgtggaaagatccaaggaacgtcggttggaaggacaagaaaagctacaggtggttccttcagcatcgcccacaggtaggttacattcgagttaggttctatgagggacccgagttggtcgcggattctaacgtcgtactggatacaacgatgcgcgggggacgtctcggggtgttttgcttctcccaagaaaacatcatctgggccaatctgaggtatcgttgcaacgataccattcctgaggactacgaaacccaccagcttcgccaggcatag

SEQ ID NO: 1531 - DNA, 2274 bp, Artificial Sequence
  derived and/or modified sequence
atggtacctgacacggcatgcgtgttactgttgaccttggccgctcttggcgctagcgggcaaggtcagagcccgctggggagtgacctgggccctcagatgctgagagagttgcaggagacaaatgccgccctgcaagacgtccgtgagctccttcgtcagcaagtgcgtgaaatcacctttctgaaaaatactgtgatggagtgcgacgcctgtggtatgcagcaatcagtcagaacgggcctcccaagtgtgcgacctctgctgcattgtgcaccaggcttttgttttcccggcgtggcctgcatacagaccgaaagcggggcccggtgcggtccgtgccccgcaggctttaccggcaacggcagccattgtaccgatgtcaatgagtgcaacgctcacccttgcttcccgagggtgcgctgcatcaacactagcccgggatttaggtgcgaggcatgtccgccagggtactctggacccactcaccagggcgtgggactcgcctttgctaaagcaaacaaacaggtttgcactgacataaacgaatgtgaaacagggcagcataattgcgttcccaattccgtttgcattaacacccgggggagcttccagtgcgggccttgccagccgggattcgttggcgatcaagctagcgggtgccaaagaagggcccagaggttctgtcccgatgggtcgcctagcgagtgccacgagcatgcagactgcgtactggagcgggacggttctaggtcctgtgtttgtgctgttggctgggctggtaacggaattttgtgtggcagggacacagatctagatggttttcccgacgaaaagttaagatgcccagagagacagtgtcgtaaagacaactgtgtgacagtgcctaacagcggccaggaggatgtggatcgggacgggattggggatgcatgcgatcctgatgccgacggagacggtgttcccaatgaaaaggacaactgtcccctcgtccggaacccggatcagaggaacaccgacgaggacaagtggggcgatgcctgcgataactgccgatctcagaagaacgacgaccagaaggacaccgatcaagacgggaggggtgatgcttgtgacgacgatattgatggcgatagaatacgcaatcaggcggataactgccctcgtgtcccaaatagtgaccagaaagactctgacggcgatggtattggcgatgcatgtgataactgccctcagaagagcaacccagaccaggccgacgtcgatcatgatttcgtgggcgacgcatgcgatagtgatcaggaccaggatggcgacggccatcaggatagccgcgacaattgccctaccgtcccgaacagcgcccaggaggactccgaccacgacggtcaaggcgatgcttgtgatgacgatgacgacaacgacggcgtccctgatagcagagataactgcaggctggtccctaatccaggtcaggaggatgctgatcgcgatggggtgggagacgtgtgtcaggacgatttcgacgctgacaaggtggtggacaagatcgatgtgtgcccagaaaacgctgaggtgacattaaccgactttagagccttccaaactgtcgtgttggacccggaaggagatgcccaaatagatccaaattgggttgtcttgaaccaaggccgggagatcgtgcagaccatgaattctgatcctggactggctgtgggctacaccgcattcaatggcgttgattttgaggggaccttccacgtgaatacagtgactgacgatgattatgctggttttatcttcggatatcaggattcttctagtttctatgtggtaatgtggaagcagatggaacagacctattggcaagcaaaccctttccgtgcagtggccgagcctggcatacaactaaaggctgtgaaaagcagtacaggcccgggcgagcagctgaggaatgccttgtggcacactggagacactgaaagtcaagttaggttactgtggaaagatccacgtaacgtgggctggaaagacaaaaaatcttacaggtggttcctgcagcacaggccacaagtcggctacattagagtccgcttttatgaagggccagaactggttgcagattctaatgtcgtactggatactactatgaggggcggacgtctcggagtgttctgtttcagtcaggaaaacataatctgggcaaatctgcggtacagatgtaatgatacaatccccgaagactacgagacacatcagctgagacaggcctag

SEQ ID NO: 1532 - DNA, 2115 bp, Artificial Sequence
  derived and/or modified sequence
atggtgcctgacacagcctgtgtgctgctgctgaccctggccgccctgggcgccagcggccagggccagagccccctgggcagtgacctgggcccccagatgctgcgggagctgcaggagaccaatgctgccctgcaggatgtgcgggagctgctgcggcagcaggtgcgggagatcaccttcctgaagaacacagtgatggagtgtgatgcctgtggcatgcagcagagcgtgaggacaggcctgcccagcgtgcggcccctgctgcactgtgcccctggcttctgcttccctggggtggcctgcatccagacagaaagtggggcccgctgtggcccctgcccagctggcttcaccggaaatggcagccactgcacagatgtgaatgaatgtgaaacaggccagcacaactgtgtgcccaacagcgtgtgcatcaacacccggggcagcttccagtgtggcccctgccagcccggctttgtgggggaccaggccagcggctgccagaggcgggcccagcgcttctgcccagatggcagccccagtgaatgtcatgaacatgctgactgtgtgctggagagagatggcagccgcagctgtgtgtgtgctgtgggctgggccggaaatggcatcctgtgtggccgggacacagacctggatggcttcccagatgagaagctgcgctgcccagagcggcagtgcaggaaggacaactgtgtgacagtgcccaacagcggccaggaggatgtggacagagatggcattggagatgcctgtgaccctgatgctgatggagatggagtgcccaatgagaaggacaactgccccctggtgagaaatccagaccagaggaacacagatgaggacaagtggggagatgcctgtgacaactgccgcagccagaagaatgatgaccagaaggacacagaccaggacggcagaggagatgcctgtgatgatgacattgatggagaccgcatccggaaccaggccgacaactgcccccgggtgcccaacagcgaccagaaggacagtgatggagatggcattggagatgcctgtgacaactgcccccagaagagcaacccagaccaggctgatgtggaccatgactttgtgggagatgcctgtgacagcgaccaggaccaggatggagatggccaccaggacagccgggacaactgccccaccgtgcccaacagcgcccaggaggacagcgaccatgatggccagggagatgcctgtgatgatgatgatgacaatgatggagtgcctgacagccgggacaactgccgcctggtgcccaaccctggccaggaggatgctgacagagatggagtgggagatgtgtgccaggatgactttgatgctgacaaggtggtggacaagattgatgtgtgcccagaaaatgctgaggtgaccctgacagacttccgggccttccagacagtggtgctggaccctgaaggagatgcccagattgaccccaactgggtggtgctgaaccagggccgggagatcgtgcagaccatgaacagcgaccccggcctggccgtgggctacacagccttcaatggagtggactttgagggcaccttccacgtgaacacagtgacagatgatgattatgccggcttcatcttcggctaccaggacagcagcagcttctacgtggtgatgtggaagcagatggagcagacctactggcaggccaaccccttccgggctgtggccgagcccggcatccagctgaaggctgtgaagagcagcactggacctggagagcagctgagaaatgccctgtggcacactggagacacagagagccaggtgcggctgctgtggaaggaccccagaaatgtgggctggaaggacaagaagagctaccgctggttcctgcagcaccggccccaggtgggctacatccgggtgcgcttctatgagggccctgagctggtggccgacagcaatgtggtgctggacaccaccatgaggggcggccgcctgggcgtcttctgcttcagccaggagaacatcatctgggccaacctgcgctaccgctgcaatgacaccatccctgaggactatgagacccaccagctgcggcaggcctag

SEQ ID NO: 1533 - DNA, 2235 bp, Artificial Sequence
  derived and/or modified sequence
atggtgcctgacacagcctgtgtgctgctgctgaccctggccgccctgggcgccagcggccagggccagagccccctgggcagtgacctgggcccccagatgctgcgggagctgcaggagaccaatgctgccctgcaggatgtgcgggagctgctgcggcagcaggtgcgggagatcaccttcctgaagaacacagtgatggagtgtgatgcctgtggcatgcagcagagcgtgaggacaggcctgcccagcgtgcggcccctgctgcactgtgcccctggcttctgcttccctggcccctgcccagctggcttcaccggaaatggcagccactgcacagatgtgaatgaatgtaatgcccacccctgcttcccccgggtgcgctgcatcaacaccagccctggcttccgctgtgaggcctgccccccaggctacagcggccccacccaccagggcgtgggcctggcctttgccaaggccaacaagcaggtgtgcacagacatcaatgaatgtgaaacaggccagcacaactgtgtgcccaacagcgtgtgcatcaacacccggggcagcttccagtgtggcccctgccagcccggctttgtgggggaccaggccagcggctgccagaggcgggcccagcgcttctgcccagatggcagccccagtgaatgtcatgaacatgctgactgtgtgctggagagagatggcagccgcagctgtgtgtgtgctgtgggctgggccggaaatggcatcctgtgtggccgggacacagacctggatggcttcccagatgagaagctgcgctgcccagagcggcagtgcaggaaggacaactgtgtgacagtgcccaacagcggccaggaggatgtggacagagatggcattggagatgcctgtgaccctgatgctgatggagatggagtgcccaatgagaaggacaactgccccctggtgagaaatccagaccagaggaacacagatgaggacaagtggggagatgcctgtgacaactgccgcagccagaagaatgatgaccagaaggacacagaccaggacggcagaggagatgcctgtgatgatgacattgatggagaccgcatccggaaccaggccgacaactgcccccgggtgcccaacagcgaccagaaggacagtgatggagatggcattggagatgcctgtgacaactgcccccagaagagcaacccagaccaggctgatgtggaccatgactttgtgggagatgcctgtgacagcgaccaggaccaggatggagatggccaccaggacagccgggacaactgccccaccgtgcccaacagcgcccaggaggacagcgaccatgatggccagggagatgcctgtgatgatgatgatgacaatgatggagtgcctgacagccgggacaactgccgcctggtgcccaaccctggccaggaggatgctgacagagatggagtgggagatgtgtgccaggatgactttgatgctgacaaggtggtggacaagattgatgtgtgcccagaaaatgctgaggtgaccctgacagacttccgggccttccagacagtggtgctggaccctgaaggagatgcccagattgaccccaactgggtggtgctgaaccagggccgggagatcgtgcagaccatgaacagcgaccccggcctggccgtgggctacacagccttcaatggagtggactttgagggcaccttccacgtgaacacagtgacagatgatgattatgccggcttcatcttcggctaccaggacagcagcagcttctacgtggtgatgtggaagcagatggagcagacctactggcaggccaaccccttccgggctgtggccgagcccggcatccagctgaaggctgtgaagagcagcactggacctggagagcagctgagaaatgccctgtggcacactggagacacagagagccaggtgcggctgctgtggaaggaccccagaaatgtgggctggaaggacaagaagagctaccgctggttcctgcagcaccggccccaggtgggctacatccgggtgcgcttctatgagggccctgagctggtggccgacagcaatgtggtgctggacaccaccatgaggggcggccgcctgggcgtcttctgcttcagccaggagaacatcatctgggccaacctgcgctaccgctgcaatgacaccatccctgaggactatgagacccaccagctgcggcaggcctag

SEQ ID NO: 1534 - DNA, 2274 bp, Artificial Sequence
  derived and/or modified sequence
atggtgcctgacacagcctgtgtgctgctgctgaccctggccgccctgggcgccagcggccagggccagagccccctgggcagtgacctgggcccccagatgctgcgggagctgcaggagaccaatgctgccctgcaggatgtgcgggagctgctgcggcagcaggtgcgggagatcaccttcctgaagaacacagtgatggagtgtgatgcctgtggcatgcagcagagcgtgaggacaggcctgcccagcgtgcggcccctgctgcactgtgcccctggcttctgcttccctggggtggcctgcatccagacagaaagtggggcccgctgtggcccctgcccagctggcttcaccggaaatggcagccactgcacagatgtgaatgaatgtaatgcccacccctgcttcccccgggtgcgctgcatcaacaccagccctggcttccgctgtgaggcctgccccccaggctacagcggccccacccaccagggcgtgggcctggcctttgccaaggccaacaagcaggtgtgcacagacatcaatgaatgtgagaccggccagcacaactgtgtgcccaacagcgtgtgcatcaacacccggggcagcttccagtgtggcccctgccagcccggctttgtgggggaccaggccagcggctgccagaggcgggcccagcgcttctgcccagatggcagccccagcgagtgccacgagcacgccgactgtgtgctggagagagatggcagccgcagctgtgtgtgtgctgtgggctgggccggaaatggcatcctgtgtggccgggacacagacctggatggcttcccagatgagaagctgcgctgcccagagcggcagtgcaggaaggacaactgtgtgacagtgcccaacagcggccaggaggatgtggacagagatggcattggagatgcctgtgaccctgatgctgatggagatggagtgcccaatgagaaggacaactgccccctggtgaggaacccagaccagaggaacacagatgaggacaagtggggagatgcctgtgacaactgccgcagccagaagaatgatgaccagaaggacacagaccaggacggcagaggagatgcctgtgatgatgacattgatggagaccgcatccggaaccaggccgacaactgcccccgggtgcccaacagcgaccagaaggacagtgatggagatggcattggagatgcctgtgacaactgcccccagaagagcaacccagaccaggctgatgtggaccatgactttgtgggagatgcctgtgacagcgaccaggaccaggatggagatggccaccaggacagccgggacaactgccccaccgtgcccaacagcgcccaggaggacagcgaccatgatggccagggagatgcctgtgatgatgatgatgacaatgatggagtgcctgacagccgggacaactgccgcctggtgcccaaccctggccaggaggatgctgacagagatggagtgggagatgtgtgccaggatgactttgatgctgacaaggtggtggacaagattgatgtgtgcccagaaaatgctgaggtgaccctgacagacttccgggccttccagacagtggtgctggaccctgaaggagatgcccagattgaccccaactgggtggtgctgaaccagggccgggagatcgtgcagaccatgaacagcgaccccggcctggccgtgggctacacagccttcaacggggtggactttgagggcaccttccacgtgaacacagtgacagatgatgattatgccggcttcatcttcggctaccaggacagcagcagcttctacgtggtgatgtggaagcagatggagcagacctactggcaggccaaccccttccgggctgtggccgagcccggcatccagctgaaggctgtgaagagcagcacaggccctggagagcagctgagaaatgccctgtggcacactggagacacagagagccaggtgcggctgctgtggaaggaccccagaaatgtgggctggaaggacaagaagagctaccgctggttcctgcagcaccggccccaggtgggctacatccgggtgcgcttctatgagggccctgagctggtggccgacagcaatgtggtgctggacaccaccatgagaggaggccgcctgggcgtcttctgcttcagccaggagaacatcatctgggccaacctgcgctaccgctgcaatgacaccatcccagaagattatgagacccaccagctgcggcaggcctag
